United States Patent Application Publication US 2007/0054278 A1 - sequence listing, part 46

SEQ ID NO: 94711 - DNA, 92626 bp, Homo sapiens
  misc_feature (1)...(92626): n = A,T,C or G
gatgctttacctggagcacatcatatgactgaactcatttttttttttttgagatggagtctcgctctgttgccaggctggaatgcagtggcacaatctcggctcaccgcaacctccgcctcccaggttcaagtgattctcctgcctcagcctccggagcaactgggattacaggcatgcaccaccacacccagctaatttttgtatttttaggagagacggggtttcaccatgttggccaggctggtcttaatctcctgacctcgtgatccacccacctcggcttcccaaagtgctgggattacaggcgttgagccactgtgcctggcctcaactcattattttatccccagacctgctttacctctggtatttcttatgccagttaatgacattgcccaaaccagaaactttgaagtcattgctggctccatcctctccctctccctttcaagaatccaattaggaaattccaccaatttaacttctcaatgatttccttgcctttcagtattcaccactattccgtgcctctagttcagacagacccctctctgaccacttcctcttggcctcttgtcaacttctccttcttcttctcctaaacagtaaatgccaacaccctttggcctgcttttcttctgcccaaccctagacccttccccatcacgcgggcgcggacacacacacacacacacacacacacacacacacacagcttctgtctcattcattgtcatggcttcagttacaggatgaagattcacatttacatctccagcttgtgtctgggagcctacgtactgtctctacttaaatgttttatagatacctcaaacctaactcttccaaactaaatttatcatttccccttaaatcttttaccctttaccattctttatctctgaaaaggcaacaccattctcccatctgcttcagcgagtgacccggaaattcatcttgactcctttattctccctttacaagtcttcttgattctacctctcaggtatcttttgactcttcattctcattttcatcacctgatacaagtttatgctaataccatctctatcttgcacaccttaaaagcaacatccttgaccaggtgcagtggctcatgcctgtaatcctagcactttgggaggctgaggtggttggattgcctgagctcaggagttcaagaccagcctgggcaacacagtaaaaccccatctctactaaaatacagcaatgacaaaattagccaggcatggcagcgtgcacctgtagtcctagctacttgggaggctgaggcaggagaattgcttgaacctgggaggcagaggttgcagtgagccgagatcacgccactgcactccaatctggatgacagagtgagactccatctccaaaaaaaaccaaaaagcaaaacaaaaacaaacaaacaaaaaaacaacatcctcccaactacttcatctgttctctccccacacacataccctgtacatcgctaccggagcgatctcatgcaaacccttcagtgtctctccactgcctaaaggataatgttcaaactcttcagtgacataacacactcgtagcaggccctcattgtgtgatccctaactcttcaggttatactctcattacactccacctccctgcatctgatgctccagaaatattgaactatgtgtagttctctgctcccatcacacttcagaactcccatataatctcttctttctgcttgggatggtctcacttattgtctgcctgtacacacactccttttcagcctgcagaacttgctcagtcatcgccatttttgagtatttcttattcctcatttttctggaacagaattttgacttcttctgtgttacatttctgagctgtgtacatatttgaaactatctacttatctgactttctctctaactagaacactttttcacaaggaaaggaactatattttcatcacgacagcatctaccacagtgccttacagatagcaaaactcaataaatgttgaactaaagttctgcttgtcgtggatgaagaaaaccacttcacatggtgtaatagatggaattttgggaaaattatttcaagtgataaaaataaagattttgttaagcaatgatattgctatgtcatatatttagatgttaataaaaattaatctaagacaattccataaaaacggaaaagtcaatttctgcactcaaactacaccttattgccttagaaacagagtattttgactcttgttatcatcgttcataatttatgagtatgtcttatctcccctatctctaaaatatacccaaaatctgtccccttgattccattgctaaactaaactgcagctccgggccaccatcatatctcatctggactactgcaaaagccacctgacaggtcttctccacatggcagctgtagtgctcctttttaaatatatgaatagatcagatcatgtcactttcctgttacaaaacctccaattgcttcccattgtaccagaatattcaaactccttaacatggcctacatggtcctaaatgatctgctcttctgcacccacactacctctgtggctgagcctgttccaccacctttcccacagtacttctgcctcactagctgttagtgttcattgaccgggttagcatcttagagcctctgcacctgttccctccacctccacaaccctgcatggcagtcttctcctgtcatgcagatgtcagctcaaatggcatctccttaaagaggtcccctttcccacccaatttaaagcagctcccagacaccctgttctgttttctctctctctctttttttttttctgagacggagttttactcttgttgcccaggctagagtgcaatggtggaatctcggctcactgcaacctccacctcccgggttcaagcaattctcctgcctcagcctcccgagtagctgggattacaggcacgtgccaccacacccagctaatttttgtatttttcatagagacggggtttccccatgttggccaggctggtctccaactcccaacctcaggtgatccacccaccttggcctcccaaagtgctgggattacaggcgtgagccaccacgcccggccattttcatttttaaccacttagcagtagagctgagtggtaaagcacatgagcactaggctcagactctgggctcacataccagctggatggcttgggcaaagcacttcatctttcagtgcctgtttttagagtaacaatggtacctatttcgtagaatcgttatgaagctaaattagttaatatattcaaagtgcttaccacagaattacctcatagcaaggcaaattaatgcatgttgcttattaatttttgtttgtttattgtttggctcttccttctgtatcatgcttacatcctcccctgaacccctccccaccaccctccaagcatataaaatcaaagagtcgaaaccttacagcctgcctgccacaacttctttatttcccagtgtaggccaggtatgtttgttgaatgaatgaagtattgaaaacaagtgatgaaggtgtttatacttatctcaaattagtctcattttaaaaaactctcagatctacagaggctctcagatttctgatctgagaattactacagtttctttgttctttcttagtttctatctcttagtgtactgcttaagggaagccacacttcactgagaggcagaaataaatattgctactatcacttacaaactagaggaatatgagtaagccatttggctgcgctaatcctcaagaggctcatctataacaccgagtgtgttaactgctggtggaagagggaaggctgagttaggtgtggggatttttggatttgtttgcttgtttgtttttggttcggtttggttttgtcattagctctaagatctatgtttttatgaacatatagtcaaaatctaagagaaaagtattgtcgacaaggtaaaacttggatttattttgcagatttcctgaaagcaagtaatgtaactaaatccagtagtcagcttggtttatatctccaggattattcctaatcacccataaagattagcttctggctgggcgtggtagttcacacctgtaatcccagcacttttggaggctgaggcaggtggatcacctgaagtcaggagttcaagaccagcctggccaacacggtgaaaccctgtctctactaaaaatacaaaattagctgggcttagtggcaggcatctgaaatcccagctactcgggaggctgaggcagaatggcttgaacccgggaggcagaggttgcagtgagccaagattgcaccattgcactccagcctgggtgacaagagcgatgctctatctcaaaaaaaaaaagaatagcttctaattttctacacatatactcacacacaaacataaacataaacattcctatctgtttagagttatgagtttaaccagtaacttaaaagacagagagagagagagagagagagagagagagagagagagagagagagagaggccaggtgccgtggatcatgcctgtaatcccagcactttgggagactgaggtgggcagatcacaaggtcaggagtttgagaccagcctggccagcatggtgaaaccccatctctactaaaaatacaaaaatcagccaggtgtggtggtgggcacctgtaatcccacctactgaggaggctgaggcaagagaattgcttgaacccaggaggtggaggttgcagtgagctgagatcgtgccattgcactctagcctgggcgaaaagagcaagactccgtctcaaaaaaaacaaaaaacaaacaccaaaaacaaacaaaacaaaaaaaagagagagagagaacttgcttgaaataccatgaaagtgtgcccttcttatcagttttccttcaatgttgaagaggaagccaactgtttcctaaaaatctcattatcagaaccaaatttatggttatttcacttctattaatttgattaaattaaaattaccatcttaagatgcataattatatatactaggtgttttaagaccttcatcaataagtttggagttgtcatcctaccactttcttgaaacaggtcttctaactgttttccttctggatttctggttgaaattttgctagtgaagttttctctctcccattcastactcacccacccctcctcacccccaatcattaacaagaaatctgggtttaagtgtatttctgctaccattgactcactgaaagaatttttcaggtgatatccacacgtttctccaataaaaagttattattttttccctttgtagtaatttgtggagagatcttctgatgaaggaccaaaattctgtgtcaaatttttaccctctagttttagcattcatttatgattttctatggatactagctggcattctattttaagaaaagcctttcttctttcctcatttatttatattaatatagattgttgagttttattttaatcaatgggttatccattatgatgatttatattgatggtaaaattatcccagcttcagccactgggagacccttcaagctggcagctgtggacctttgaccagttcctatcattttttgagcacttccgcatctctggcacaacaggttcatcttgtactttacagccccagccctggtatcagccttttctccagaggttgtgtcaaaaagccgtggttcctcttattggagcataggatttagaaaccaagacttgggtgctagatgtactactggcctttcattgcttgagccagaagaatttaatatcttcttttgccatatatcagctagaacttacaaaccactccaagtctggctccagaaaacagaatttttatatcctttctcagtactctgagtcagaatgacccayttgctttgtccagagactcgtcacactgaaactattttccgtttgagaccttccaggaggaaagccatcctcacacgcatgcagtacaaaccagtgtcctccagagtccgctgtgcctacggccagagcagcgacagagccttcctcaaacctgtagtgactgccacactttgcaaggacaccgtagagggggcatgtccgcgctccaacttcctcccgacgcagcctctgattggctcctgggcttataagaaacgcgtgaatgagcagctgccgcgggcagaaagttgccggaggtctccgggtggtatcsccctttcctctttgccagcccgctggcgagccgagccrgggcaagatgaggtcgtcctgtgtcctgctcaccgccctggtggcgctggccgcctattacktctacatcccgctgcctggctccgtgtccgacccctggaagctgatgctgctggacgccactttccggggtgcacagcaagtggtgaggtgcagcccagcgctgcttctctcttcctcctcttacgcaatatttgaaggggatacaaaattcctccgccgggttccacgaaaacgcaggtttttcctaatgcattgaggctgtcgctttttraggtggtccagtcgggaattttcagggtatcgcattcgcctccttgctagcagcgggctagatctgcatttccccgtctgcgtttgtgacggggaagaagtgcttgaatagaatttgacaactgtttaaaccttcgtctgtcctaaatatcttcctcttccttggtttgcaacgtcaaaaggcaaatccttaagcagtttataaaccacccttcttcacactgtcgttctcccatagggaccggcagaggataaatatttttaggagagctcgggaaaagcaggctctggttcctgggaatgcagccaccttagaagcagaagcaggcaagggcagtctcgcaatgtccccaggctgtggagcgctccgttcccggagacagcaggcagggctctccatccaagcacttgaggaaccatagggatctctcgtttcacccgaggcagatctcagctcagcccaagaaagaggactgggaggctgggctggctgaaaggaggtgaggaggcggcagccctggtttgcatgatgcatgttttctgcttgccctgcagcatttattttatgtccttggctgtcagataaccttttcctgagcgaggttacctgccttaacctgggagggtaacatttctctccactgtatcatgggcgtgtgttcattccttccatacacaggaaaatataactgtctctggtttattccatggtaagaggcattatttttagtgtcagagaatctaaaatctaaactacagtctgcagccaaggctgagccctctgattggacagtatttctgagcagcctgctctatctaaactctaaccttctccaaaaccaagcctcctccctccccacaaccttgggctttaatctcagaatatttttataaactctttctttcagaaatgacaactagagaaagagaaaaaaaatcatttcaacctgagaaagctgattttaaaaaagtcatgattttcccagagggtttatgttcctgttccctgtccactcattatgtgtaggattacataatctgtggggctttatcctatgaaaagtccccttactaggatattgyagcacattcctagcgtggatttgcttttcctgaattcagccacattctcacctccaaagccccttttgtctcttaggaaaggtctatgaagctatagacccctgccccccttcttttcctcttgcttcctataatgttgacatggtgaaaatgatcatccccttctttagcactggtgtcaagaaagtcagtcttgttgtaggaagccttgcattccctctcctcccccatgaaattatgtaatttgaaagtaatacccttcaaagattgaggaacagtgatgtttacctgggtgggttaatggtctactacaataacttaaacagaggaaaacaggaaaaagatcaaactgctgtgttggctgcagagattattcttagttttcaggtcaccaaagaagtcttctccatcataagttaatctcggacaagctaggtttggagaaaagcttttctttcccagctaggcttgccagcccattaaggacaaggctgtgtaaggtcctccacagagtataccctcaggtggtgcttgggaatgatagtgggtgtaacctgaagtcagcaatagatgaggtaaccagtgttctcacctgacactgtggctcaggagtggatttgcagaaaaatggctcttatcacttctcctctaaattgtgaaatatcagaaagatcattatgatcagatggaaacatattctacccaataaagcaattttccagtgtcacctcaaatcttcctgagttttccctgtaaaatagggcaaaaaactaccttgtaggtttgctataaggtttagtaatgtatttaagtgcctggtacttgtagtgagtcttctagttgtccccaagggtccattgtggattgtgggaacatctataagaatgcttaccttttttgaagcaataaaataaatgtaaactggaagtaatttatgtgattgaaacctggagtgctactactaaattacctggtgtcatggcctggggcggtggctcacgctgtaatcccagcactttgggaggccgaggcgggtggatcacgaggtcaggagttcgagaccagcagcctggccaacatagtgaaacctctttctactaaaaatacaaaaaattagccagggctggtggcaggtgcctgtagtcccagctacttgggaggctgaggcaggagaatcgcttgaacctgggaggcggaggttgcgttgagtcgagattgtgccactgcactccagcctgggcaacaagagtgaaactctgtctcaaaaaaatatataaataaataaattgcatggtgtcaacctcgttactcagataattttagtttgagttgattggctcaactacaaaagcaattkaagctgtttgagagattaagctcagcctatttcctaagacagcatcagctgcctaccattaagaaatgtgaatgttagtttattctgttgtcattggcaaatactttatgctttagcattttttatgtcctttatcttgtgcagtgagtcagactattgagattatgttcattgtgctttttttccttggggttccccatattccttaagaagcagctacttaggatctctctgactcctctcaaacacagatgctatgtcagaatcacctaagaactgtttaaaacaaaccaaaccaaaacaaaacacttgatgcccaggttacaccacataccaaacttacttagaatctctgggagatgaacgttcttagcagtgtttaagaaaagttccagccgggcgcggtggctcacgcctgtaatcccagcactttgggaggccgaggcgggcggatcacgaggtcaggagatcaagaccatcctggctaatacggtgaaacctcgtctctactaaaaatacaaaaaaattagctgggcgtggtggcaggctcctgtagtcccggctactcgggaggctgaggcaggagaatggcgtgaacccgggaggtggagcttgcagtgggccgagatcaggccactgcactccagcctgggcaacagtgtgagactccgtctcaaaaaaataataataataaaaataaaaaacgaaaagttccccagatgatcttcattgcagcaaaacttgagaaccactgctctataagataaaaggcattgctgttgtagacaatatattttccttaaactgcgtgttatattgcatacgtgttgctggaaatgagcccttttacattagcatggattagtttatcagattagttgacactttggccctaaggggataaaatactagctaggcaaatttctgtgttatagcaaagccaccataagacttgagcagtggaaaagcacaaacaaaagtaggtctgagaagggcagaggtgtaatttagatgatcaggcagcaggagactagaggaacaaaagaagagagtttggggaagtcctgaaggctgatttccaaatgctatgcagacaaagatttttttttttaaatggtaatctcagtgcaggttaaaatactaagtgtacactgctggagaaaatgtatgttagaaccacgtttttggagaacagtttggcaatatccatcaaagccttataagtgtgtttattttttgaccccgtaatccctctagatggaatttatggtaagtaatgatggatataggcaaacctctagctataaagatggaaacattttacaggattaaaaaacttgttcatcagcaccgtaagacaaagaaaaaaaacaaaaacttgttgaacttgtctaaaagcactgccacttataataaacgtgaagtaaaatcgagcaatctttttttcttttatttgcagcaccatttaaacgaatgaaggtcgggtgtggtggctcatgcctgtaatcctagcactgtgggaggtcgaggcgggcgggttacctgaggtcaggagttcaagaccagcctggccaacatggtgaaaccccgtctctactaaaaaatacaaaaaattagccgggtgcagtggtgcgcgcctgtaattccagctacttgggaggctgaggcagaagaatcgcttgaaccagggaggtggaggtttcagtgagccgagatggtgccactgcactctagcctgggctacagtgagacttcgtctcaaaaaaaaaaaaaaaaaaagaaaaatgtaagaacagtaaaagattaaataatggtaaattcatatttgggaatactaggcagttaaaaaaatttaggttgtaaaatgtttaatgacttgcaaaagatttgtaccatgtgttaagcaggaaaaggctacaaaatagatcatacactatttatatatcaaaacatgtatctatgtttgtatagaaaaagcagaaagatataatttaaaacatgatttttttcttctgggccataaagttgatcttcagttttcgtatggtgtatctagattttctacaatgaacatgtagtaataaattattttaaagctttttttaatccaggcatggtagctcatgcctgtaaccccagcactttgggagactgttgtgccaaacccccattaacctcagtagtgaaggcaccaggttgaagaggctgaagaagattcccagagcctgcaaacaagacatgggttttttttttttttttttttttggttgttgttgttgagatggagtctcactgtgtcacccaggctggagtgcagtggcgtgatctcagctcactgcaacctccacctcctggtttcaagtgattctcgtgcctcagcctcctgagtagctgggattacaggtgcccgccaccatgcctggctaattgttgtattttttagtaaggacagagtttcaccatgttggtcaggctggttttgaactcctgacctcaggtgatccaccagccttggcctcttaaaatgttgggattacaggcgtgagccaccgtgcccagccaaaaatagggttttattaggggcttgcatacaagggaaagagtccagtggtggtgggctggacagaagaaccactttatatatagaaaaggggcattggcaggaggctggacaacatatctgtctttctacagtccagtggtggcaggcagggcaggaaaatcacaactgcctacaaacatgtagtttacatagcattgtcacttgacgtcttccccctaatgacttccacctggcaaccttcatttaacccaaaactcagggcctcaatyccctgtacatcccatgttacatgatgggcggtgctcacatgtttatcatagataaagaacaaatcactgggttgggcacttggggactccttaactcagaacacacatttaggtgtgtctgccatacagggtcattctcagaatgtgcttaggttattgctatcagctgagtttacagaggctgaggtgcaaggatcacttgaggtcgggagttcgagagcagcctgggcaacatagtgaaactatgccaccctccccatctctacaaaaaatatctttcaaaacaaaaagtaacttttccccccagggataatttttctatttctaaagtggaactgatgtgcatatgcatatcaatatatattttagtatttgctttatgagaaaaatcgaatttcttttaaaaagactttctggatcccctgatatagctatcatagtgccatgctttgtgctcagttacctagacttaacatggattgaaatcctgtgtgaagctatggagagtcactaaagtgacctagaagaaaccacagtctagtaggatggagaagtcatgttaatatatagctattaaaaagctggaagctgataggtgtagaacaggtgtagttacaaagtctcataggagggagagtctatgtatagtttagaagagtgatcctcccgctttggcttcccaaagtgctgggatcacaggcataagccaacgtgcctacctgtaattgaattttcaagtgaaaaacctgactatattgcctgcctaatctaagatgtgtcatattatgaaattttaacaagctctctttcagtgtttaataaaattaaaaccctggaagtgatcacttattaaatgaacaccaaggcaaggagctggtctggcaaaacagaaatgtgtaaggcagaaacctaaacttgagaagcttacagtcaagtgaaggatgataaaccaactgccagtgatagggtaggtgcttgaatgatggaaggaaaatgtggctaaaggtaataatggtgtcccaagagagctcggagcatgagcctggcttgtcttgattattttctaacttactactgcttacactatgaatcttttcagtgacacaatgtaaaagaagtgctgaaattggtatttatgctgagtgttccccctgtttcttatgggtgacagtgcttttggactagttgatcaaggatttttatcttgccaaatgtccccaaacttgttgagatttartgtcacctcacctgaattctctgtgcatratgtgcttttgggctgtgtgggtgtggtttaaatgacagctcagctggaaactgtgcagaacttcaacgtgctaataatctctttcataacagttttgaactggaatatttactattgtcaggtgaatttaactttaaaacatcagtaaataatgattgtccagaaattrtgatgatgcgtatttcttcatgcacattagtaacttcactaaccacaatttttagctgatttgctaggatttttctttaaacatatggaggcaaaaggttttaagaatagtgtcaggggcattatttaatcagtrttagttctgacaggtgaacaacctgagttggtctctgcmgatagtacctatgaaacattaaggtcagattgattcagctacctggtgtgtaagataatgcccaatttatagtttcctttttattttttctggtacttctacaaatataaccctgagcatagaaataccctcattattttaatgggacatcctatttctaccatgcaatttgagcttgatctgagacatttctgtgaagtgtgaaagtacagttaatcattcttaaatgttctttttatgcacaattgcttcttttaaaatagcattttaaaatagcatatatttactttttttttttttttttttttttgagacagagtcttgctctgtcactcaggcgggaatgcaatggtgcgatctcggctcactgcaacctccgcctcccaggttcaagcagttctcccgcctcagcctcccgagtagctgggattacaggcccccgccatgatgcccggctaatttttttttgtatttttgtagggatggggtttcaccatgttggccaggctggtctcaaactcctgacctcaggttatccacccgccttggccttctaaagtgctgggatkacaggggtgagccactgcrcccagccatatttacttttytaaagaaaatatgtaacactgcaaatgtgtgtcatccttctgcaggggcatgctagtcctctctgaactgttatggttttagtgtatgtgctgctgaagtgagcaccatatatttacttttgmtgccaaatgaaattatgtgggaactgtctaccacttctctttcattttatgtttatatagaatgaagaaatgtaattgaatttattttcgttttttactttttatttttttcttacagacaaggtcttgctctgtcacccaggcagggatgcagtggtgtgatcacagctcactgcaaccttgaacttctgggctcaagggatcctcctgcctcagccttttgagtagctgggactacaggcgcgtgccaccatgcctggctatatttttctttttttattttttaggagagacaaagtcttgctatgttgcccaggctggtctcaaactcctgggctcaagtgatcctcttgctttggcttcccaaagtgctgggatcacaggcataagccaccgtgcctacctgtaattgaattttcaagtgaaaaacctgactatatcgcctgcctaatctaaggtgtgtcatattgtgaaattttaacaagctctctttcagtgtttaataaaattaaaaccctggacgtcatcacatattaaatattaaggagctggtctggcaaaacagaaatgtgtaaggcagatacctaatcttgagaagcttacagtcaagtgagggatgataaaccaactgccagcgataaggtgggcacttgaatgatggaaggagaattatgatagaggcatctgtggattgctgcaagagccttggaaagaacatctaaagtggacctgggcactggggaaacgtatctaatctgagatgtcaaggttgagtgcctatagtaaaaatatctattgagcatatagtgagcatttactctgtggcagatactgtgctatgtgctttgtgttcaattagtttagcccatggtaatacaatcaggcaggtgttctttatgtgacaaaggaggagaccgaaatgcaaagaaaagtgacttgcttaagatgacaccgtttatacgaggtggagcctgaattcgattccagcctgtgttactcctgaactcaagagtttagatttgtgctaratttccttayaatagaaaccagagaagagaagggtgaaaggggcattccagccagaagcagcagtatgtgaaagttctgtgggagaggatggtgtagctgaggaactacaagtggtttagactggctggagcttaaagttcaaaggtcagagagggaggcagaagggaagcaccagtcaggtgaggaagagctctgtggaggagaaaggagcaactgacagtcttctagcagagaagtcacatgctcaaaactgtgttttagaatagtccttctcagtggcagtgtagacactggaatgtaagaaagcaaaagtaggccaggcgtggtcgcttacaactgtaatcccagcactttgggaggctgaggcaggcggatcacaaggtcacgagtttgagaccagcctggccggtatggtgaaacccagtctctactaaaaatacaaaaaaaaaaaaaaaaaactagctgggcgtggtggcacgcgtctgtagtcccagctactcgggaggctgaggcaggagaatcccttgaatctgggaggtggaggttgcagtcagccaagattgcaccactgcactccagcctgggcaatagagggagactccgtctttaaaaaaaaaaaaaaaaaaaaaaaaggcaaaagaccatctaggaagcactaatccaggtgagagcatgaactaacaaagtgggactgatttggaggaaagctgatcagagttgctgttggaggggagagtatggagcatcggagaggaaggagtcaaagatgactcctgggacagattctggaatagctgggtgaatggggaccatgaccctgatttgggagcaagagcagatctgagggtgaagatatagagtttgggaccctgttttgaagtgtcagtggactagtccaaggatggctgatcataaacagctgcatatacagatccagagctcaggagacagagctgggctggtgatatggatttgggagtrgtcagcaaatggatagtggcagaagtagttgaaatgaatgtgtttggagtgacagtaagatctggaggattttaccaagggtgcccctcagggacaccagtggcaagtggaaaaagaggctatccctgagagaaatgagaccttaacataactttttagtatacctcatatttataaagtactctagattttatgaaggtttttactaatatcacctcatttcatttttttttcaataaataactggttgccattgttatttccatttgtcagctaagggaacttgaggttcagaaaggctcaaggacaccatcaagatcgtatgatcagggccaggcacggtggctcacacatgtaatcccaaggcaggagaccccttgargccaggagttcaagaccagccttggcaacaaagtaagactgtctctacaaaacatagttagccagatgtggtggcacatgatctcagctactggggagactgaggatctcttgagcctaggaggtgaaggctgtatgatcacaccactacactctagcctgggtgacagagcaagaccctgtctcttaaaaaaattttttaaatttaaacatgtgatcagttatgctggcgaaatgggaactgcaatagaaattcatggactcttagtttcatgccctccctgctgggctatgctgtgaggacactcatgataacttagtcactmgtgaattttttgtcctgattttttttttgagctcccacaattaatctayatcagtgcttcttcttattttttgtgtcatagaaacaattacatttgtatagtatactggggattctggaagcaattttggggraatctgtatgagcttgaataacagaattcacaagatttataaagagttacacaaatggttctcaaatagaatgccaactctgatgccaattattcaactctgtatagttatacaaaatggctttaagtttttacctctataaaatatttaaacattgatagctagtgccccatctgtaatccatttgtagaatacctattgggaagctcacctttctccagtttgtaacttttaaaatatatgtctrttatcattgttattaaacacagatagatagtccccaagttacatgtatttaggtagccgtataatttattgtccaaaccaggacatttttgagagtagcagggactgctattaataatcatgctaggtcaacagtgtttttttctttgttttgagacagggtgtctgtggcgcaggctggartgcagtggtatgatcgtggttcactgcaacctctgcctccccaggttcaagcaatcttcccacctcagcctcccaagtagctgggaccacaggcatacaccaccatgcccagctgatttttgtattttttgtagagatgaggtctccctatattgccagggtgggtcttaaactcctgggctcaagtgattctcttgtctcagcctcccaaagtgctgggattgcaggtatgaggcaccatgcctagctcagtgcaatggttttaaaccagagtgattctcagtcaaacctggacggatgctcaggctgcatttatttgacttgcacacatttggcctaatcaagtcaaggctgtgaaatgatccctcgttcccagtcctgagtgctccaatctgactgttaatcctccagttaccactcctccaccccacccgcacttcctatcccctgtagaataaaagtgctaagttccttggctggcacttggtgcttgctacaacctggcaccattttgctgactgcagcctcactgtgtcatggatgacagttcagctcgtgaatctgcttacgcttctcctgttgtcccctctgtcccagatgccctcccacccttttactttgggcaatatcccacgcatcgttcaataccaactcagaaatcatctcttttgagaacttccccgtctctttccctctcactgcccttccttggccttaatttctctctcaacactctgctagcgttttgkttttcttttatggcccttagatgttgcttatgttgctacttatgtacaggctccccaccaaatcataaattttctctcctatcattgacataattttcctcttactgctttaggacttttatttttgtttgaagaccattcacgatagagagactaaagagaaattaggaattcatggttctgcttccattatcactgtgttaccgcgtctgtcgcaaggggcaggccctgtgcttccacgtgcttctgactctgaatgtagccaaaaatggttttgtgttgtccttcacaactgtgttttgcaagcctcgctgttttctgggtttctaacttcctcatgttttaatagatttatgcttgttttcaaatttgtcatgaattatgtgtctgtttctgactaaatgttaattataggacatctccttaaaagaacactggtgattttccacatttgatagtcatctgccttttctttttccccttgaataggatagttgataaataccccatgagagattgagagacccttttcagagctgcctgtcccataatgttgtccctgccctgagactcaaactatctttctttgaaaactttgaaatctactttttaaaaagtggaagatgtgtatctcactgtttctggtatatgcatcatttccaaggtaaagtcactttgtcccaaggtttcagtcacttccatttcactgaacacagttcttccttgtttgtgagaggcagggccagacagcaattatccgggcttcctgaactttcttagcaaagcaagtcaattctgcttttagaggccgggtgcagtggctcacacctgtaatcccagcactttgagaggctgaggcaggcatatcacctgagatcaggagtttgagaccagcctggctaacacggtgaaaccccatctctactaaaaatacaaaaattagccgggcatggtggcgggtgcctgtaatcccagctacttggaaggctgaggcaggagagtcgcttgaacccaggaggcagagcttgcagtgagctgagatcacgccactgtactccaacctgggtgacaaagtgagactccgtctcaaaaaaaaaaaaaaaaaaaaaaaattctgcttttagaaagtgatcagcttttaacaataagattgctggcagatatctgcataataatagatgcatttgcagaattacaaacacaaccactttataaaatagtagttaatgctctcattttataggaaaggaaatagaggctcaacaaagttaagtaacttcttcacagacatgggcctgcttagtgaagttggctgtgaacaaggtctgctggaccccattgccctttgaactacattcaacagtctcctgttatggttgttcaatcttctgtcttccccttctccctcctctccctccacgctcagctcttttgtggctagttgtatgatccacattaagaatgcatcacattgggaaaaagtgtattatgtatttacaaattttagtcctggaggatgctaatacagtttaaaaaaaaaaaacttgagacaaaataagtttaacagtttatttgagccaagagagctgcactctgcagggtgaacagcaagattctatagatgaaacacccaagagaggtagagaaattacttgattggctacagctaggcattttggcttatttgggtatgatccagtggctagaggttagttagtggtttctgataggttaagcttaagttttattttactgtttatgttgaattgggttttggcctgcttacctgggggctatagctacagtgacaacctcaggctaatggcctcagtatttgctttaaagatatatattggccgggtgctgtggctcacgcccgttaccctagcactttgggaggccaagaccggtggattgcctgagctcaggagtttgagaccagcctgggcaacatggtaaaaccccatctatacttcaaaaaaaaaaaaaaattagctgggcatggtggggcgcacctgtagtccagctactcaggaggctgaggcatgagaatcgcttgaacccaggaggcagaggttgcagtgagccaagatcacgccattgtactccagcctggacgacagagtgagactctctgtcaaaaaaagaaaaaagatatatattacccattgaatagggctctatggttaaataagctaagtttaacagagttaatcaggatttcttttttaactgtaaaacctttgagaactctctgctaatatgtattttgaatcttaaagagagtgtacaatgaatcccaaatttaattgactatagatctcttatttcacaaaacacctcatgaaactgatggtatatttaccaaacattggggaacattttcatagtgtttacgagcatggactttgggatcgaggagacttgtgttcaaatcccggctttgagctatcctagctgtgtgaccttgaacagaggacataacccaagggtttgtttactgatctagcaagtgattaaaatgctccatctggaaagttatgaagattgcacaatatgtgaataaaggtttattgttcattgttatcatcatcaaacattagttaaatatgtaaagcacttggagcaatacctggcacacgagaaatatatttagtccaaatctgatttttgtcagttgtctacactaaactacaaaggtaattttttttttcttttatcgtcaccattattcttgccaatctgctattgctctcaggtttgcggatttctatacaggtgtagatcttcttaacatgggctgctgttggttatggctattaggtttaaatcctgactttagcacctgtgactagttgggcaagttatttaacatctgtgttagtttcttatctgtgaacatgaagataatgacagtacctccttcaaggcttataaggattaaatgtaattgtgtatatgagtttcttaacccagtgcttggcatataacaagaactcaaaacctcttcctaaagttaaagttttagggtccgtagatttagtttgctgatgttctaactggatatatgaatcatcattatcatagctagctcatttttctttttctttttcttttttatttatttatttatttttttgagacagaggctcactctgtcacccaggctggagtgcagtggtgccatctcagctcattgcaacctctgcctcctaggttcaagcgattctcctgcctcagcctcccaagtagctgagattacaggtgtgctccaccatgctcagctaatttttgtattttcagtagagacagcatttcaccattttggccaggctggtctcaaactcctgacctcaaatgatccacccacctcggcctcccaaagtgctgggactacagacgtgagccaccgcacccagctgctagcttgtttttctaaccacgatttgaatacattaacccaatatttataccaaccttgttacataagtactattgttgttatattataaatgaggaaattgaggcacaaagaggttaattaaatatctgcccaagtcacataccccataagtggcagagtcaaaattctactccaggtaatctgtctggaggtagtgctccaaaagctagagaaatcgtctcttagtcactgtcttatatcaaggagctccactgggctttgccaaggtattgttcattttagaattttgtgtcaactgtgaagagttccttaggctgtaggtaccttaggcaaagttgttgaaatgacattttgttaaattaaagtgctttacttgaattctagtcctaatggcrggtgaccttgcctcaatgtgaaggtagtgaagaagtacttacaagcagggttgatattttcctcaacaaagggctttagatttgctcaaatgattgacaactctggggcttagagatctggcctatgagtatggaaaagatgactttgacttctgaagttatgaaayataggtgtcttcagttgaccaccataattgaggaaatataccatgtcctctctatcatgttagttgagcaattattatgtgctagtacttggatatagcarttcacaagacgaacagcacttggtcctcctggagctaaaatccaggctaaaaacatgagatgaataagtaaaggaaatataggaaatagggagaaatttgttggcaggtcagtgataatggaaaccctggaaatccatgaaatcccctgaatgaagaatagtgttagagctgccaagaagaggtggagcctcagaggaagcagaagttgggaaaacaagaaaaaatgggaagaaggcatcagagaagcccagacggagtactgccagcagggtggggctgctatgatgaactgtcctgagaagccgaggaacctgaggactgcaatgggcctgtcagggccccacaagtgcactccaggcacctgtgcctttccattcaaagtctcaacccgtaacctgtctgttggagtgatgtcaaggatgtcctccaaaactgatgttttgactttggcaatgttgatattgagccatcatttctgacaagaaatagtcaaaatatagtttataggytgtgattaaaattcaaggtggaggttaccgatggaaattactgatgtactaaatagtaaaatacacacatacacacacacacacacacacasacacacacacacacatatatataactctttccccaaataactaaattaatgtcagttggttcatcaatgtggaaacatattttacagtctggactcttcacaggcttagtagccttttctgtctgtctcaaaaggttctcatcagattaatagtaaatttagtccattttagattaaatcctattagttctatagttgtataacatttaaatacaggcctggcattgtggctcatgcttggggaggatgaggcaggaagtttgcttgagcccaggagtttgagatcatcctggccaatgtggtgagacccgtctctacaaaaaatttaaaaagttggctgggtgtggtggcacgtgcctatagtcctagctactcaggaggctgaggtgggaggatcatttgaatgcaggagcttgaggctgtggtgtactatgattgggccactgcaccagcctgggtgacagtgagaccctgtctcaaaaaaataaaaaatttaaaaattaaatacacatactatacttttgttaaggacagtgggtcagtattttacaggatactccatgtgccacatttggttcttggcagccacagaggtttctactgaccaaaaccaataacgtgtcagtcatatttcctcacatagctaattaaaattgcacaattctgaattgttcaattaaatgaagcttaatacatggatgaaaagaaaaatagtattattggttacgtctacagaaggaacctctttggtagtgatgttcaattactctaaaaacattaacatggtttctgtctctctcaaagcatatttcgagagcaaataatagaatttaagtgctttaaagagttggactttcatttggstattatgagtggttaaatatctttatctcatccccaactctaaccaccccctcccattttttttttttttcatattcaggctttagaagattggcaagcaatcatgggtagcatgttaaaatttgacacacctgtaatccttaaagttgctgaaatacagattggtccttgtggctttgtgtgcacacggtttgctttcagggtctttttatagatgttgaagttatacttaaacatatagtcttatattttgttatagctcttcttctttctgtttatggaggaaaatgatgcattattcatttttaaagcgccagcatattttcagcagacatttattggctacccagaatgtgtcagacactgcagagtcctggagcttctcatactctgaaaaaccaagatgtagacaatcccaaacaaatatgctgagggcttcagtttgtggtacaaagtgggtcctacgggagccaggttggaggaagcccctgtaagtctgaggaactcagaggaacccagaggaagtgctggctgagctgggtctgaatggatgagaagtagcactctttcaataggaagaacattccaggaagtgaaaacagcaagagtctgaggtgaaagagcatggcagacacaggaagctactgctctggagtttctgaaagtatcaaagtttgaaggaaatctttacatgactgaaccatgggtgggactagcccaccttgtgttgttagatctattacactgctttaattttggtcacttttaataagctaataataggatgatgaaagcacacaaccaacatcaagagtaagtattacttgatgaaataaacttgaaactacttactaaaaatattctaggccaggcacggtggctcacacctgtaatcctagcactctaggaggcygaggcaagtgggtcacttgagcccaggagtttgagaccagcctgggcaacatagtgcaaccccatctctacaaaaaaattaaaaaaaaaaaaattagccaggtgtggtgacatgcacctgtggtcccagctacttgcaaggctgaagtgggagaatcacttgagcccaggaaattgaggctacagtgagcctgtgatcctgccacagccctctagcttgggcaacagagccagaccctgtctcaaaataaaagtaaagagagaaagaaaaataaaaatattccattacgaaccttacagtagcatttaactcctggtggccaaatatataatttgattgaaaacaatgaggtttttcttctgtttggttttagtagctttttgtctttaatagaaacttctttaagtctgtctttcttgctgtatccctaatgtattacttcagacggtcattctttgtttaaagtttgaaacaaacactgcagttgttggcagctatgatgccttattggagacaaaggcttcttgaatgtttgtcaaaaggggtggatctatgcttagagaaggtgacctcttgttttgactacccagtctggtttccctctcacctyctctcactacaccctgttctttctttctttctttctttctttttttttttttttttttttgagacggagtcttgctctgtcgcccaggctggagtgcagtggcacgatctcggctcactgcaagctccgcctcccgggttcacaccattctcctgcctcagcctcccgagtagatgagactacaggtgctgccaccacgcccggctaatttttgtatttttagtagagatggagtttcaccatgttagccaggatggtctcgatctcctgacctcatgatccgcctgcctcagcctccccaagtgctgggattacaggcgtgagccaccgcgcccggccagcaccctgttctttctttaccctcatttgccagttcttcctgtcactggatttgtttaattactcctaagtaattccatctccactgcctggctgaaagctctggaggggaggggcttgtctgtggacttccccactgtgtgcacaactcctaaaagtacctggcacaaagtaaacactcacatatttgctgagtgagtgaatagattgatgagtgaccgaaagtcactcatattcacaattatattgaatacaaattatgtaagaggtgtatgctaaacctaggggaacaaaaatgaaggagagatctagaagctcataatgataatgcaacaagttttaaaagtaaaagcttaaactagagagcacaaaggcaggagtgatggtctgagggatgagttggatagggcaccatagaggaagggatgtctgacatggatactgaaggatggactggggtttggtcatgaggggaagcagaagaaatttcagtaacaaatggaatcctacagtccagcccgctctatgtttggagaaagtatctactgcccagacaagacagacaagttgtgtaagcaaagtgtgtacaaagaagcaaaatataggaatatgagtaggtaaagggtgtttgggcagtgtgtggatgtcagggagtagacaatgtttaagttacataatccctggatgtcatagctgctttaaaaatttccccacagaagcataatttctttagcaaattagaactgaattattttattataaaaggtagataatcatgctatagaaattttggaaaatagaaaaaaaaattacctataatctcaccttaacacaaccactgtttctttttgtgtatgttttgtttttgttaggttgaatatgcactattaacattagaattctaacagaaggatttgtcaaattactgcatattatttccatcttttgtaatggatgcattagagcttgtgtcatttttaaacctaactattctcctattaccaaaaatttagactgtttagttacttgccaccataaataatgttacagtggacatattgtataatctgtttcttaggatttccctcagaagattcctaaaaagtagaactactagatcaaaggctgtaaatatttttgcaggtcctattacatatttccaagttattttccaatttatatggctaatagcaatgtgcaagaatgttgattttgctacacacttttccagaacaattgtaatcgatttttttaacttgttacttcagtggcttaaatggttaccttgtttaattggaatctctttgaaaagagttgacattaaaattcttgttcattccttcaatgaatatttattgcatatcactttgcaccagcactattctggggaaagagcagtaagcaagcataattcctgcgttcatactctgtattcttaaagaaatgttcatttaaaaaaatgcttggctgggtgcggtggctcacgcttgtaatcccagcactttgggaggccgaggcgggtggatcacgaggtgaggagattgagaccatcctggctaacatggtgaaaccccgtctctactaaaaatacaaaaaattagccgggcatggtggcgggcgcctgtagtcccagctacttgggaggctgaggcaggagaatggcgtgaacccgggaggcggagtttgcagtgagccgagatcgtgccactgcactccagcctgggcgacagagtgagactccgtctcaaaaaaaaaaaataaataaataaaataataaaaaataaaaaataaaaaaatgcttgaggggttaaacattttcccccacctcatacagctggcaagtggctacaaagagattataaaatggtctattttactctcagtctttccaattttactatactaccctgagaagggaaatacaggggcttttttttttattttgagatggagtttggctctgtcacccaggctgtcactccaggctggagtgcagtggtacaatctcagctcattgcaatctccgcctcctggcgctcaggtggtctacccgactcggcctcccaagtagctgggattacaggctcgtgccatcacgcctggctaattttgaaatacaagggccaggtgtggtggctcatgcctgtaatcccagcactttgggaggccgagtcgggtagatcacctgaggtcaggagtttgagaccaccctggccaatatggtaaaaccctgtctctactaaaactacaaaaattaggcgggcgcttgtagtcccagctacttgggaggctgaggcaggagaattgcctcaacccgggaggcggaggttgcggtgagctgagatcacgccattgcagtccagcctgggcaacaagagcgaagctccatcccaaaaaaaaaaaaaaaaaaaaaaaagttactccaagtcatttcatgaggtacatgtgaatatcggtcttattgctttatagtcttgcttgttatgaacaaaatgaaatcctcagctttactacaacttattacctagaagaactttggcttttccagaaatcaaattcagcttcaggcaaggagcatttgtccccgctaagggtagtcaaggagtaaaccaaagtctctgaaaacagttctgctgtttagaacaaaacaaaagtttagtcagtggtagccacattagatcgcatatgtgaattcccaactcatttgcaaaggtgaagacatttacgtgctctgaaagttgctttggtttttcagtttatgtgaggattgtcagcttccacccctgcttgggttgtagaatcctgcatgtccagagcgtctgtaagttaccaccaagagtttaacctgtcagccccaaggacaagggccaacaccttgtagcattgcctgtgacccttagcacagtactggacacctatcgtaacactgttataaatagcctacttcctggtatttgagtgtagatagtgctatcctggtgaagggtgaggaggacagcatttaggccacttggactttctttcatataaagatattaaaaatacrtatcttatataaatatgatatcatctcatctattttcctttaatcttctaactccaacccagtaatgatctcagaaaaattaatccttccatttcttttgttatttcccccaagagtgaccataattacctctgacaagactatactcaaatcaaggaaaataaaatctgttttgaagggaaaagaaatcttaaaaagaaacaagtgcrtcagcttgagaagatccaataaattcctttagagtctccgtaatctccatgtccattttctttttttttttttttttttttttgaggtggagtttcgctcttgttgcctaggctggagtgcagtgacgtgatctcggctcactgcaacctccgcctcccagattcaagcgattcttgtgcctcagcctcctgactagccaggattacaggcacccaccaccacgctaatttttgtgtttttagtagagacggggtttcaccatgttggtcaggcaggtcacgaactcctgacctcaggtgatccacctgcctcagcctcccaaggtgctgggtttacaggcgtgagccactgtgcacggcctccatgtccattttcattgttctctaattaaactgtttctatgcattaacataatttaaaattcaaaataaaactgaacaatcaaatttctaattttatgccttggttctgtttgttgtccaggttaggggctagaacactgtcaattatgcatattattgkttgtatgaaacgatgtgatcaaactttcaaacagccagcttgacagccagagactgacctgcacatgttatttttggcccacattgcatattaaacattttttaactcattgccaacaccgaaaattacaggtatttcacacaatctgggctttctacttctcttgaaaaattgccatctggcaacactaggccagcatctctgtgtcatgtaatcgcctgtggctgagcagcagctgctttctgagggcattgtttctctagtttaccacaagactccctactccctgatattacacctgttttactcatttccattagttgccctggtccttgaagacatgagtttatgacctatattctacagaaagctcatttaatgtttcatgtaataaatatttattgaattactttcatttttacaagtgttgcaaatggttcctgtgcttcagagattcagaatctatttgagaagatgaaagatattgtgcagcaagcaaaaataatcaggaacataagcctagagacgttaggaggccgtcagtacatgggtgattttcaaatgggcagtacaaggctgtgaactccaaggggtgaaaactgagccaggatggtattacaaaggttcagattgaagctgtaccttgaagaatgggtcagaatagtatcacgcaggggccaagagaagcgggtggcatgggtgatagaggagaagaaaataaaccatcaacaaaaccaagctgcatgtttgggaagtaggcctatttggttggattaaaggagtacaggctatctctcatcagtgaaagcttctgtcacccaccctttaattctcaccattattgtccgttaactgtacagttgttcaggagatgcccaaacagaaaagcagcaagctgtttgcgtaacttccagcccacttctttttaggcaaagcatgttttccactttcttaaaactcctacatgttagtccttcctagctctccctcccccaagaaaaaatggggaagagaccttgattcctggcacatgaaggcctctggaatcaactaggaaaacttggtgtgagaaagacaataggaaaagygagaaaacgggaagctggttatgaagttaggagaaaatgcaaaggaagtgyggaaagtttagcatgtactaccacatttctggaagggcccaggatcacccgccacttttgcataaaacctaggatgcccatgtgaagagccttcacctcaaatctccttcaggatactctgggcttattcctctagtcccttggaacctcttagatcattgggatggctttgcatgtccacatcccagtatcgagcatcacatagaacttatgcaagcaaaatcagtacagtcctatgtcctatacaattggacgtaagatcaagctgaaataagagcaagcatccacccttctgtcccccacagaaatacacactatgtggacatcttttacactgtgtgaacactagtcactatgtgaatacactatgtgtagtaccaggtgaagtgttgggtatttggtgtgcggaagaccggaaagaactggatccagcagaggagaaatacttcaagaggatgctctgggctgggactcagctgggttggagccctggccccaatatatagagcaggacattggttactcatgtcaaggatggactcagtcttcatctgtaaaacaagggggctaggcaaggccttcccaaagcagtctcaagggatgtgaagagttgtgaaaagactaaagtttaagcagagttaagtaaatttctcwccgcctgctgggacttgtcagtgtgtttcaaaagctgacgtgcattgtgaatctctgagaggagaattgctgggcagcaatttcctgagctgagtgaatcacagatctcagaactcttcagcctgctctcattgcaaagttgtgtcctccatctgctgttctgtagaatgtttgggaaaggctgctctgtagttttccttccagctctgacattctaaaattctaagttggtaaaaaggctacaaaagcctggaaagccagagatgtcaaagagaggtcagagatctggttgtcgtacttgtctaacaaggttgcacgtggtgaggatttagaatgatgctctacttctaggtctaggggaacagatggaacagaagagtgggagaaaaatcaaaacaaaatragtataaagttaagtcgatgaaggggaagagaaaaaaaaagttagggttgcagaagcattgagataaactggaactattttcaatcaagatataatgaaagaatcttgaagtagaaacctgctgccctgattcttgtctgaacgtgtctgtaactgggtgactcagagcttgtcactcatctctctgggcatcagtttccaagaagacagtctgtatttgtgggccctttgggttttaaaattatacgacttcatttgcatccatttaagattgaagccttagggaagggatttattgaagaaagatgtatgaagaaatgaaggctgagacctagactagagagaattattaggtcaagagaagcccattatgagcccagtgaagatgggctcttttttgttgttgttgagatagagtctcactctgttgcccaggctggagtgcagtggtgtcctcaccgcagcctctgcctcccaggctcaagccatcctcccatctcagcctcccaagtagctgggaccacaggcatgtayctgccacacccagctagctttttgtatttttagtagagatggggttttaccatgwtgcccaggctggtytcaaacttagctctggcagtccacccgccttggcctcccaaagtgctaggattaaagtgtaagccgctaggcctggcccaaagatgggtcttttttttkgggatgggrgtgggggatggagtcttgctgagtcgcccaggctggagtgcagtggcacagtctcggctcactgcaacctcacctcccaggctcttgcagttctcctgtctcagcctcccaagtagctgggattacaggcacacaccaccatgcctggctagtttttgcatttttagtagaaatgaggtttcaccatgttggccaggctggtgtcaaactcctgaccttaagtgatccgcccgcctctgcctcccaaagtgctgggattacaggtgtgagccattgcacccagcccaaaagatgggtgtttaatgatactctgctaaactgtgaattccaactactaggatttctctacagaattgcacatagactagatggtgtcctttcgattggctccttatgtcagtgtggcttaatttcacaactaaactcatcagacatagttattaactgtcctgaggaattgatttacttgattgtttcatccaggtttatgttgttttttgtaattatccagtgcctggataattgcactttagtgagccatttccaatttttgtttgcagtcttgtgccattttctaggttaggttttcttcttgggtatttgctaaagtaaaatcagttttagtaatctcttaactctaagacatactaatgcatgtcttagtaaatagtttcagatatttgggaagcaccagtgtatttctttctcaagcactatatatgtatatttttaaaagtgattacggacattcctttattccatattcattgttccacaagcatgtgttgaacacactgtatgcgaggggttgtaagtgttagggtgaagcagtgaacgaatacatagttttcctcatgacctacgtgaatgggtgcctagcttcaaagaaagaacaattgaccatgtaaatagtcactccctcattcatttttatttaataatcttattcattagaagttataaaggatgataaaatggyaactttcagcaaggctttgccagaaagaaaatatgtttagtcactttgttaactgaattcatggtatgagaggaggaaaatgtttgataatattaagtaacactactgtggtaaataaccttatgcttatatttctttaccagatcactgggtcacaggcagttcaaaacctacaaagaagctaagagtctttacattagatgtattcttcttgaaaattcttaactgctatatgccagcctatcaagcagttaaatttgattatgcacacctttatttatattttaccaagtctgattgatccttaactactttattttgttttttgagacagggtctcgccctgtcactcagcctggagggcggtggcgtgattacggctcactataacttcaacctccagtctcaagcaatcctcccatctcagcctcctgagtagctgggactatgggtgtgagccactatgcctggataatttattttattctattttttttgtagagacagaggtctcactatattgcccaggcttgtcttgaactcctgggctcaaatgattctcctgcctccgcttctttttttttttttttttttttttttttgagacggagtctcgctctgtcgcccaggctggagtgcagtggcgggatctcggctcactgcaagctccgcctcccgggttcacgccattctcctgcctcagcctcccaagtagctgggactacaggcgcccgccactacgcctggctaattttttgtatttttagtagagacggggtttcaccgttttagctgggatggtctcgatctcctgacctcgtgatccgcccgcctyrgcctcccaaagtgctgggattacaggcgtgagccaccgsgcccggccctgcctccgcttcttaaagcactgggtttacaggcataagccaccgcatctggccaactatcttatattgaatatgtctcacatagcaaaataatgaaagcatagctaatgcgagcaaacttaaatcctttctacttcttagctggtggcaggggcacacacttgttcttcaagtacatatttttcccaaacatttgtttcagtgaagagttctgataattttcacagcaatgttctaaaagctacatgacaaagcattcacaaggatcaaactacataacaacatgggatgcacctgctttagagaatttgctgcattctgtgtctcctccagagcattaatacttctcaaatgctacctacaatgatttcatacttacacattttgtttgtttttcctaaatagacactactaagaaaacacctaaacatgggattataaataataaataggagtgttgaaggtaacatacgttatacatccttcttcactaaagcattgttctgcagtggggaggcctgtgcaaacctacccccaaagtccgtggaagctgagggaccaaagaaagaggctgacatatccagtttctcagaaagaaccatttaatcatttaatagatacctatgaatggaatgtctcaggtggtggcaagatgagatggtgaatccctgtaccattacccccccagacccaggacttatacgtaacagggaaagagtatttgtgattcagaagagatgtgtaggacaattgaagtacagtcaatttaaggttgttttgacctcagggcaggatttacagtaaacagtagataaactggaagtcttagaagccttcccaggrctagggttaatcataagtcaacatgacagatgagcatccaagatggagttgctttggcctcsacaagcatgttgtttccctaaactcggaaccttcttcagaacttgaagtgrcagttttcctgaggtcattaacagtagtgccatggcctccaccacaggctctgtctattccagcactccctgaaatgtaaagctgatgtgtgggttaggaaaaatagtgttttccttgtgttctgctttttctgccctaggaaatttcagggctaaaggaatttgagagttaagcagtgggaatatgtttatctgctcagttatggggcataatttttctttgaaaaaggagtgttgttcagtcttttttttttttgagacagtctcattctgtcgcccaggctggagtgcagtggtgtgatctcacctcactacaacctctgcctcctggatgggtttaagcgattctcctgcctcagcatcctgagtagctgggattaaaggcatccgccatcatgcctggctaatttttttttttttttttttttggtatttttactagagacagggttttaccatcttggccaggctggtctcgaactcctgacctcaagtgatgctcccgccttggcctcccacagtgttgggattacaggtgtgagccaacgcacctggctgaatgtgttcagtcttggtttgggtgttccatgtgtagtgtaatggtgtgatgtatgggtttcgaagtggcattcttcatatctacttgacatcctttaaaggcctcaatttgcaatcctcacagaagagatcatgaaataatagtttcaagttaaattcattattttcacctttggatacgtttattgtgttcaaaatgaaaatttgaaaatttggggcaagacaggatctgattgccttactttagtgtaagaacatcagaataggtttatattgtattttaattaaaaacctgagtctttttaaagcttgccagtattttttttaaacgctttagttctttgttttcttcatgatctttctcttcagtttctctctcctcttattttttggtgtcatcagacatctcagagtgggaaattctcaccgtgtcactccacttccactttttcctcatccccttcttcctgcccctccttctcccccggtacctcttggtcctcagggccctgagcctctatggttcatgcatatcccctctatttcgccactgagttcacgtatcttggcaagtaaaggcttataggtgtcatactttttttttttttttttctagaggctgaaatgtctcatcacatttggcttcaatttcatgggattcttctacagctttttgagggcaaggacttggcatttcaccaagctaggcaggctctcaataaagtccttagtcacttttaagcgtcagtcattctttgcgcagcctagggcactctgctgtctgaccactctgctgtgctgtcagtctccactcagtgcgacgcttaatctatgactcccactacagccacctggcttgactttgcgggttccttgtttcctgagtctgccatgttagagaagtgcaagggtgtagagtggctgatggaggggggggggcctgtgacgccagtggtggccccaaagtaggctgtcatgtgacatcaaagtagatgcctcatgggtcccctgagatttggggcagggctcatgctcctccccatccatttatggctgtccaccatcctgggtgcctggatactgagatgactccaacctggtgtctgtcctcagcaagtttacagggaagttgcacacaaaccaaaccttccacttgacatggagagcatgaagagatcagttgtctgtccagaagtgagtagtagggggaggggggcttcacagaggtggtgtcttgaagtttgaggaggagttcaggggagggaccattcaagcctgagagaggccaccagctgtcattcagatgttctacctgagtttcgtcattacaagtcgtcctcttagcagtgttgccccaagatgcctcacccattaccttggcaaagaaaatcggtaagattgaacactgcctaatgagagtctatttcacacctttaattgactaggccaatgtttctgaactctaatgtgtaaaagaatcacctggagaaactcctgggtctgccccagatgttctaactcagtacgcrkagttagggcccaataatttgcattcagatgctgccagtttttggaccatcctttgagtagccctggactggacaacttgattgagtaatgataataatagagrtaagaaaagaattcgtncttaaaacccaggagattggtttgaccaggtgtgtcattcacgtagcctgcaaaaaacctggccctcccaccttagccctgtaaaatgcaaaggtggntcactatgatgtttgaacacatggtgttatctggaggcggccatcacacttggcacaagtggtgacaaggagaagatggcgggaatcactatattgagtgaagccagtttctaatggctggcatttgcatatcaaagcttgctggcctggccctttaagccaccttttctgttataaaagagatgattcaggggttgtttcttattataggaaaatttccaccgagaacctttacccttactatctggctaaaataatgtgttaataacccctgtattatctgtacgtgtttaggtgtctggtgggcaacactcaaatgtttgctgaatgaattagtgggagctaaacgatgggtgtgcggtacatacagaatggaatattatagacattggagactataaaaggtcgggggtggggggtgtaaaaagtaaagtagaggttcctcttcaaagactttcctccccgtctaattaggaataaatagtaacttctcttaaaagcaaaatttattcaaagacctgtgctaacattcttaaatatctgctagctgtaataaagaaatcaatayacttcatgttcttagagccgacaatttagcctgaatattttccctggcatgcttatagtggtccaagcaagcattaggtcatagctgtccctcttccttatttaaaggtgtttttacctttctcagcattccacaagttacttcctccttccttcctccttcctttgttctcctgtacctgtgcctctttttaaaagttctaagttgctagccagtcgggacaaatacagaatgtgaggtcccattccagccaatggaaagcggacacagcagtagggtggatgcgtcaggttataaatgaccctgcctcctttgttcggtgtactcttgtggcaaaacttctggcaagtgtaccctttctgcaggaagtaaaaatggccttgctgagtaaattaaatttatgttcaagtgctatttctttatggcaccagggaacaagcatttcaaacgggggtgagggttgaaaaatgacctgttyggtacagtgttcactatgtggatgatgggtgcacagacttcaccactacacaatatatgcatgtaggaagcctgcagttgtgcccctttaaggtatatttaatacatatagtttaaaaaattttttaaatgtttgaatgagtaggtaaaaaataaatatggacccttttccttgtggtggagtattttatctgtaaattctcctcaggaagatcattatatggaagatctcaattgttgtatagatattttgattgagactttgttagacattaaacaagtttgttgtaattgtggatctttcaatagactaaacgtttggaaggagtgacttgttccaacgtcttggatccgttaaaacaagaagctgctcctggtgtagatttaaacactccattgtgtgttttcccagattctgtcccaacagccagtgacttccttcttgcctstggaactggcaggccatcctgtcttgtaatgcctcaggccaaggagggactgagctgcattaacttgaaactactggctgtagaaattgtccttattgtaaaggcttgggsttttgtactgatgctaattttctcagacactgtttatgtaggcaaaactcctgctaaccagcccagcagatcasctggcagagagaatgtgctgccagtggggtagagtttgggatacatttcatgacctacttcccctccctaccctgatttttaaaccttttcatcttaagtgcagcaaaacctgtgtaataggagaggtttccgtttaaaataatgacagtgtttaaaataatcacagctctgattgataatattcagagcagtgggtcaggatcagtcgaacttttgagagttctggtgcttgctttttatttttattttttgagacggagtctcgctctgtcgcccaggctggagtgcagtggcacgatctcagctcactgcaggctccgcctcccgggttcacgccattctcctgcctcagcctctctacaggtgcccaccaccacgcctggctaattttttgtatttttagtagagacggggtttcgctgtgttagccaggatggtctcaatctcctgacctcgtgatccgcccgcctcggcctcccaaagtgccgggattacaggcgtgagccgcccccccgcccctcccccaccaacagcttgctttgtcacttagggctttatgatcctgagcaaagcatttaacttctctaagccccaaatgagcataygagtgtaatacctgctgttcctatcacaagtccttgtgacattcagatgagtgaaagttcaaaaggtcataaactgtaaaggtccatttgaaagagtacatggtttattattatgtattttaaatagtaggcaataacttgtcatgatcaccatgtgaatgtgtacaaaagggtacttaatttattatcatctgaatctggctcttcagatatcagtagatgtctataaacatcattccccttgtatcttttgtgtttatgtgccatttaagacacagttttttcaaagatgatgtctaatttgccacttcctgcactttgtaaaaagcagaagattaacccaacttctggagtgtcctgtgtaacacatttgtgaagtcacagggcatgagtggacaagctctgaactgtcatatcaaagaagggaatatgggaggttttgtttggaagtttaattcttytgtgctgcttttagtcagctgctacttggaacactcaaatgaaaacaaatgctgctgtcctggcaatcaagggaggcttttagcagcttgggtagcctcaggaagggcatttgtttatgacctcgtgtacatgaggcactggaaaaaaatttggcccccgagacccagactttttcccaaggagctcacgatctagttattgttgtgggaggtaacagagatgtgagtataaacttaattttttaaaagtctcatttttatgtgcctgtgtgtatggaaggcaaaggagagtgagacaagaataggaccaagagaggtgtaaatgacatggctccgatgactgaaggaacaccagggtccttggtctcgcgccmgtttagataaaatgacacagacacgtgtggagtagttttaaggagcggagagtttattaggcaagagagaagcaaggaagaaaacagctccccggtacagagacaaagggaggggggattcgaacgacgagaaaccccgtgtgtggcaggaaaagtggttgcttatattgggatgctggaggaggtggtgtctggtttgcatagggcccaggggattggtttgaccaggtatgttatttacattgcctgtgaaaaacctggcgaaatttcccaccttagctctttaatatgcaaatacggatcgccatgatgttctgaacacatggtattatctggaggtagccatgacacttggcacacatggtgacaagaagaaggcaggagtcgccatattgggtggaccatttctaacgggcggcatttgcgtatcaaagcttcctggcccggcccttcaagcggtttttctgttagaaaagaaatggttcggggtttgcttttattaacagaaaaagccttaccaagaactccttttagcctctctctctgcctaaaaaaacttttttaagtaacacctgtattatttcccccctcaagagaagcaaacctaactgctgttagggggtgttggacgatgattctttgtggccacttcctgctgaaaaggagcatgcaggggagcagcagttgggccttctcctgaggttgatttaaggattcttggaagaatggcgtgtccrtgtgtggttctgcttgcagtaccatttggagtttaattgcttctaggcgaaaagagatacgttttacaagaaggtttaaaatatagtgttagaataagagcattaagattaccaccatcagtgggggtcctgtagaccataactgacttagagtttggtacctattagttacaccaatggattgcaatactggattgtctacactagatgtcgctgtacattaccagaaacgttaacataaaagtaacattttccttgagaacagcatgcatttctcccttgacttgccattagagaataactttaggcttaggccatttttataacttgcagtatgattgagagaaatacgttattggatgtctaaagtaactttagcattaattttgacaattcctttcctttaatgattaaattttttcatgattttcacagactctcttacaacatacatttttctgactcattctaaacatccttcctttaaaaaaccagtcatttccttttatgacaagtatttaccatacaaaatcctttttttttttgtaaaattttttaaaaattatacttgtgcacaatgtgcaggtttgttacataggtatacatgwgccatgttggtttgctgcacccatcaactcacaaaatcatttatttatttatttatttatttatttatttatttgagacaggatcttgctctgtcacccaggctggagtgcagtggtgtgatctcagttcactgcagcctccacctcccacgttcaagcaattcttctgtctcagcctcccctgagtagctgggattacaggcaccacacagctagcttttatatttttggtagagctggggtttcaccatgttggccaggctggtctcgmactcctgatctcaagtgatccgcccgcctcggcctcccaaggtgccgggattataggcatgagccatcgcacctggccacaaaatcctttcttatataaaatgtatttctttataacctttttttcatagcttagagtgcattatattaccaacctttagtaaaaagtcctattaaacgtaatgatagtaaaacttctatgtttgctttttatccgtaactattactcctgctataagtaaaacaactttgactaaatttttcctgcaattaatcctgttataaggatgataatcaggcaaaatattatggcaattagaattttacaaccagaattccacattgtgggtgccacagtgtatagttctattgcgaatagtagcgtaactgtaacaatttccacaagagtggcatagtaaataattttcattgaaaattttacttgccaagatataacatttccctctggggatttacaaagttacaaatgcaatcccatgtataattaaaatttccctgtaaataatgcgttaaaaagaagttctactatttggtagcaaattttgacaggaaaggatagaaatgaaaaaaagtatctgttggggtaaaggtgggactgagtaagatgagtagccctcactttttttttttttttttttttttggagacagagtctctcccagtcgccgaggctggagtgyagtggcgcgatctccactcactgcaacytccgcctcccgggttcaagcgattcttctgcctcagcctcctgagtagctgggattayggcacgtgccaccacacccggctaattttctttggtatctttagtagagacagggyttcaccatgttggccaggctggtcttgaactcctgacctcgtgatctgcctgcctcgtcctcccaaagtgctgggattacaggcgtgagccaatgtgctcagcctactcacttatcttttataattttcaacttaagatgttctattaataccacatttcttgggttaaataaaggttttatttcctggggttgggcttctgctggttgtgttaattcttgtgggaagtgagcttagagaggttacatgcttaaccaatttagagcttttctgcctgaaaagaaatctctgaacacattggtaagttttatccattcccaagtaaaaagctcggtgaaggattttaaggactttcatcggctgcaggctggcaaatagagtttgccatcctgactgtcgccgtcctgagggctgaaaagtatgcggctgagaagtggcctattctgtttctgcagaggaatactgaggtttaatttcttttaaaatggagccctcctagattagaagggctcaaagtgtgttagtgccttgaggcttccttgcctttgacttggctgcctgatcagctaatctgtttccttctgctaccttatctgttccctttcagtgttccctacaatacatccctgctgtctctcatgaaagaaaaactgaggataacctgctaatttcctggtratattttataggagatatattagtgttaagaaaatgcctttcctttcaaatggcagcatgagcatggaaaatcaggaaagcatacttggagtcagtataaatgttagccacctttcccttgcttaatttaggtgctcttgtaagagctcttagctcagccaattgagcgcttgtgtttggggagagtgactactgcctctcctgctttatgtacctcttgcttcactggctgtttgccggctaagagctccccctagaggacagtgatcctgccacattatgtggggtgtaaacagttaaattatttcctagggttaactaggaggcttttctgactagtagagctactatgacaatggcttggaagcatttgtaaataggtcctcctaaccacaactaaggttragaaaaatattggattagagtttttcttgaaatgccccttatagttgcgctataggaagagaggaggcctggcttagagaggagaaaagagagagactgggtctagtgtttagaaggaggtctgcttccttttcttcaatgtccagtatcacctggggctcctatgctatgatggcagtttgagctgctggagctgaggtttgggccccaggacccatcagtcctgtgggaccatctgtgagactggctctgaacccagtgacctccatatctggggacagttctgtctccactggtttttgccactggatggacagggttgaggtggcttcgtcttgctgcctgggcattcctctttaaaataccctggcctgccacactgatagcaactaatggatgcatcttggggctcctggactttgccagcctgcaaagctgctgctagagcctttgtccttcccctgagctttctctctttcttttgggcctcctcctggtccctattataaaagaccgaagtggcccccttcaggaggttctctaaggtgctatttggtcccatagcttgcttctgtagttttcttctaatattgggagctgcctgtgtaataaaactgtccttcaggatgagctgtctctccactgaatcaggggataaaaggaagagtgttctattagtgcctctatcagcctttctataaaggccacaggattctcatctggcttttggtctattatagacagtttagagtaattgagaggtttggccctggttttccataggccttctaaaacgcgtattaaaaagggcttcctggccaggtgcggtggctctcactgtaattccagcactttgggaggctaaggcaggcagatcacctgaggtcgggcgtttgaaactagcctgtccaacttggtgaaacggtactcaacatgtaggcaattataatgcagtggtaagtatttgtagatctaatacttggtgaaacttggtactcagcactgtaggcaattacaatgtaatggtaagtatttgtatatctaaacatagaaaaggtacagcaaaatatgatacaaaagattaaaaaatgctacccstgtgtaaggcacttaccgtggagcttgcaggagtagaatttgctctgggtgaatcagtgaatgagtagtaagcaaatgtgaaggcctaggacattactatgcattactgtaggcyttataaatactgtacacttaggttacactaaatttgttttaaaaattaagtaattgcrctacaatgtcacaatgacaacaatgccactaggttataagagttttccagctccatcataatctatggaaccaccctcatatatgtgatctgttcttgagcaaaatgtcatcatgcagcacctgactatatgtaacaagtatgtgtgtgcctgtgtgcatgtgtgtatgtatatatacatgctacatttatatacacctgatatgtgcatgtgtaattatatatgtaacaagtatgtgtgtgcctgtgtgcatgtgtgtatgtatatatacatgctacatttatacacacctgatatgtgcatgtgtaaatatatatacacayatgtagcaggtgtatatataggtagcatatatatatatttgtatatatatctatatatgtgtgtgtgtgtgtgtgwgtgtatgtgtatgtgtgtgtagcagcggttttgtgctagaaccaagagcctggaactggtacaatgaaaatattttacccgaaaggtatgctaagtaaaagtcccaagtttcacacatttttgaggatcaaagtgaagaactcaaagtgaattattaggtaatcatatctacttcttcctaaaccctccatctgattctgtgctaaaatttaataaataccaactgatctttccatctccataaaattctttgagttaacgaaatcctactttctggtttctgaaggatggtattctgcaaatgtaaaagtttcccttaayctccaaaaaataattgggttaatccagctaccacaagtgtgaaattgagaagctgcttgctaagattgaatttaatattgtcacatgtcatctgagagctgcttgtctgatcatgttgccactggacaaagtaagccttactacaaaggataaaagaatgattatttcaatatccagtcatagttcatcatcaaactctgagtaaaatggagagaaaaagacgttttatcttatatgactatgcatttctctgggaagtcatttatctggttactatctaggagagcaaagataatgggaaaaatcttccattattctcaactataattttaaatatgaaattttcataaaataggtttttggttcttttaaaagccctcaatataagaaaatgaaatattagaaacttattttataaaatatatttgtgaaccataaaaccccatataaaacggaaattattattaccattaactactgatgcttctaatgttattctctaatggttaaaaaatgactagaatttagagttactgccaatatatggggaggattttataaaaatagctttattcatttgcatgttaagcaagagtgtgattactgatggccgtaagagtcccttgctgctttaagctctgctctgctgctgactctacatgtgtagctttgagaggtcctttagcccctccagctttcctcatagtcaggatgtggctattgtacttgatgatatcccaaacatgcttctgattccaacattcaatggttctgtgatatttctaccttattagaaaagacattcactttaaaagtataaacgctgtagtaacttttttctttcattgttttcaataaaagtgtaatggaagtaaactgacaartttaggaggctttcagaacataaaggagaaaggctgacagctcttgagaacctctttgctttcagctgagagcaagtagagaatgcttgctctctggccctgaatgtcataatattatgttcagaatcattgaaatgtctgacaacactgttgattaaaaatgagaatcattaggtcatgtctgccgttataggatgaagggtagtttgaacagtgtgaaaaaaactatcccaaaaggatgatttgtcttagacaatattaacaaaatttcaaattataatatgaatagtaatttatagtaattcacttttcttatttttctatatttagctttatcttaaaagttcctgttcattggtaatgctttgaaaaatgctggatttagaattatggactatcaactaatattatggatgatattatttagaaaccattctgtatgctacacaagtcctttgaaaatgatatgagctggacacagtggctcacacctgtaatcccagccctttgggaggccaaggcaggtggatcacgtgaggtcaggagatcaagactagcctggccaagatggcgaaaccccatctctactaaaaatacaaaaattagttgggtgtggtggcaggtgcctgtaatcccagctactcaggaggctgaagcaggagaatcacttgaacccaggaggcggaggttgcagtgagccgagattgtgccactgccctccagcctgggtgactccatgtcaaaaaaataaataaccactaaaatggctattattcatctttcaaaatctgttaatacctggaagttctgcatgacctttaggaaaactacatccacaaaacattccttctagtttcctaataagttttagaagaaatattaccattctgagctaaaatagttctacttccttagggcaaattcctctcataacatgaaataggcaaatacaattactctaaaaaaagttcagccatagcatcttagagtttaaaggaataacccttaggagttcacataatttttttccactgcttcctaggcagatctcatttagtgtagctggcgtgttgccctgcccacacgaacagtggacttctccaaacatttctttaaatatttttctcacaaaatgagaagttgaatcaaaacgttggtgttaattcagtgtctcaaagacattagacccaaggcctctgtcttttcctcatggttgctgatgaaggccgaagctatagccatratggtaatattccagttggagagagaagaaactactcttttgtatactaaaaatacaaaaattagctgggtgtggtggcatgcgcctgtagtcccagctacttgagaggctagtacaggagtcgctatgtttttagccagcccattcagtttttgtaaagctccatcattacatttttcatcatactgacctaatacctagctatatttagcttgctcacgctctgccttctggggggaaaatayatatgtctgtgcattctctrtatctacctagtatcaattagagttttatgttttcctgcatgtaacagaaaacacgttaacagtggacttctccagatacttctttaaatatttttctcacaaaatgagaagtcgaatgaaagcattggtgtcaattcagtgtctcaaagatattagacccaaggcctctgtcttttcctcacggttgctgatgaaggctgaagctatagtcatcayggtaatattccagtcggagagagaagaaactactcttttgtaaactaaaaatacaaaaattagccaggtgtggtggcaggtgcctgtagtcccagctactcaggaggctgaggcaggagaatcgcttgaacctgggaggcggagcttgtagtgagccgagattgtgccattgcactccagcctgggcaacagagcgagactctctcaaaaaaaaaaaaaaaaaaaaaaaaaaatgcttccttttccatttgtttcctgagcttattggtgttccagttagggttatttactgaaactgcttccctccctattgggaatggtgtttctgatattttttcactttccctacctgctttcttcccttttggtgtattataggagatatattgctcatctctgaaattatctgctgcttacagagctacctgctcttcaactgcagtgagggtctggtttaggaggagagtaacatccctgcatgtgaggtgaaatacctgagttaaattttggaaagcttttatgtaccratcatggttgttagaaaattggcctaagtcatcttttatttgcctaaggttttgttatgagacgggaacttgaagggggcccaaataagggggatcctcaaatggttccctggaagttgcttctttaacttttggggaactgttttccctgrgactgcccaatatgattgctaaaagagctgggttgatcttacagtgcttggcaaaggtttagtaaaaatgccatgcccttgtataaaagaaaatgagttgcttttctctttaaagtccttaggttaaggaagtgttccagtgctgtagagtgcactccagaggggtgcaagctgaagaaaatctgttacccatctagaaaaagaagtgagaataaaagcatcctcttagtctccttcctttccgtatgacctagggtggaggaaaagacagggagtgttcgactgttttccctccctggttcctgggttctgccaccaagttaaatatgccgcccatggttgaagacatggtcctccaagccatrgaactggataaactaagtgatgggactaaccrtgctttactgcgcaaccttaggtcatccaccttctgtgatttccctttgacttcctaaacctgtgtgatctgcctggctccccaaaaaacgtatctccagagagactgtgtcgtctttgagcaaggctcctttaatggaggtagtgtgctagattgcctgctattatgccccgtgctaaagcatttactcctagaaaaatggttctggttaacttccgtacttaaaatccccttactaattaagtactgtcttggagacagagtaggtgccttaaaaatacataggaaccgaatggccgttttccctgctgatgggacgcattgagactaaaatttggccacagaagacatcttactcctaactgttgaaaacagagctctcctgtttacacaagtagcctagagcctgatttttagtggtgtgaaaggagattgcagtgtacagcaaaggaccagcaatatgtcctatgaagaggatttctatttccactaggcggcgctgttggcttagaaataccttgggctcgccagaggattactagccggtaatctcactgttggaggtggaaaaggggagaactctgttcctagaaggttgcaatggcattttcctgagctatatcccaggtctacagcatttcctgatcttgcctaacaggattacttctctaggctgtaaaaattcccacacattcaacacacagaragtaagagatcgcagacagagaaaccaggaaagaaggaaggttttgcaacaggatagccggcagacagccttgagattaaaggacagatctgagattgagatttgctccatactcaccgctccgatgaatgaattcctggccaatgcaccaaaatgatacggctccgatgactggaggaacaccagggtccttggtctcgcaccagtttagataaaatgacacagacacacatgtaatggttttaaggagtggagagtttattaggcaagaaggaaggaagaagaaaacagctcccccatacagagacagagggaggrgggattagaacaaacagaaacttggtgtgtggcagaaaagtggttgcttatattgggatgctgcagggggcagtgtctggtttgcatagggcccaggggattggtttgaccaggtgtgtcatttatgtagcctgcaaaacacctggtccacccaccttagccctttaatatgcaaatgcaggttgccatgatgttctgaacacatggtgttatctggaggcagccatgacacgtggcacacaccgggacaggaagaagaaggcaggagttgccatattgggtggacaatttctaatagccagcatttgcatatcaaagcttgccagactggcccttcaagtcgtttttctgttagaaaagaaatggcttgggttccaagaatagaagcarctccagtctacagctcccagcatgagtgacacagaagatgggtgatttctgcatttccaactgaggcactgggttcatctcactgggacttgttggacagtgggtgcagccacggagtgtgagccaaagcagggtggggcatcgcctcacccgggaagcacaaggggtcggggaattccctttcctagccaagggaagctgtgacagatggtacctggaaaatcgggacattcccaccctaatactgtgcttttccagtggtcttagcaaatggcagaccaggagattatatcccgcgcatggctcggcgggtccgacacccatggagccttgctcactgctagcacagcagtccaagatcaaactgcgaggcagcagcaaggctgggggaggggtgtccaccattgctgaggcttgatgaggtaaacaaagtggccaggaagctcgaactgggtggagcccaccacagctcaacgaggcctgcctgcctctgtagactccacctctgggggcagggcatagctgaacaaaaggcagcagaaacttctgcagacttaaacatccctgtctgacagctttgaagagagtagtggttgtcccagcatggagtttgagatctgagaacggacagactgcctcctcaagtgggtccctgacccctcagtagcctaactgggaggcacctcccagtgggggccaactgacacctcatacagccaggtgcccctctgagacaaagcttccagaggaaggatcaggcagcaacatttactgttctgcaatctttgctgttctgcagcctctgctggtgatacccaggcaaacaaggtctggagtggacctccagcgaactccaacagacctgcagctgagggtcctgactgttaggaggaaaactaacaaacagaaaggaatagcatcaacatcaacaaaaaagacatccacaccaaaaccccatctgtaggtcaccatcatcaaagaccaaaggtagataaaatcacaaagatggggagaaaccagagcagaaaagctgaaaattctaaaaatcagagtgcctcatctacaccaaaggatcacagcgcctygccagcaacggaacaaagctggatggggaatgactttgatgagttgacagaattaggcttcagaaaatcggtaatgacaaacttctcccagctaaaggaggatgttcgaacccatcacaaagaagctaaaaacctagaaaaaagattagacaaatggctaactagaataaacagcatagaggagaccttaaatgacctgatggagctgaaaaccatggcaygagaactacgtgacacatgcacaagcttcagtagccgattcgatcaagtggaagaagggggtcagtgattgaagatcaaatgaatgaaatgaagcaagaagagaagtttagagaaaaaagagtaaagagacaaacaaagcctccaagaaatatgggactatgtgaaaagaccaaatctacttttgattggtgtacctgaaagtgacggggagaatggaaccaagttggaaaacactctgcaggatattatccaggagaacttccccaacctagcagggcaggccaacattcaaattcaggaaacacagagaatgccacaaagatactcctcgtgaagagcaaccccaagacacataattgtcagattcaccaaggttgaaatgaagaaaaaaatgtyaagcrcagccagagagaarggtcaggttacgtacaaagggaagcccatccgaccaatagtggatctcyctgcagaaactctacaagccagamgagagtgggggccaatattcaacattcttaaagaaaagaattttcaacccagaatttcatatccagccaaactaagcttcataagtgaaggagaaataaaatcctttacagacaagcaaatgctgagagatttttgtcaccagtaggcctgccttacaagagctcctgaaggaagcactaaacatggaaaggaacaactggtaccagccactgcaaaaacatgccaaattgtaaagaccatcgaggctaggaagaaactgcatcaactaacgagcaaaataaccagctaatatcataatgacaggatcaaattcacacataagaatattagccttaaatgtaaatgggctaaatgccccaattaaaagacacagactagcaaatcagataaatcaagacccatcagtgtgctgtattcaggagacccatctcacatgcagagacacacataggctcaaaataaagggatggaggaagatctaccaagcaaatggaaaacaaaaaaaagcaggggttgcaatcctagtctctgataaaagagactttaaaccaacaaagatcaaaagagacaaagaaggccattacataatggtaaagggatcaattcaacaagaagtgctaactatcctaaatatatatgcacccaatacaggagcacccagattcataaagcaagtccttagagacctataaagagacttagactcccaaacaataatattgggagactttaacaccctactgtcaacattagacagatcaacgaggcagaaagttaataaaaatatccaggacttgaactcagctctacaccaagcagacctaatagacatctacagaactctccatcccaaatcaacagaatatacattcttctcagcaccacattgcactcattccaaaattgaccacatggttggaagtaaagctctcctcagcaaatgtaaaagaacagaaattataacaaactgtctctcagaccacagtgcaatcaaattagaactcaggattaagaaactcactcaaaactactcaactacatggaaactgaacaacctgctcctgaattactactgggtaaataaggaaatgaaggcagaaataaagatgttctttgaaaccaacgagaacaaagacatgacataccagaatctctgggacacatttaaagcagtgtgtagaagtaaatttatgcactaaatgcccacaagagaaagcaggaaagatctaaaattgacaccctaacatcacaattaaaagaactagagaagcaagagcaaacacattcaaaagctagcagaaggcaataaataactaagatcatagcagaactgaaggagatagagacacaaaaaacccttcaagaaatcaaagaatccaggagctggttttttgaaaggatcaacaaaattgatagaccgctagcaagactaataaagaaaagagagaagaatcaaatagatgcaataaaaaatgataaagggtatatcaccaycgatcccacagaaatacaaactaccatcagagaatattatgaacacctctacgcaaataaactagaaaatctagaagaaatggataaattcctggacacatacactctcccaagactaaaccaggaagaagttgaatccctgaatagaccaataacaggttctgaaattgaggcaataattaatagcctaccaaccaaaaaaattccagggccagacagattcacagccaaattctaccagaggtacraagaggagctggtaccattccttctgaaactattccaatcatagaaaaagagggaatcctccctaactcattttataaggccagcatcatcctgatacctaagtctggcagacacaacaaaaaaagagaattttaggccaatgtccctgatgaacatcgatgcaaaaatcctcaataaaatactggcaaaccgaatccagcagcacatcaaaaagcttatccaccacgatcaagttggcttcatccctggggtgcaaggttggttcaacatatgaaaatcaataaatgtaatccatcttataaacagaaccaaagacaaaaaccacatgattatctcaatagatgcagaaaaagcctttgacaaaattcaacagccttcatgctaaaaactctcaataaactaggtattggtgggacataactcaaaataataagagctatgtatgacaaacccacagccaataccatactgaataggcaaaaactggaagctttccctttaaaaactggcacaagagagggatgccctctctcaccactcctattcaacatagtgttggaagttctggccagggcaatcaggcatgagaaagaaatacagggtattcaattaggaaaagaggaagtcaaattgtccctgtttgcagatgattgtatatttagaaaaccccatcatctcagcccaaaatctccttaagctgataagcaaattcagcaaagtctcaggatacaaaatcaatatgcaaaaatcacaagcattcctatacaccaataacagacaaacagagaggcaaatcatgagtgaactcccattcacagttgcttcaaagagaataaatacctaggaatccaacttacaagggatgtgaaggacctcttcaaggagaactacaaaccactgctcaatgaaataaaagaggacacaaacaaatggaagaacattccatgctcatggataggaagaatcaatattgtgaaaatggccatactgcccaaggaaatttataaattccatgccatccccatcaagctaccaatgactcttcacagaattggaaaaaaatactttaaagttcatatggagccaaaaaagagcctgcattgccaagacaatcctaagccaaaagaacaaagctggaggcatcatgctacctgacttcaaactatactataaggctacagtaaccaaaacagcatggtactggtaccaaaagggagatatagaccaatggaacagaacagagccttcagaaataataccacacatctacaactatctgatctttgacaaacctgacaaaaacaagaaatggggaaaggattccctatttaataaatggtgctgggaaaactggctagccatatgtagaaagctgaaactggatcccttccttacatgttatacaaaaattaattcaagatgtattaaagacataaatgtgagacctaaaaccataaaaaccctagaagaaaacytaggcaataccattcagggacataggcatgggcaagggcttcatgactaaaacaccaaaagcaatagcagcaaaagccaaaatagacaaatgggatctaattaaactaaagagcttctgcacagcaaaagaaactaccatcaaagtgaacaggcagcctacagaatgggagaaaatttttacaatcttcccatctgacaaagggctaatatccagaatctacaaagaacttaaacaaatttacaagaaaaaatcaatcccatcaaaaagtgggtgaaggatatcaacagacacttctcacagtaagacatttatgcagccaacagacacakgaaaaaatgctcatcatcactggccatcagagaaatgcaaatcaaaaccacaatgagataccatctcacaccagttagaatggcaatcatcacaaagtcaggaaacaacaggtgctggagaggatgtggagaaataagaatgcttttacamtgtgggtggaagtgtaaactagttcaaccattgtggaagacagtgtggcaattcctcaaggatctagaactagaaataccatttgacccagcaatcccattactgcgtatatacccaaaggattataaatcatgctactataaagacacatgcacatgtatgtttattgtggcactattcacaatagcaaagacttggaaccaacccaaatgtccatcaatgatagactggattaagaaaatgtggcgcatatacaccatggaatactatgcagccataaaaaatgatgagttcatgtcctttgtagggacatggatgaagctggaaaccatcattctgagcaaactgttgcaaggacagaaaaccaaacactgcatgttctcactcatagrtgggaattgaacaatgagcacacttggacacagggtggggagcatcacacactggggcctgtcgtggggaggggggagggatagcattaggagaaacacctaatgtaaatgtcgagttaatgggtgcagcacaccaacatggcacatgtatacatatgtaacaaacttgcacgttgtgcacatgtaccctagaacttaaagtataaaaaaaaaaaaagaaatgcttcaggggttgcttttattaaaagaaaaagccttaccaagaactcctctctatctgcctaaaaattattttttaataactcctgtattattaccagggaaggctcaagagagtgatgtgctgttgaggaagagctgaaggaaaggggaaagatgggggtggctgyttgatccagagtggtcaagcatagagctatgctgccatagtcactgagcccaggagagttacaaatcctttctgggccttagtttccctttgggtaaatatgtgaagctatatgttaatttaagatgtaaaatcttctagttttatgatgtaggtttgagaataaatgtacttatgtgccaggtctggcccacagaccctggctgagcaacggatgaaaaaatgtgtgcagacacaggttttttgcctggctgcacagctaggggaccgggccactcacagacaccaaggagggtgctataaagagtcagcagccacagccctgacaagctggtgctacaggcatttatttagtacagatttaatgactttgagtcaacacatcttgtgagtaattaacatggttgtccccctggagagagcagtcctgtgcacagatgattaaaggccaggttcygaggcccaagtaaactaacttaaccagatcaattcctttatacttgcttgttatctgccttttgctctcagcctcccgayaaaagaatttggctgccttcagccaaattatctttcaaagcttttgcaaaacctcccagccttccaagaaggtttttgtctttctctataacttctataatttttcccaccaccctgaccaaactcctacrctcatgaatggcaatagagggtgatggttgagggttttggagccagaatgcttgggttcaaatccagttcaccatttactgcctgagtgaccttgggtgattcactgaccccccgtggtctgagattccttgacaatgagaacagtgactagcagagagcaaacgtcagcacacgtgagctactgcccttgacatatcctgtagactataggaggattttggagctaagccagtattttggcaatatggaaactacttgttttctgtgttgatagtaaaaaaaaaaaaaaaaaaaaaaaaaaaagttttggaattggaaagagacaaccttatcctttttgcccttcctgagactgaactgcagccctagaggttttctgggaggaaaaaaaccaaatgttttagggtgacagggttagagtgttaaatccgtctgtgagctcttttatttctctgagctagattttgttatgkagtggcagtaaggttctccttaggtttgcttkgtagcttgtcatgaaattcctggatatttgaggaaacaattggaaattttataattgtgcaatctaatgagagaaccctactattgcctacttattttgtgctttacaggttggcttaataattccgtccaatactttgctatgtgtagagggtgccactgtgctccacatagaaccctttaggtccatgcatgccctcatgtgggacaaaaggtttcctctacaaaaataattctgagtaaaagaaataagggaagaaggacaggtacaggaaaaatccctagccagatggcgatccaccaaaggtctggaacctgagcaggtgcccatttttatggttatttcttatgcgctaaacaagggtagattattcatgcctccccttttagattatacagggtaacttcctgatgttgcggtggcatttgtaaactgtcatggtgctggtgggagtgtagcagtgaggaccaccagaggtcactctcattgccatcttggttttgatgggttttatccggctactttactgcaacctgttttatcagcaaggtctctatgacctgtgttttgtgctgacctcctgtctcatcctgtgacttagaatgccttaaccatctgagaatgcagcccagtaggtctcagcctcattttacccagcccctattcaagacagagatgctctgggtcacatacctctgacaaactgacttgcaaaattcctgtagatttatcatttggtttgtgagacccagcaagagctggtttcagcataccagtgaagggcattgccaaagagaatggcaggttaaaaaaatgaaaaatgttaggcaagttatgcttgactgcaaggggtagggtggtgagaaatgaggttccaatgtagagtgggaccagactggaatgccaactttagatttttctttttttcctgtaagaaacaggaagtcagcagaagtttttaagcaggcaggtaatgtgatcagcctttcagggtagaaactctgacagcagtatgcagcaagttatagagaaagactgttatctagaattcaagttagcaggcaagtgcagaaaataatgagcatcttagccaaggcagcaacgagagcgggggtggagctggggtagaactwggtcagaaaacgttggcaggtggagttaatagggtttgatgaggtgattggaaatcatgtgagagaagaagctgaggacaatagtaaggtttctagcttagaagttagacttatggttagataattgagaatttgtgtcgttaattgctctaggggtggagaagggagagtaggccatattaattttgaggagcttgtaggctagatcctggagatgtttggaaatatgtatggaagcttgagaaagatagatcaaggactagaaatcagtatatgaatacaggtcataggctttgaatttagtaggctgctggtaaatacttcctatttgccatgatagtacattggcttgctcaaggaaagaaggaattgtgaagtcgaatgaaataaaaaatggaacttttgagaacatcatcatttaaagggccagtggtcaggagtgtaagaaccaatcaataaaagacaaaaagaaaataaaaatggggggagtgggggatgaactgttagtgtggcaagaaaaacaagaaactggagaagagggaagaaagtttcaagaaagcacaagttgtcaaatgtctgcagtgaggccaagtgggtcattggcatcggcattggcattggggtcaggggttcattgrtgagcctaatggatagtttcatcagacatatggggctgaagccagattgcaatgggttaccttcaaagagggcagtctttgaaaagtcactgtctttttttttggccggagtctcactctgttgccaggctggagtgcagtggtgcaatattggctcactgcaagtctctgcctcccggtgtcaagcaattctcctgcgtcagcctcccragtagctgggattacaggcgcgcatcaccacgccaggctaatttttgtattttttagtacagacagggtttcaccatgttggccaggatgatcttgatctcctgacctcatgatgcacctgcctcggcctcccaaagtgctgggattacaggcctgagccactgcgcccagccaaaaagtcactatcttctttaggacaaagacagaactgacatccacagaaatcaaattctatttagagatatatcttctcactttgcctccttgccgtctataaattacctgttatgaattctcccttccatctgctttccagatcctatgtcctccttcctctaggatctcaattcactcaattccttttacttctgtaactttgtctctctcttgacaagctctttcccaagaagcacgttcaagtctctcccaactgttctagtgccttccttatgtctacaaacagtgaacgtaatctgcctgcatttactctctctctttcttcaactcctgctcactttgcaacccattacaatatgattttcagccccatatcttggatgaaactgtccttaataggttcaccagtgaacccatagccaacaccaatgatctacttggcctctctgcagacatttgacaacctgccttcttgaaatctcttcccccttaatatctccagtttcttgtttctgttgccacactaacgatttgtcccttttctctctttttctcactccctctcttgttcttttttgtcttttattgattggtttttcctgtcctrctcaccagctctttaagtgagggtgtttctgaarcttccattttttaattttattcaactttacctgagcaaattaactttccctctctggtggaatttaccatgtggcctaaatcctcccagaaatggtgctcagcgctgtgctttgatcagagttgggttggagtagagatccaggcctcagcaagtgaagatatgtttttgaccttgtattctagttgagaataggaaagcggactttgataccttgtgggttctctttctgttcttactaggtcagggcggtgggcagaggactaaagcgtgaacaccgccctgtgaccagaaacatctgtttgcctttccccaactctctctccttctccagccttctgatcatgtatcaaaggggaagcaggaggctagggaagaaccagtagcatactgatactccatacacataaataacttagcatctggtcaagtttcaacatgaaccaactacctgggtacagagccagtgcgccaccagattttactgtccggttccactgaggcgtaatgagtacccttattccccttccatctccttaggtggaattcttcccctagatcctggaatggttatggaggcaagttttaagacctctagaactgttctagattacttcagctagccaagacagggtaatttgcagctcacagggcccttaacacaattctgtgtgttcctggatttcccagctacttctaaagaggtttcaggaaactttgttactttcaggttacttgagtgaatctgaatctttacttcattaaaactcaattcacctcagctggtactgcgtccaggcagtctctttggacagcctctgtcttttctctcctaggcttggttccatacctctactttaaggtccatctcttaattgaacattaaacattaatattttaattaaattctcatattttcatgcagataaataaatgttccatgagattatagattttttcttataatagacacaattagagcaaaatataaagagaattaaaaagctgatggactgaatgaagtgaccgtagtggaaaaattggagagtcactgacatagaatacaaaccttygaatgtgaagaacgaatcaggtagtgagttagaatcgatgctttaagtgttaatgttgctggttcatgttgaaacttgaccagatgcgaagtcattgatgtgtatgggttatcagtgtgctgctggttcttccccagctgcctccttccccttcaatatgaccatacaaataagctttttaaagatcactgttgtacatcttttttaacctgcaacaatttcaggacttgataatccatgtggaactaataacaaatgtgcataataggaaaaacgatagtctcagcttccctagaaacattggaatatctgtcgctgggctcacttttttacgcaatgatcttctggagcagaggtgtaatatcagtgataactgactcataaagggcttcttatgtgacaggcactgttctaggtgccttagttttcagtcttcacaacaatcttttgaggtcatgtgtatarttacttccattttgtggatgggagattgaggtacagagaggtttggtcatttgcccaggggcccagtgctggtaagtgagggagctgggattttagcccaggtgctctggctctggattatatgctgcagacttctgtgctgcgcatgcctcctttagattgagcctgttattgccatgctcctcttgcctccattttgcttgtataccttacctacccataggtgttttgagttaaaacactttccaggcygggcacggtggctcacgcctgtaatcccagcactttgggaggccaaggcgggaggatcatgaggtcaggagatcgagaccatcctagccagcacagtgaaaccttgtctttactaaaaatacaaaaattagctgggcgtggtggcatgtgcctgtaatcccagctactcaggagactgaggcaggaaaatcgcttgaaccagggagtcggaggttgcagtgagccaagatcgcgccattgcactccagcctggcaacaaagggagactctgtctcaaaaaaaaaaaaaaacaaaaaaacaaaaaaacaaaaaaaacagaacaacaacaacaacaaaaacaaaccactttccaatacttgcaccttagttccagcccttttccttgttagccatacctatgatgggacatcatctaagatgtaattgagggccagacaccttactggatttcatccccagacagaggtaattcctttcttctctgagcttgtgcaaccctttatctaggcctttcttaccacttactgcttagctaactaacatcagctattcatttgcaagccttggttctcctctattactctaagtttcagatgattctctttctcccctacaaagttctctgcccatagggtatacttcataatttctatgttgacttagtcaacagagaccaaccccatatataaacataactaatttatatattcataaacagagcacagtttctgcttggtttcctttgattcttgtttgtcctttgatcttcagccatcagacctgggtagggagccagtgccccaccggatttctttgtctggttccactggggcgtaatgagtaccctttatccccttccatctcattaggcagaattcttcccctagatcctggaatggttatggaggcaagttttaagacctctagcactgccctagcttactttagccaagatggagtaatttacagcccattaggcccttaaaatttggcttgcttctgtgttctcctggagtttcccagctccttctaaagaggtttcaggaggctgggtgcagtagctaacatctgtaatcccaacactttgggaggccaagacgggtggatcacttcaggtcaggagttcaagaccagcctgggcaacatagtgaaaccctgtatctactaaaaaaaaaaaaaatasaaaaattagccaggtgtggtggtaggcatctgtaatcccagctatttgggaggctaaggcaggagaatcgcttcaaccagggaggcaaaggttgyagtgagccaagatcatgccactgcwytccagymtgggcaacagagtgagactctgtctaaaaaaaagaaatagaggtttcaggaaactttattacttccagaatgttacttgtgtgactctgaatctgatttcataagctcagggaaatataacttgatctatattttaagccttcatcctttaggtaggaaacttattcccagtgagtttaggaattcccactcatcactgtttgcttttaggttttggaggatcttatacagtgctgaggcattgtggtttggggaagccatgtgggtatcactcatcctcagcccacatcactgttccaccygatccttggtgtttgatccttacagtttgtcctgagatatcctttgttcttatctgtaagacagtagatctttcaaatccattagcacacatttctattcctgttgaactcttgggtacatataatgggctgtggagaaaagayagattgtcttaggtccatctgcaagacattcatgcagaccctgctacatttatgctttcactgggcacacagaatcattctgtttttccctcaccagctggagcctggggctctaaggccatttgaggcattatctttctagacataccttgcatctactcttccctaaggtcttgcctctttccagggttctgtctgggtatgaggcacagggtcagctgcttcagattccacagacctatctgggagtttttgyaccccagggttcttttttcattggctcccagatatttatctatacagccctcatttcctctgcaacactttctcttcccctcttctaccatctagcctgggaaatcactttctattctaggagacttcttattcgtcatgtaatcttctaaatcaatgcctattttttaaaagattctcggccgggcgcggtggctcatgcctgtaatcccagcattttgggaggcsgaggtgggtggatcacttgaggccaggagttcgaaaacagccttgccaatgtggcaaaaccctgtctctactaaaactacaaaatgtagccaggagtggtggtgcatgcctgtaatctcagctacttgggaggctaaggcacgagaatagcttgaatctgggaggcggaggtttcagtgagccgagatcacaccactgcattccagcctgggtaacagagcgagactctacctcaaaaaaaaaaaaagattctccaaaagatacaggcttttaaaaatccaaaggaaggaaggaactcccgtttctttgcttttttttctcatagcccttcaaagaagtaacaactatagaaaggtgtggctactgaatttattttctgggcagtatggtaggaggagagtaatgtgaagagctaagggaaagatatttgagtaaaaaaaaagttaggtaatattcatgagtttgtcattgatatcatatagacatgcaaatgttatcgcatactggatagggctcagagcagcttccaggacccacactgatttacaccagcatttctaggcaattctgtaagtcctgcagcccctcaaggttttagaaatccagcttctgtactggctccttaatgtctaagcttctgttctcttctctctgtaagcaagataatagtacctacctcacagaatagtagccagaattcagcaacctaccctagcactcactgtaggcactcaggcagtgatagctattatttataatagtaccaagaaaagtaattaacaacaggttactgttcatatcaattttcaagttttcaaacagtcttgatattggctctagtataactctaatttatcaatacaattgtgaacattagcacagtttttcttgtagcagttytctaaattctttttctactcatctacctaccctttcatattcctgtcttttaccctgcataaacaaattgtcccttttttttttttttttttttttttcgaggcagagtctcgctctgtcatccaggctggattgcagkggcacagtctcggctgactgcaacatctgcctcccgggttcaagcgattcgcttacctcagcctcctgagtagctgggattacaggcatgtgccaccatgcctggctattttttttttttttttgagacggagtctcactctgtcgcccaggctggagtgcagtggcgtagtctcagctcactgcaagctctgcctccagggttcatgccattctcctgcctcagcctcccaagtagctgggactacaggcgcccgccaccatgcccggctgattttttttttttgtatttttagtagagacagggtttcaccatgttagccaggatggtctcgatctcctgacctcatgatccgcccatcttggcctcccaaagtgctgggattacaggcgtgagccaccgcacccggtcccagctaatttttatatttttagtagagatggggtctcaccatgttggccaggctggtctctagctccygacctcagatgatctgcctgccttggcctcccaaagtgctgagattataggcatgagccactgcactcagccaaattgtcccttttctaatcagcacttctacccccacaccactgtgttgctattgtaaacaatgcagatggttgttcaagtattctgtgaatgcaagcgaaacataagctaacatggagagatgtttctggaaaggtrtgaacaaattgagtcaaacccgcatgtactcagagcatgcattacataaaggaaactcgaggtgggctctcttataaaatgtacagtcttctcatatctgtcatataaagacaattcacttgttttacagcttcatatagttaaagaaactcatgtaatttgtctcaagtgtttaagaaagtcttcatttaattaaaaagaaaagtacagttcataatayaacagagccaggtctgccatttctttgttcatatttcatcgtttcgtgccagtcaaactacctgtcctgtgacaagtggaatggagcttgcatgttccctattaattgataatggtgttaacaagggtttattatatctactctagaaactttggaaatacagtgattcttagctattccctggcagatctcaatattctctaaattagactaacattttaccacaaaactcgaatggtaattgccttcttccaatttaccaaagaacttaagttgatagttagaatcctctgtgcagtacatgtgtgaacacatatgtgcatgtacacatgcataaattagtatcaaagacatgaacagtttcaacttgttcagtaaattgggcagttgatgtcagggcacatgtagaagttgaattttcttaatattcatttgctctgctgctgcttatacttgccagcgaataatattaaaggaattcctaaaatagctgttcattgtttgattaactgcctcttgttcttgtttttcattaacatttgctaatgctgttataatatagtgctttctaactcttttcatgacaggacaggacatatatatrtgtgtgtgtgtatatatatatatgtatgtatatataaaatatacacacacagttataatgtttatatgggacactggggtaaagggctcaggaatttgcccagaggctgaggcgatgagcacacacggamcctcttcaaggtgtaccgtcgtacgctgtgcacagcctgagaagctgtaaggtgccacatcgcagacatcatatagtcctgatttctgctagcaacattgtttccgtgatcttatgatcattaatcaccagtgttctgtttcatcatctacaaaagagcactgttactctccagctgttccccttcctgatgaacttgcgaaagtggagagaaggatataaactcagaagtgtctttgcttggtgggtaaattaggtctccttgctatgttccttctgcaaccaaataactttctgcgaacacttaatgcagagcttgataccctgagggttcagaagggaagagaccatcaggcagtatggtctttgcctcatttctaaaaagcttctggttatatctgagctgagctgcttctaaatgccagggcctcccttgacmatgtttcttttttctcacacgctcctttcaaaaggacaagacacatttaaagatacaattaaatatattgaagttacaaagcaatttaaagaaattaagcaataagacacacccaaatatatgttacaaaggaatttaaagaaattaaagtaaatagaacattttcctcttttatttgcattgaaataaagtattatttctttactcctagtatgttattggaactgtgatatacttatttagaaaaaaaaggtactgaatcctggaattcaaacctaatcttaggtttgagtcccagaactaccacttatccaatgaaatkaacaagcatagttattgtttaagccttctcaataaaatgggactgatgatacctgaggasatctcatgtatgaaaatattttgtccaaaagcaaaaggtaaatacaattggtttttgtattaaaagggctcaatgagccctccagtccagtggcagctgcttgtaggaattcagacactcagttggtgagggcagctctggtgatgccaagttgacgtgcgccctccctctttatttcctccytcgccctgcagagtaacctgatccactacctgggactgagccatcacctgctggcactgaattttatcattgtttcttttggcmaaaaaagcgcgtggtcttctgcccaagtgaaggtgaccgacacagactttgatggtgtggaagtcagagtgtttgaaggccctccgaagcccgaagagccactgaaacgcagcgtcgtttatatccacggaggaggctgggccttggcaagtgcaagtgcgtcctggtcaccttcagatggtttgttgttgtggttggccttgggggagatgygtaactgagtttggctttcttagtgggaaagaaggggaccatttatctaggttcccctggatggtcccagttacccctgttgtcccagcaaaattattactagtgcccccttttcactctcaaaagggtcctggtttgggtgataaattaaatggttatcctttgtaaaggttttttgcttgttagtttgtttgtcaattcaggtagactgttgtaaaaatatttcctatgatctaaatcacagactaacttattgtgcagtgctgatacagctttctgcaccaaaacaaggtgaagtttcaccaggcacgcatatggggaattatctgtgcttcttttgccaacttgtgttttgaagatatatttctatgaaatagaccaggtattccttaatacacatgttaacattttatctgcttatgaaagcaaaggtaaaaatatatgcaaccattcaaaggaaacaatcttgcaaagttcaagaatattttctttagatttggatgatttttatgagtagaacacattcaaaatggcaggcagccaaacagagccgcccagaagagaacctcccaaggcggaattcggggtcttgtctctgctaataaatgatcatggagctacttcctcatcttcagtccagagcttttggcatccccttagtttaaaagcaatggcaacttgttttttttattttatcattatgtgatttttttttaaaagcaacaaaggtcaaaaggtttgactttttctagtaatcttatttaattccatatccgttgtttattcttttattcagtgattttttttcacattttcaatagctgttcatgagtatgtaggtttgcccgagaccaaggggtttgctgggctgcaggtctttcagtgcaaaagctcaaacagttgtgggcaagtctggaccattggtcagtctaaggtgtgctcgggtgtagggatacaaaaatgaataagaaggagtttctgccttaaaagagattgaatctgtagcattggacgcttgccaggaaaaacattgtactggaggacagcaagtatgggtgccaggaatgggatggattacaagagtcagcctggccttttctgcataattttgactgatcacttctgcctgaggaagaacttgagcaggtggaggtaacaggtgtctatgtaattcttaagcttccgattctaagactgccttggaaaccctataaataaggaaatgtttggctctcagttggcacaatatagatcttaatttactgagagtaactaagaattaaattcttacatattaaattggttctgttactgcagacctttggaatcctctaagaaatgctaagacttcctaaaattctagttttttacgtgttcatttaaagaaaataccatattcttcaaattgatcactttactgaactgcagcaaatgaagtgttaaaagagcaaaattgttaaaatwattatttttagacataagatctcactctgtcacccaggccagagtacagtggctctatcacwgctcattgtaacctcaaactcttgggctcaagtaatcccccttcctcagcctcccaagcaactgggactgcaggcgtgcaccactatgcctggctaattaaaaaaaatttttttatagaggcagcatctggctatgttgctcaggctggtctcaaacttctgacctcaaatgatctccttccttagcctcctgaagtgctgagattacaggcatgagccaccactcccagcctaaaattgcatgattctaaggaagagactgcttatttgctgtgattttttttccagaaagatgtatacatttgaagagctataaaatcaggattaatttggtgcatttcatatagtccgttatgaaataaatatttagatagtaatatattcaaaactaaactatgcatttcctgttatatagtagttgcatgttattagaaatcagatttaatttttcatgtgtacatgtaactctattatttgttcacatttgctttttattatttgtttttagtattagctccaagcctaaaaacaattcacacttagcagaatttatgagtggacagtattaaatgacctgttttgtaatgattgttccctttgtgtcttttagaaatcaggtattatgatgagctgtgtacagcaatggctgaggaattgaatgctgtcattgtttccattgagtaagtaattaatgctagtcatagaaaatttttcttataaaggaattctagataacagtctggttactttgttttacaagtgataaagtaaaaaataaaggtctcaagttggcaaagagatatgcccaaagtcacactcagcataatcagaaaaatgatttctgatgtaacaaaatttattgaactagctttataacacttcaaattaccttttcaccgttagttttgaaaactgaaaaaaggattaactaaaaacctagagaagtatgcaatcagttacctgcaacatataactttttaaatctaaaaagtagtaaggattttaagagaatctcttctacagctgagagttgaaaaagttgctctcttagagtcaggttctatgacttgtgccttgggaacagaaatacgtgttcaacaaattttartggtgtggttagtagtaatagtagtaatattaatattttgggttgtctctgtcagttctgtataagccacttttctgggcaactaagaagaatgtgaataataattataataattttgatgataataataatacaacacaaaaatcacgccatcttttttgtaccaggcattgtgcgaatgcttttgcacacgtgtctcttcttctttaggtcttttttagataccatcctctcagccaagcctttttttgacaagcctttgtgaaattgcaacccaygttcctctgtttcatttctctccaaagctatcatcaatatctgacaaaccacatatttgacttattatgtttattgtaataagtggaaatagacaatatgaattttataaaggcaaacatttcaggattgttgtttgttttgtttattgctgaatcattagtgcctggaaacatccctggcatatggtgagcattcagtaaatatttatggaatgaatgaatgaagcaccttaattctcatataaaacatccaagatattttgatatctttttcataagtgaggaaattgagacccaagaagctaagtgatgtgcataaggccagatagctagctcatcgcatagatggggtaggggaataagtcagatagttcctgaggtctctggacctttttgatccagtttcaagccactattgaagggagcttataatgctgagtggcagggccatgacgccaaccactttttcttgccccaggctcattcagttctcttcttccctctgcctctctgtcagctatcctcctgttcatggtgcgccacctccttgctcctactccagatttgagtggatcttttcttctgcagtctcttgaaaggggctgctcagagtcactgaggcagttctgaccctgttgacagaagccctagagtcacccaaaagccctagagtcacccmaaagccctagagtcactcaaaagccctagagtcacycaaaagccctagagtcactcaaaagccctagagtcacccaaagccctagagtcaccccaaagccctagagtcactcaaaagccctagagtcacccaaaagccctgcagtcacccaaaagccctgcagtcacccaaaagccctagagtccagacagctggagccaaatctgctgaggaagcagccaccgcacctggacctttctggactctcagcaaggcctcccagattactcaagggttgtcagtgcagwttggtaatacaggaaccttcaaggaaatgatttgggcagttggcctgagcagctggccagaggaaagcacaggggatgtttaaggagacaaggccctacagctcggtgttgaggaacaagcttcaggggccattcagttggtttcttgtgtagccccagctccttgcaggcctgagaaaaggagggaagctgggcttgcttcagttggcaccgtgcagattttccatttaccacagggcctaccctccgggcttcaatatcactatttggccacatgccctaaaccgttcctccattcccttctccccttatcagcatctgtctcaagtaaaatgggtattgcaaggcttatcataagacacagaagaataagatatatttaagaggatttttttgaaaagggctaaaatttagaagggactgctttgatttaaactttgcattgttcctaatctatacaacatggtgtccagatgggaggcatgagcatatggcagtcaagttccatcactcatgactgtgtgacctcaagcaggtcatttaaactcatgtgcaaaatggggttgagaacccttcctgtatgtttagaatgtgagctactgggaaaacagtgaggtatggtggtgtgccttacttgagaggctgaggtacaaggattacttgagcccaggagttcgagtccagcctaggcaacacagggagaccctattttttaaaaaacaaagcaaaggccaggcgcggtggctcatgactgtatcccagcactttgggaggctgaggcaggtggatcacctgaggtcgggagttcgagaccagcctgatcaacaacatggagaaaccccatctctactaaaaatacaaaattagcctggcatggtggtgcatgcctgtaatcccagctactggggaggctgaggtaggagaatcacttgaacccgggaggcggaggttgcagtgagccgagattgagccattgcactccagcctgggcaacaaaagcgaaactctgtctcaaaaaacaaacaaacaaacaaacaaagcaaaaacaaaagaatgtgaactcctggaaacagaaatcacgtcttccttcctttgcatctccagaacccagtacaaggcttggagtgtgcatgctaggtaaatgcatgctgagttgggataatgactgcagagaattgtcatgagaatcattttagacaattgatataagaggagttcagatattcaaaagcactagctgagtctggaggattattgctctatctagcctatagaatgaaaaggacaacttacacgtttatttatcagcatgtttggaactcacagtacttttttttctttttctttttttttttttttttttttgtagaaatagcaagatagtaatccttgttaagattcaggctaacccaagagcactttataacctatgctgtagttgaggtacagccaacattatatgatcatgatgtttctcttggaaacgatgttcaggcctggtgtagtggctcacacctgtaatcccaacacgttgggaggctgaggcaggtggatcacttgagtccaggagttcaaaaccagcctggacaatatggcaaaaccctgtcttacaaaaagttaaaaaacaattagccaggcatggtggtgcatgcctgtagttccagctactcaagaggctgggttggaaagactgcttgagcataggagatcaaggctgcagtgagctgagattgcgccactgcactccagcctgggtgacagagagagaccctatctcaaaacaaaacaaaacaaaaaaatagaaaaaaaaagcagttcagagcgggatctcagtggctcgcttctttcttctttcttttattccataaatatttactggattcctgttttgtgcyagttaccgtgttaaatgctggtgacataacaatgtaagaatgacttaattcctgccctcatagagtttatgatctagaagagaaagmccttgaataagtaatgttaaaagtgtgataagtgatgggaagtagaagggcaagtagtaacagagacatctaacaggcaagatcttacctcgtttaaaggatcagaaaaggtgtcttaaagaaagtgatgtttggatgaaacccctaagaatgagcagaacctcattagaaaaagtggatttgtcatggaagaccaaagtggtgtagtaagagggcttgggaggggagggacgaggcagagagcagtgagggaatgaaatgtgagagaagacagacggagggacgactgaggaaaacagaagtaagtgtggatgattccaagagtctttaggaggatggtggacgcttggttcttctggagctccgccttctagaagacaggctgtctggagccagcagctccttgccttgaggccctctagagtgggtagtggcgtcatggctttgctattctttcatgtggattatggcactggggaaggtttttatctgaggaagctggtgggcaggggttccagcagccttggtaatggaatcacctcttatgagcaccrggagttgggactccatgawtcatgtcactcatgctggctcaagggtctggggacagaccaaatgactgataggtgaagtccttgagtacaaaacctacgtaaaagctatgtctcctactcagtagcttctacaacgctatactatttttacatattaattgcacaataagtatttgttaaatacattacagtgtttatctaagatttgcagatgtatcctcatttatacaatctagaatataaaaggccttatatttataaatttcagtgcagtttaactataatagagtatttttttacctctagtttatgtattttttatttatttatttttgagacagagtctcactctgttgcctagggtggagtgcaatggtgcagttttggagaaacagtcatccatccacattccttcccctcgagcacagttttattatatgttcttttaatgaaaaggaagcttctgggtgggatgcagtggctcacacccgtaattccagcacttagggaggcagaggtgagaggattgcttgtggccaggaatttgaggctgcagtgagttatgatggtgtcactgcactcaagcctgggtgacagagcaagactgtctcttaaaggggacagggggccgggcgcagtggctcatgcctataatcccagcactttgggaggctgaggcgagcggatcacgaggtcaggagatcgagaccatcctggctaacacggtgaaaccccatctctactaaaaatacaaaaaattagccaggtgcggtggcgggcgcctgtagttccagctactctggaggctgaggcaggagaatggcgtgaacctgggaggcagagcttgcagtgagccgagattgtgccactgcactccagcctgggcgacagagcgagactccrtctcaaaataaataaataaataaaawaaataaataaagggggcagggaagaaaggaagctttgctttttttttgaccttgtgatgcaacagtagaaaggaaacttctgttagtggaataaatagattctccctctggagttgtctcactcagagagcacaatctggatttaattattgatttgttttggatatcccctactaaaaatacccctaagacagtggggaatattaactcttttatgttcccaaaatgaatctattgagattttcttgggtgatggtgaaaagtaaaaaagctggaaaaggagtgaggcttatcctctctcctgctgaatctgataggagtataattttattccagaatgccgcatgtatctttcacctaagtagtactatatgaagagaacttggcgtcccttccacagcagaaggttgtgcatatggcttccaggttaggttattttgaggaagaattgcgcatttcaaccctcttagcacattggtgtcattcggggcttgggggcataggtttgaagtcagttgtgagttcagatcccagttctgccacttctagctgttacagacaagttacacattttccttcaacctcacattctcatccttaaacccagaagtttgcttgagatttgagtgacatacgtctgtagaacatttggcaaggtacctcacccagcaggaatatggtcattttgatagactgtacacattaatttgattaaacctcatgcctgaatttacaccaaattttgttcttctgatgggagttacatgcagtgataaagctaggtaatccacttgkcattgcagagtcatcctctccctgaagtgagttgggcaaattgaggaatatatatgcatccataatattaatatgatataacatctttgatatttacgtatcaggtgctttaagatctgcagtttttaaatattgaatgtcagaaccctctttcactactttgcagggacatagctttgagcaccagcagcagagagcagatatatttatgtatgctttatttggctgtaccacccatgaatttcctcctgattcttggctttctgtgtctagatattacaaaattttgatatacttcttaggtgaatttcaagctactttgaaagttcatcttatgccaggtaacctaataaatatctactttcaggatattcttmagtctacaaagtctccattttttttttttttttttgagacggagcctcactctgtcaccagtctggagtgcagtggcgtgatctcggctcactgcaacctccaactccctggttcaagcgattctcctgcctcagcctcccgagtagctgggattacaagcacatgccaccacacccagcaatttttgtatttttaggagagatggggtttcaccatgttggccaggatggtctcgatctcctgacctcgtgatccgcgcaccttggcctccccargtgctggaattacaccatgcctggtgctggtgagccaccgtgcctggccaaaagtgtccatttttattgagtaaaactgaagaatgtttccagcatgaaaacagatgaggggaggggttaggccatggatctttatggcaccaggarcactcttgcatcataacctgtttgtttttaagcatgtttatcctattatataagccaattattaattgagaagattgagcagtagcatgttttttttaggttaccaattgcctttgatcaaagtctctcagaccttttctgaaataacatctaaaaactcaacttatttgacatatggatgctagtggatatgttctgaccatctgggcaaccaggaaaacagtttattgtgatatgtgggatattgctgaaatgaaataacctttgttttcacaacttgagtcatgaagtacatttgtttttattaaaattaaaagttcagcttggtaatactgaagattaaaaattgagacccaccccccaccccaagaactaggggtaaatagactcatatgaaatgatgtcatctagtggacaaaactgcrtaattctacttttttgctcaaatggaattatatagattatatagcagcagctttcatacatagtgaaaaatcaactggaaaaaaaaagcattttgcatgattaattgaccaccccagatggaaaaataagaaattagaaaatttattttatctgctatatggcaaacgctaagggattttttttttttttttttttttttttttttgacagagtctcgttctgtcgcccaggctggagtgcagtggcgcgatctcagctcactgcaagctccgcctccactaagggagtttttttattgcatttagtttcaaaatgtggtaattccggaatgaccagatccacattcactacttgtcaacgtatttcacaaacatttgtccatttgattttatctacaatgaatgtcaagatgtttaattacctagcaggattttattttgagacagggtcttgctctttcgcccaggtcttgttctttcgatctcagctcactgcaacttccacttcctgggttcaagtgattctcaggcctcagcctcccaactagctgggattacaggtgcataccaccatgcccggctattttttttttgagatggagtcttgctctgtcacccaggctggagtgcagtggcaccatctcggctcactgcaacctccgcctcctgggttcaagtgattttcctgcctcagcctcctgagtagttgggattacaggcgcccacgaccgtgcctggctaatttttgtatttttagtagaaacgggttttcaccatgttggtcaggctggtctcgaactcctgacctcaggtgatcygactgcctctgcctcccaaagtgctgggattacagacctaagccaccgcacctggccctttttttgtatttttagtagagatggggtttcaccatgttggccaggctggtcttgaattcctgatctcaagtgatccacctgcctcagcctcccaaagtgctgggattacaggtgtgagccaccgctctcagcccaactagctggattttagactgtggaaaataaatgtctttatttagagtagcttagaaaaaattagtttgtgaaaataagtatgctaattataagatggaaatcaaaagtcttgagtcttcattggctgttattaatttttaattaggtaattagtttttatcctacctaattttggtctgtttttgagtttttgcaaatcaagtaacttttgtatgccttagtttcttcgtttgcaaaatgaaggtatgttaatactcaaaaaagatttattggatggatgattatgtgcccctcacattggcagatactggaagcacagttatgaataaaacacagttcctgatatcagagaacacaatctttaggaaaaacatatgataattttcatatgagccaataagaacagtgagtgacrtaccctggcacatagaaatatcaaggaatggtagccagttcaagcccaaaagcaagtggagatatgaccaaggaaggctgcccagaggaggccaaaccctccagttaaggcttaaaggatgagtgagaattaataagcaaaagaggggagtagagagtgagagggaactctaaaccaagattgccaatgtagatgtgtaagataacactatgggtgaggcatttgacaaaaccagagctttctgggaatcttaaggggatatgaattctactaggtgtacagagtaggattccaaaggactctgatcttgcgaagtggggccagttggagaagccccagaagtatccccgagggcctgctctaggccgtctggaaaacttagcttcccttttgtgagttaacaaccggccttttagttacagtcttccaggtattgaatgcatttcttgggtttaatgtcaggctaatatggacctctccagtgaagtacagttttattatatgaagtaaatgatggactcattaaatgtgagatcaatgaagtggttaatcctgccaagtcacctcgtaacccagaggcattatgaatggaatgctgacttccagaaataaaattctaaaatctattacggtgctatccatgtctttgtaatgaacattcgccttttacttgttagttttattttggttgttcttggtggtaagtaggtttggtttggtggctgatagtttaaagaaaaatagtactattactaatacaaaatcatcacattttaaactaagtatttgatttgcaagaaaatggtttatttttatattttattattttttctttttcatacaataattccattgaattaatttcttatctatttccagatttaaaagaaccagtttccatctaaactttaaatgtcccccaaaattggagaaggccttaaatgaatacaacttttgtttttacagatacaggctagttccaaaggtttattttcctgagcaaattcatgatgttgtacgggccacaaagtatttcctgaagccagaagtcttacagaagtatatggttgatccaggcagaatttgcatttctggtgacagtgctggtggaaatctggctgctgcccttggacaacaggtaacaccactgtcctaaggtgctggtgggttaagcggtgcatgacaaggtctagcagaccaacacaccctccattatgtgtggcaaatgcatagctgggtgggccggtcactagatggccaaattgttcatgygattacacttgtagagctctcagagatctcgttgaagtaggaagatgagtcatkggaggaagtrtcacctatgagtctttgtaaagtccctgattacagtcagtgttagagaagggctgacatcccttgcttctcagggctatgtatggaactccagtatcccctgctcctttttcatgtttgacttgcaaatcggagtatttttgcttaaattccagttcctaagattgttccttacaactttgagccaaattaaaaccttaaaatttgtttccccaacttttttttaatgtaaaagaaagaaattaaacgattcagccatttaaatattatcttacaagttactatgagctttacctggtttaattctttgaaaactatatctagcttctaatagcaccccaatttttttggcaagtgggaaaaagcacattttcttcctgttatggatgaagtaacttaagacatctttgtcttctcacctccaaatttcatttggtgtcctcaaataccatctgtcattctaattatgatgtaccttggcttctaactcttttgctataattcragaacttgattttccatttggcattggcaagttttccatccaaatatggtcagaagagagtcttggctcagtggagagaacattcttggctttgaagccagacagcactgggatctaacccaggacccaccgttgagtgctgcggggccctggataagtcccttaacctctctgagcctcagaaaaacgaggacagtgtcatctrattgcagggctgttgcaaggacttagtgaggtgatgtgtatacaatttttggcacatattcaaagtgctatttactgaccattcttgcttttggagagcagtcatatctcacctgggaatgggtttctaaagtccaagtatgaagcagaagtgtatggctaaagttaccttgaagatcatttagttgtctatgaagcttcatgactagttagctttcttttagatgttacacgacaaatatataattttgcacactagaattacaaaatggggcaatgttaacactgtggggaggtgttgggggactgagatctgttgaggtaggggattcattcacattcccatgacaacttcactctggcatatgctcattatgtagaatggagggtgcattgccagaactatttaaattctgtctcaccaagcgtgaagatgctcaccagaaagcataccctgaggtcctacttaaacactcaggagtctcataatctgcttattaagttttttctgcccctctcttctggaagaataagactaatttttttccccctaggaagccatgacctttttgggggttttgtagggaataaaaaattaaataaggttcacacattatccattcataatacctaggtgtcttaactgcctaaagatagatacaagtacagggttcactcaaaactgagttgtaaacatcatacctttcttagttaaatatctagcagcttgatagggtggtgatggtaatgatggagaattattttttaaactttattatttatacagtgcctggtagaaatgtaacacttataccattgacagattcagagtaacacatgaagctactctacagggtatggttcctataaaagraggcatgcwaaatgaaataatgtatttgcttcctcttctctagtttactcaagatgccagcctaaaaaataagctcaaactacaagctttaatttatccagttcttcaagctttagattttaacacaccatcttatcagcaaaatgtgaacaccccaatcctgccccgctatgtcatggtgaagtattgggtggactacttcaaaggcaactatgactttgtgcaggcaatgatcgttaacaatcacacttcacttgatgtggaagaggctgctgctgtcagggcccgtctaaactggacatccctcttgcctgcatccttcacaaagaactacaagcctgttgtacagaccacaggcaatgccaggattgtccaggagcttcctcagttgctggatgcccgctccgccccactcattgcagaccaggcagtgctgcagctcctcccaaagacctacattctgacgtgtgagcatgatgtcctcagagacgatggcatcatgtatgccaagcgtttggagagtgccggtgtggaggtgaccctggatcactttgargatggctttcacggatgtatgattttcactagctggcccaccaacttctcagtgggaatccggactaggaatagttacatcaagtggctagatcaaaacctgtaaaggagcaaaacttccagaagcctcgagcccctcttgacctcctacacctgctttggaaagacatgcactttttagttgactaattcttcctcccattcccctctacttgcgagttatggaatttctattccataactgaagtctttatgataacctaatttttaaaaatgaatttgactaacttaagtgcaaaacatgtaaatttggttcccagagtgggccaatctctctgttcttgttatcttagccaactatactsmtacctacagctacagaaagcaggactaggaactggaaataactttgggtcctgccttcattaggacgttctttttagaagcagttcttccagctctggatcatagagtgacctttaataagttaaaaaaacgaggactccttaattctgctagagttaaccttgagttcagagcagtattaaatgcgtgcactttcaggtcagtactggggaccaagtaccctctggtcttttgtgaatggatggttttgtttcctatgggaattttggcaaaggttttctggaaagaacaagtttctcaaaggactttcttcctctagaatgttcattttatgagatcgctatctgtaagtccagttggattacaggaatacttgaaagttactttctaccactattagaaaatatgaagtcgcatgcactggatatctatatatcattaggtttttgttgtgtttttggttatgctgtcccccttctccttggggagatatttgggagcaaacttatttagatttagagtaaacttttcattatagagcaagtaaaaacagacaaatgaaacaacctagtgtttcacataaaaatacttctgacataaagtaccaagagcagtgtgaatatacttggcatagtcaaaaaaraaaatacatttaatattagttmaaaattgttaaaaatacctttagaaggtctagtctattattgaaaactcaattttttcacttatatggctttaaaatggagctattttgctacaatataatgtattgtttatttttttaagttatttaatgttaatatacatagctagacttaaggtttttcagaaagatgtccataataaatattaaaaacaatggtatttttwaaaaaactgccttagggttttaaaaccttccctacagttataaccacgtgtaattttgtggaaatgatataacagctattaatactactataacataggcataaatattttcgtgtttatatgcatatacaagttaaaataattagaaactatgactgcgcctagtaaagtcatctaggtttatagttcagtagcttaggcaaggcacacactgctcatctccgctttttagggtcagaggaacacaagctcatgttctgagtgaagggcgtacactggcacctggtgttgcctagatcccccatctcctccttccagccaggtctggaagtttcaacagcccaagcttaacttcatgtaaagtcttcactgccagtgggaacatctttgacacaacaagacactccaattgtgatttgagttgaggatctctgcctgccttcctgccgtccttccttcttccccgatccatgctacttttaggggctgcggagagcagcagcagagctgagtaatgatacagggcaccacggagagaaagtagaaccatttcactcctgggaagatggggtatttcccacttccagcaacgaaataacaaatgaaaagttgcatacttattgatgtattgtatgagccagtagcattttatgtacaaaacagaagtcaatgcaacagtatgtatgtgtgcctgtgtgtgtataaaaataaccattgaagctaacttgctaatgtacttaggcaagccacttcccatctctgggcctcgtctttcctccctctaaaatcaaagagctgaattatgtgatccttgaggtctcttccacttataataccaactgtcttgtcagactggcaaattatattggcctctccttatgtggtggtttttttggtaggtcatagttccttatacacrgacacctgcatcatcgaaggtctttttttcctaaaaaaaaaaaatgggattttagttcttattctgtgataactatcctcctcatataatactattctttttgacaccatttgaaggaaccaatatttggaccttattttgaggttgtctgtctcgaagaaaaagaaaataaaatgtataggcagggttccttcaattggcattttccccagaattgtgagccaaagcctatagtaattgcagacagcaaatgattccggatctctaaaaggctctctcagatgaaaagggagtaaaggaaaaaagaggtcaaccactgtttctgataatgtacttgagtttcattgttcttttagtttgtattcttataaaaaatgtttacactctgcagattgattttttttttttagtactgtggctttcttttcctattttatgaaaaaaatgataatctttttgtaaaattgtctgtgaaatataaacattaatatataaagaaaaaccttgaagtgctgtatagtgaagtataaattaatgttttattgatttgtgaagaatttaagactattatataattatcttggtggatctattttatgcatgaccttttaacctttgactttgcttatttcccactacgaaggggaaggtagattttatgaatgattttaatagcaaatatattttataaagtgaaaatccagtgtggaggtagcaaagcatctatctattctgaatcatgtttggaaataaaattgctccatctgggaatgtgctttcattttcccgtctcattttctgtttcccatttgaaaacagtgttctcttctcttctttctgtatgccaaattgccagccacaattctttcccaatcttctgcccagtggagtactccagctgtctttcctttagagaggtggttcagtggcctccttgatgacatttgtttcatgtctggatacagtatgtgttgccctcctttggactggctagaatattcataaaagccaggcaggccctgggactattttgggaccttcaatacacatgttaggaaaaggatgatcataatgccaagagtttgagctgaattgtttcagccaaagcatcactatcactgaaggcaggttctcaaactgaccttgtcattacaaataaatctaatttcacacttgagtttattatgcttagtttatgtcaataccagaggaatttataaaactttttttcagagtgaattgtttatattctaaatgatccacatacaagtgtgtaaatttggttttcctattctgttatagttactttcatgtcccctaacaaaacctcttggtgtgtggttatatttggctggatggatccccaaacagctccaacacatctcctttggggcatttaaatgtaaactgtatgtgtgttttaatattgctttcttgttattttcattctctttatcccctatgtttttaattttttttataactcagattttctaatggaccccctattgaaacatctagaagatacagatatcagtaccagatgtctcaaatccaaaagactggaaatgtaaatatgatttctaataggcacacatggtagctcagtgctgtcagtacattttgtgtcatcagagtgagagaggttggtgacagcatttgcacgcgtcttcatttgaaaggctcctctcccacattttctcatggctgactcattgttggcatcttagattaaatgcccccgcctcagagaagtccatctcagccagccagtctgcccaaccctcccaatcaccaccactgtccccatcccctggccctctcatctgattgcgacactgattgttgctgttccatctcacttctgatgatcatgtctgtatgtatgtgcttgttttcttttctccccgtgcttatttgtaagctccacaagggcaggaactttgtctttcttggcctttcctgttttctcagcacttaaaacagggcacacagtagactttgaaaaaacgattttgaagcctccttcctgagtgtgtttcttcgctgtaactgccatttgccatgttcttctctttttgyggggagtgagagggagaggacatggtctgagtctcgctctgtcacccaggctggagtgtagtggcatgatcttggctcactgaaaccttcgcctcccaggttcaagcaatgctcctgcctcacgatcctgagtagctgggattacaggcacgtgccactgtgcctggctaatttttgtatttattagagatggggtttcaccatgttggccgggctagtcttgaactcctgacctcaagtgatccacctgcctcagcctcccaaagtgctgggattacaggtgtgagccaccgcacctggcctgagtggtttttttaaagttgattttgaataagtcctcaccaagaaaaattaaacttataagaattggggtattattacccttcttctttaagaagtaagttatgtcaaatataattaagactaaaaagtaaatatttccaaacaaaatgaaacaactgaaaggaagccctgtttttaactaccaaattttaaagcaaaaaatgcttttgagtgaagttctttttgctttttgcacaactcatgtctgttctaaatttttctcagcagatagtttttgctatgttgaataaaccattgtaaactgcactaaaaaaatgacctatctaacatattctataagtgttccacggaattttttttttttaagagatggggtctcaccatgtagcccaggctggtctcaaactcctaggctcaagtaatcctcccaccttagcctctcaaagtgctgagattataggcgttagccactatgcccagcctgaagtcaattttagagtttgagaatttttgtttttgtttttgagacggagtctcgctctgtcgcccaggctggagtgcagtggcgcaatctcggctcactgcaagctccgcctcccgggttcacgccattctcctgcctcagcctccagtagctgggactacaggcgcccgccacgacgcccggctaattttttgtattttttagtagagacggggtttcaccatgttagccaggatggtctcgatctcctgacctcgtgatccgtccacctcggcctcccaaagtgctgggattacaggcgtgagccaccgcgccgggcctagagtttgagaaattttaaccagacaagccaatctaccacgtttttttttttgttttttttttttttaatgagatagagtctcactgtgttgcccaggctggagtgcagaggcacgatctcggctcactgcaagctccgcctcccaggctcacgccattctcctgcctcagcctcccgagtagctgggactacaggcgcctgccacgatgcccggctaattttttgtatttttagtagagacggggtttcaccgtgttagccaggaaaatctcgatctcctgacctcgtgatccacctgcctcagtctcccaaagtgttgggattacaggcgtgagccactgcgcccggccaacagcaatctaccacttttaagatgtggttttccctttttgttttcattatttttttaatagagaaaatgtttttcattccagttaaattcatgaaatcaagaaataatacttattttgcttagctgcaggttaacgttattttaagtattgtactttaagataaatggtttactaagctgagtaacaactctcctgcttacgtcatttccaccagtctcacagaatgaagttaacttccttctggataaagccagtgtttctatttgtgtccttaatccaattcattattgtctcactcaaggacttgctaaagtacctcccttctgtcctgtacctttaactctccgtttctactcactccttcctcttagctctataaatacagtcaaatttgtcctctcaacaaaaaactcccctttgacttttattttccttctggcccaaacactgaattgtccatagttttagaagttgacaaatatcaacatcacaaaattctacttcatgtgatttccattaaagaaaaatttttgtgtgtgtacacacacaccacatacaccaaaggagagtttaaaattatacatgatgcaatagggttttggttatctattgccaagcaacaaattattatgcaacttgcaatttaaaacagtcatttgttgtctcagaattctgggtggactgagcttagcttggcggaccatctgctaaacttgatgttgcctgtgactacaaacttcagggtcccactgagctagaacctccatgatggctcactacgaggctggcagtggtgctggctgttggttgactgccttggatctcctttacatggctttcccttctgaattgtaatactaaaagcatggcatctggattccaagatagaacattctcaatatgcaaaagcaaaaagctttgtgtcttctaaggtccagatttggaagttattcaacatcacttccaccatattcagttggtcaaagcaaattataggaccagcccagatttaaggagaggggagacagacaccatcacacaatggagggtgtgattaagagtttatagcctttttttttttttttttttttgagacagagtcttactctgtcacccaggctggagtgcagtggcgcaatctcagctcactgcaacctttgcctactggattcaagcaattctcctgcctcagcctcccgagtagctgggactacaggcatgcgccagcacgcccagctaatttttgtatctttagtagaggtggggtttcaccatgttggccaggctggtcttgaactcctgaccttgtgatccactcatgtcagcctcccaaactgctgggattacaggcatgagccactgtgcccagcctatagccatctttattgcaccacaattctttccagaggagaattccattttgattagtcattgaaaagaacaaaattctctttacattttttatgtctgatgattgagagaatttttcacagattgactctgaccccaaacatttctaacattgtttttgctccactctgctgaaatttattttgcttagtgctattgaataagttcatattgcaatacatacgccctccacttcagcagagtatagaatgggatattcctggaagctgttcctctcctggataagtcagcaataacttaactgaagcagctgcatataataaatatatccttctaaactcaagctaaatgtatccccagctcaatttttccttagcggatccccaaaatgcctgtagccattccaagccatctaacatgtggagaatcacaatggaggagaagttgtggtgggaagagtcagtgatactaactgcagttaaaaagtatttttacctatgtgtgtttttaaaaagcaacatcttgtgtacctataaaaggggcttattcagataaagggccctaaactcaagttttatggtaaatatgctcatgcacaagattgagatttatacattcaccctccttccagatgtctctcctgagccatccttaggcctaccagggcagcaagcctcaatctaaatgcattaccttcttccctgaagtgccattgcattatatggtccctatgtcatttgattgtatcaccttctcttaggtctctagttactcaagctagaattataagttttatttatttcctccagtccttcaactttcaatcaatcaccaagcccaatcagttttacttcctaaatatttcccaacaccattcccttttttttccatccctggacacactgttttacttgagtcatcacttcttgcccaaacaattgcaataactccctaactacttgtctccctcagtttcatgttcctcaaatgtatcccctccacagctgcaaaaacgatgaattaaaactcacacctgacaagatacttctcagcttcaagtcctgttgcctactggcaggtttcaagccacttaatgttatgtgcccggctctccctcgtgaccttgcccctgcccacctctgcagcagtagttccttacgtgtggtctggggaccccttgggggcccacaaaatcaaaactattttcataatactatgttatttgcctttgtcactttttctttcatgagtgcacagcggagtcctccagcagctacagacatgtgatgttgcaacagatccaaggcagaagcaggtgtgagaatccagctgtctctagttaagctagacattaaagagatttgtaggcccgggcgtggtggytcacgcctgtaatctcagcactttgggaggccgaggtgggtggatcatctgaagtcaggagtacaagaccagcctggccaacatggtgaaaccacgtctctactaaaaatacaaaaattagctgggcgtggtagcgcgcacctggagtcccagctactcgggagactgaggcaggagaatcacttgaactcaggaggcggaggttgcagtgagccgagatcgcgccactgcactccagcctggcgacagagcgagactccgtctcaaaaaaaaaaaaaaaaaaaaaaaaagatacttgtaaaaatataatacaacgccacatttttcactaatttgtatttgaaaaattcaggatttctttcgtaaaatagagcttaagataacatgtaattaaatacattaataactacatttcaaatttatcagctttagtctccctccctccctcccttccttccttctttttttgtttgttttcctcagggt

SEQ ID NO: 94712 - DNA, 80392 bp, Homo sapiens
  misc_feature (1)...(80392): n = A,T,C or G
ctaggtcattgccagggtctactatggcagccccaggaggcaatcatgtgccccaagggcctcagatttagatacatctgaataaggataatcagattagtacagagatctgttgtcaggcctgaaagatgtttgtcacaccataccacttaaggtgctctacaaaccattattattattattattgacagtatctcactctgtcacccaggctggagtcagtggctcaatcatgtctctacagcctcaatcccctgggctcaagtgatcctcctgcctcagcttccccagtagcttggaccacaggcaggtgtcactatgcttggttggctccattattattttaaagtaatccctctattaccttgagaattgcaaaattatcttgaatgggacttttgcatgtgtgttaaaagcactgatttgttcaatttaagtatttcaaacatgccccagttttggtaaccctgtcgagatgtttctttttttttttttagagatggagtcttgctcctgacctcaggtgatctgcccacctcagcctcccaaagtgctgggattacaggcgtgagccaccgtgtcccgcctagatttttcttaatttttgaatgtgccaggagcttcaaagaatggaaaactctccaggccctgttagacctgccagagctcctgcaggctttgcgcttccactggcacttaggatgaatgggtatttgctgctctctgccaggctctgggaatccagctaacaataagctgaaaagcatagataccctttgtggggctttggctctacacccagctctttccttgctggtttcggtgaatctccccaacagccctgtagagtaggactccatttggggatgaggaaagtggcttagaaaggtagatgttctgtccaaggtcacacagtgggtggcagcatgacctctaaagattgtgtgtgtgtgtgtgtgtgtgtgtgtgtgtgtgtgtgtgcgcgcgcgcgttatggagtcttgcttttattgcccagactggagtgcagtggcatgatctcggctcactgcaacctccacctcctaggttcaagtgattctccttcctcagcctcccgagtagctggaactatagacatgtgccaccatgcctggctaatttttgtatttttagtagagacggggtttcaccgtgttggccaggctggtctcgaactcctgacccaggtgatccaccttggcctctcaaagtgttgggattacaggcgtgagccactgcacctggccagaatttttacccataatattatactcaaaatccctgcaaatgaggacaggaggaatgcctgccccacccaccagacagatggatattctagtcacctgcttcctctgagccctgtgggccctagactctggctgcgggtgctgagccaaatgtatggtagaagggtcagtccaagtcagaccacacttgtgctcagagacctccagaaagctgctggacctacacagcctttcgctgacagagctgggctggggccacgctcagcactcagggaaagcccagctccatgtcactctgctagctggcactgcaacccaatcttcaacatggaggattgcagccaggtggcctctgtgctctcatcaatattttaaggctcagaactggagcaggggtgcttggtcctgggtgtgacctgggaggaggtgtgagcacagccttgccagggctctgcttctccagcccgtgagggaacccccactgtgccaaatgtctagtgcttcctgggccaaaggtgcttatggtgcagaaggacagaaggacaaggctcccctggatggggtcctgggtggagtcccaggtcctgctggcctttaacgaatggttttatcccctgggaagctcccttgccacctgggagatgaagtgctaatgacactcacctcactgctgcttagggaacttgctgtatgcagcatctttgaaagggctcaaagcctgctcctaccaggtgcttgacagtgggttcccccatcttggggggagtcagactcacaaagccctttctcagaacaggccttggagttggtggcagggctgaggcccgtgggtggaccccgaggaacccatcagcaggaaattcagagtggacgggaacttcccaatctttcctctatccctcctaaggcccatcacccaccctctgagtctgctctcagaattcagcatcaatcacagagcttttggataatttttttatcttatcctagaggaaaaggtttggtaattggaacaacctccaattacctgccatagcaagtttctctcaaactcgtctacttgtgcacagacattgacattttggttatcagagtgtttgaattatttttgtttaaaatgtatttttattttcctagcctctgttgcccaggctggagagcagtggcgtgatcatggctcactgcagccttgaactcctgggttcaagggatcctcccacctcaggcttctaagtaactgagattacaggcacatgtcactgtgcctggccaattattttattttttgtagagacagggtctcacttgttgcccaggctcatcttgaactcctggcctcaagcaaacctcccaccttggcctcccacagtgctgggattacaggcataagctactacacccggcccaaattcttttcttatacgacactgtcttcccaagctgtgaaatgctacaagtgcatgcattattcatctccgaaaaccaaccactggcagaggcaacgccatgcaatgcactgcacgcaaccaaacggttacttcttgcatgctatgcattttgcatacattctctcaatcctggatgctcggggtattataatccccattttatagttgaggaaaccgaggctcagcccaaagtcataagttaataattgctgagccaggagctcactgattcattcattcagcaaatacggtctcactctgtcactcaggctggagtgcagtgggtgccttgacctcccaggctcaagtgatgctcctggctgagcctcccaagtagtcggacaagtgtaagacacaatgccctgttaattttttttttcatttttaatttttgagacagtctttttttttttttgagacggagtctcgctctgtctcccagtctgtagtgcagtggcgcgatctcggctcactgcaacctccgcttcctgggttttatgccattctcctgcctcagcctcccgagtagctgggactacaggcatgcaccacctacgcccggctaattttttttgtatttttagtagagatggggtttcaccgtgttagccggaatggtctcgaactcctgaccttgtgatccgcccacctcggcctcccaaagtgctggggttacaggcatgagccacctcgcccggcgagacagagtcttgttatgttggccaggctggtctcaaactcctggctcaagtgatcctcctgccttggcctcccaaagtgctgggattacagccataagccaccatgcctggccttgaggcaacctcttcctcccacagggaactgtgatcccataaaaatgtctgaggcttttcctaacaaaagccagcagatgccagaaagagttatttcaaattatagagggccactccttactttagtgtcccttcctcctggccagatttctggcattcctttgagattaccagactggtgccaggggacagtgggacaaagggcttgtcacctgggcaggccattggcatggccccacctccctgtgagccggtatttttagagaaagtccttggctcctttatccaaacggcctccccagattgaagcccttggcttctcagcctttcaaacatccagtggccggcctccgtcccaggggccttggtctctcctacctccctgcaggtcaacttccaggcctgtcgccacagcagccttacaaaagtcccctttcatttttatccttaaataagaccattttgcgtggagcaagttcagccaagtacacactctaaaagatttttgcggccgggcgcggtggctcactcctgtaatcccagcactttgggaggccgaggcgggcggatcacgaggtcaggagatcgagaccatcctggctaacacgatgaaaccccgtctctactaaaaatccaaaaaaaaaaaaaaaaaaaaaaaattagccaggcgtcgtggcgggcgtctgtagtcctagctactcgggaggctgaggcagcagaatggcgtgaacccgggaggcggaggttgcagtgagccgagatcgtgccactgcactccagcctgggcgactgagcaagactccgtctcaaaaaaaaaaccaaaaaacatttttgcttctggaagactgtgaactccccacatagaagcatttcctgtgtatcaggcactggatttcctaagcccctggcagcccaggaaacctcctgtttcagctcatgtcccataaaatgggatccataatttttatatgtatcagcacctcacttctaggaaggacgggagcagtgagggacatggggcagtgtgtggcaaacggtagcaggggcccttgcccctctaccccggcaaaggtgcgttagtcacggtcacaaggctgtttcctgcgggggatggggaggcaggggcagcgtccacaacgccagtagccccgtggcacgcacctttggcctgtgctctgggcagttgcggcggccccatggcggggatgatgcccctccctcgacggtccctgggcctccagccctgaacttctaggcccgagcatcctcagtaccacggacagggaaactgaggctgcgggaggcgtgcagagggctgggccccggtagccggcgtgcagccgggcccagcctggcccaccgtgtggcctcgagcccgtcacctcttccctccttcagacctcggtttcttagtaattcttcgggctccgcgttggacagggcgaggacgcgcctgtcgcagcgctgggaaatgttacaaaatcacacccactgagccccaggaggaggctgctcgcccaaggtcacgcggagagggcagtagcctccagacacgtttcctgcctgcccctgccaggcccggcctctgatgtcacggggcttccgaggggtccaaggaaactttcagctcccaaagccaaccccggggtcctccgaggctcaggagcctccctcgnnnnnnnnnnnnnnnnnnnnnnnnnnnnnnnnnnnnnnnnnnnnnnnnnnnnnnnnnnnnnnnnnnnnnnnnnnnnnnnnnnnnnnnnnnnnnnnnnnnnnnnnnnnnnnnnnnnnnnnnnnnnnnnnnnnnnnnnnnnnnnnnnnnnnnnnnnnnnnnnnnnnnnnnnnnnnnnnnnnnnnnnnnnnnnnnnnnnnnnnnnnnnnnnnnnnnnnnnnnnnnnnnnnnnnnnnnnnnnnnnnnnnnnnnnnnnnnnnnnnnnnnnnnnnnnnnnnnnnnnnnnnnnnnnnnnnnnnnnnnnnnnnnnnnnnnnnnnnnnnnnnnnnnnnnnnnnnnnnnnnnnnnnnnnnnnnnnnnnnnnnnnnnnnnnnnnnnnnnnnnnnnnnnnnnnnnnnnnnnnnnnnnnnnnnnnnnnnnnnnnnnnnnnnnnnnnnnnnnnnnnnnnnnnnnnnnnnnnnnnnnnnnnnnnnnnnnnnnnnnnnnnnnnnnnnnnnnnnnnnnnnnnnnnnnnnnnnnnnnnnnnnnnnnnnnnnnnnnnnnnnnnnnnnnnnnnnnnnnnnnnnnnnnnnnnnnnnnnnnnnnnnnnnnnnnnnnnnnnnnnnnnnnnnnnnnnnnnnnnnnnnnnnnnnnnnnnnnnnnnnnnnnnnnnnnnnnnnnnnnnnnnnnnnnnnnnnnnnnnnnnnnnnnnnnnnnnnnnnnnnnnnnnnnnnnnnnnnnnnnnnnnnnnnnnnnnnnnnnnnnnnnnnnnnnnnnnnnnnnnnnnnnnnnnnnnnnnnnnnnnnnnnnnnnnnnnnnncggagccccggacgcggcgcagggcctatctgtggtgcaaggagttcctgcccggcgcctggcggggcctccgcgaggacgagttccacatcagtgtcatcaggtcggtggcgccgggtctgggggccgcgggacagtcaggtgacgcggggcggggccggggcggggtccgggcagggggcgtgggccgggggggtcgggggccgggggagccggggccggggcggaggccggggaccggggaccgcagccggcgaaagccctccttctcccagccctgggtaatccaagggaagcgggttcgcggccgccgcaggccgtccacaaacaggcttttgtaaaaacgtcggtttcatgagaaaacgggtctgttctaggagaacaataccgttccatcacgaagtgcgtgtggtactgacgcttaagataggtctagaaagtctctgcggtttagggccttgaatgaaggtgttgtggctggctttaaaaacacaaaccactttttaacttttttctgttagtttttcgagttcgcgatttgatgtcttgttccctctccaagagtcattgttagtggaggagtagcattttctcatcccctaagagacatcactatagctgtgttactagacaaaggtgggaggcgtggctcctaaaataagagtaaggtagaaatgttttttcctttttttttttttttgagacggagtttcgctcttggtccccaggctggagtgcagtggcgcgacctcggctcactgcaaccacggcctcccgtgttcaagcgattctccttgcctcagcctcccgagtagctgggattacagacacacgccaccacgcccggctaattttgtatttttagtagagacaaggtttctccatgttcgttaggctgatcttgaactcccgacctcaggtgatccacccgcttcgacctcccaaaatgttgggattacaggcatgagccaccgcgctcggccattttttcctttttttaaacttgaaaatatttaatcttaaatttgaattacagaagtacgcgtgtaggtattcagacttaacagaagtctgaccttctttcaccactctgctccgaagacataaccattcaacgtagtgtgtgcatccttctattgagacctttaaagatgtgttcccgggccgggcgcagtggctcacgcctgtaatcccagcactttgggaggccaaggtgggcgggtcacgaggtcgggagatcgagaccagcctggccaacatggtgaaaccccatatctactaaaaatacaaaaattagctgggcatggtggcgcacacctgtagtcccagctacttgggaggctgaggcaggagaatcgcttgaacctgggaggcggcggttgcagtgagccgagatcacgccactgcactccagcctttgacagagagagactgtctcaaaaaaacaaaaacaaagaacgtgttccgtcattttctgccaattttcttttaattggctgacaggttgtgtgcagtatctagaaatttgctggctggctgccaccagtaatccccaagtccagttttggtcatttgattccttttctgtgcccactgtctttcaccagagccgctaatgcagcaaaattaactctttgagcttcacttcctctttgtgcttcagcccctctgactgcttatgagctaagagtgagagttaataggcagttggtaaggaagcagagaaaagaaaaccgaggctgtttagataatccctgaattgcttaatggcacttaaaaaaaattcagctctctccaaggtttactttaatctacttttagttaggcctgaaaattctcaactagaagggcgatcattttaggccatgtactcatcagtctgtgaaatggaaaacctaaaggagaagtgacttgcctgaggtcagtggctgtttactgccttcaaagcctgaactgccaggtctctggtgtccccttctcctgcaccagtgctctagcctgcggcctgtgaaaatgtttggacaccctagatccagccttaagatattttcatggctttctccagggagagtcactcagcagttaaacttttgcattttgctcaaaccagttattaggaaagcattgaggatgtcttgtttcttttctccaggagttagcagtcttggaaaacacagctttccttttggattggatgacctttttacataatgttgcaagagtacactctctcagtcctgtgttctgaaagagaacgtagttatggaataagtttaataaggagaaaaaaaggtgatttaggacatgggaaagtgggtgatgtctagcttttaaaaaagacacaagggcatttggaggtgcggagaaggagaggaattcgtctggttgaaattcagtgattctccataggcagttgcagttattatggctccagctatcaaattttactgacatttcccaatctgattctggtttttggtttttttttggagacagggtttcactctgtcgcgcaggctggagtgcagtggtgtgatcacagctcactgtagcctcgacttcccaggctctggtgatcctcccacctcagcctctcaagtagctgggactacaggcacgcaccaccattactggctaatttttgtatttttgtagagatggggtttcgccatgttgcccaggctggtcttgaactcctgagctcaagcagtccttccgcttcagcctcccaaagtgccaggattttagacctgagccaccatacctggccccgatccgtttctggagctccgtgtttcactgagtgccagtgcatctgcagtagttgatgagacttcaccacctcaactcagtgcattcctattccaaatttaaccctttggctcctccccacccaggaatgtgcttctgctttcgctctgcgtttgtagcagcagcctggccagagccccaggatcatttctaactctgcattcccccagaaatccctcctctgcacacagttgtaactcaaacctgatgagctacttttgtatccccaccttctgtctggtccctttgctgtccttgcttagacactagaacaggaggtgccttaggatcttcttgcattttgtgtgttccttctaatccattctgtatcttgttgctatggatttctcaaatattggaaaataaaatccaaacttgtttgcatggtctaaacttgagccttggcctacctttttattttttatttttaaatttattttttgagatggagtcttgctctgtcacccaggctggtgtgatctcggctagctgcaacttctgcctcctgggttcgagcgattcttgtgcctcagcctcccgagtagctgggactacagatgcaccaccacatccggctaatttttgtatttttggtagagatagggtttcaccatattgaccaggctggtctcgaactcctgacctcaggtgttccaccctccttggcctcccaaagtgctgggattacaggcgttagccactgcaccctgcccggcctaactttttagactggttctttttgttattactgttttaaaatcactccttctccagaaccacagcaactaacattgagctagttacactggagcctgcattttctgaatgagctttgtgttttcagtttccaggcctttctttgcccctaccctctgcttggcagcctttcccttggtgtgtttcctttaaaattcctctttcaaggcttaactcagagagaaccagacatactgaatttctttcccctctgtgtctcatccttagcactttgtacatgcaggccttgttatcacaacccttaacacgtttgtgtgtgtgtttattcattccattctcttgttagattgaattcctagagggcatttcacgttcatctttgtatctccagcactaggatagtgcctggcacaccggaactggataagtgtagaaattgtcatttttagcttaagttggcctctttgctgtgtgatgaacggagatccttgtctgagtctcttcaactatgagtggtatagggaaaaataaaaattgtcctaacatgagagttgttgttaatgagctgaccacttagaaaatttgttcatttccagacatcacaacttaatactaacttctgtccctgcctatcaaatcaatagtatgttattagcattttctttctttctttctttttttttttttaagacagtcttgctctgttgcccaggcgggagcacaatggcgcgatctcggctcactgcaacctctgcctcccaggttcaagcgattctcctgcctcggcctcccgagtagctgggattacagtcacatgccatgtccagctaaattttttttttttggtatctttagtagatacaaggtttcacatgttggccaggctggtcttgaactcctgacctcatgatccgcctgctttggcctcccatagtgctgggattacaggcatgagccaccacgcctggctacctggctaatttttgtattttttggtagccacggggttttaccatggtgcccaggctggtatagaactcctgggctcaggtgatccgcctgcctccgcccaaagagcagggattacaggcgtaaaccaccacacccagcttagagtttgttattttcattgctgattgataaggtcacagcagttgtgaaatgaagtttaaaatcttgtgaaggatacaagatttcatgaagttcaatgaatgaaatgttggagactaagtttcacacacatcttttgacattacgttccacagacccactaacagtgaaaagaaaaccattgaggaggatgctaccttgggccctgcaaaatagaatcatatcaaaagatggagagagtcccatgaaaagactggccaagtcctcagatactgtaaaattaatgcagtaaaactcacataggaagttaattgtgtcttatggtgccatcataatttttttggaaaaattgtgcccaaactccctacttttcattttaaacgtttgcttttcaaattaaacataaatatgtagttgtattataacctaaattatgttacatataagaacagaaacaattttcaatttcatttttcaagatacaattttatttacactttgtttttactggaaagttttgttccttgggtggctggcttgctggctttctttttctttcttcctttttaaactaatacactatattttttagagcaacttgtatttgtttgtttagaaatgggggatttcactgtgttacccaggctggtcttgaactcctgggctcaagtggtccctcctgcctcagccaccttagtagctgggattacaagtgtgtgccactgtgcccagttttagagcagttttaggttcacagcaaaattgagcagatagtacagagagttcccatataaccccctgcctgcacacaggcactgccttcccctttctcaacttcccccaccagaatgggacatttgttacaactgaggaacctacattgacatattatcactcagagtccataacacactacatcctattcttgctgttgtacattctgtggtttttggccaccgtataatgacatgtatccaccattgtattgatgctgctttacatgatgagcttacttcaacagggttatgccctgataaaccatcataaattgaaatgcatttaatacattgaatctactgaacagcatatcttagcctagcctacctttaatttgccagaacacttacacattagcttacagttgggcaaagtaatctaacagaaagtctgtttttataataaagtgttaaatatttcatgtaatttattgattactgaaaatgaaaaataaaatggttgtatgtttacttgaagtatggtttcttccgaatacatatcacctttgtaccattgtatagtcgaaaaatcataagttgaaccatcataagttggagaccatctgtagtgtcatacagaatagtttcactgccctagaaatcctctacttaatgtctgtttatccctctttccctcctaagcccagccaatcactggtctttttacagtctccataggttttccttttccagaatgtcatagaattggaatcacacagtatgtaagtcttttcagtttggcttttttcacttgataatatgcactgagtttccctgggtcttgtcttgtcttttcttcttcttttttttttttttcccgagacagagtctcgctctgtcgccgaggctggagtgcartggtgcgatcttggctcactgcaacctccgccttccgggttcaggcaattctccttcctcagcctcccaagtagctggaattacaggcatgtgccaccccgcctggctaattttttgtatttttagtagagacagggtttcaccatattgaccaggctggtctcgaactcctgaccttgtcatctgcctgccttggcctcccaaggtgttggaattacaggggtgagcccctgtgcccagcctccctgtgtcttttcatggcttgataactcacttctttttaatactcagtagtattctgtcatctggatataccacagtttatttatccattcatctactgaaggacatctgggttacttcacggttttggcaattatgaataaagttgctctaaacatttgtgtgtaggttttcaattcatttgggtaaatacttaggagcatgattgctggtcatatggtgagagttacgtttagttttgtaaggaactgccaaactgtcttccagagtagctgtaacattttgcattcctaccagcagtgaatgagatttcctgttattctatgtccttactagcatttggtggtgtcagcattctggtgtttggtcattctggtaggcgtataatggtctctcattttctttttctttccttttttttttgagacagagtttcactcttgttgcccaggctggagtgcaatggcgcgatctcggcttgctgcaacctccgcttcctgggttcaagcgattctcctgtctctgcctcctgagttcttgagattacaggcacctgccactacgcctrgctaatttttggtatttagagatggggtttcaccatgttggccaggctggtcttgaactcctaacctcaggtgatccacctgcctcggcctcccaaagtgctgggattacaggcatgagccatcgcgcctggctgttttttgtttttgttttgagacagagtcttgctcttttgcccaggctggagcgcagtggtgtgatcttggctcactgcaacctccgcctcccgggttcaagcagttctctgcctcagcctcctgagtagctgggattacaggcgcctgccaccatgcccggctaattttttgtatttttagtagaggtgggtttcactgtgttggacaggctggtctggaactcctgacccacgtgatctgcccacctcggcctcccaaagtgctgggattacaggcgtgaaccaccgcgcccagtcaggtatcttattttaatttgcaactttctaatgacatatgatgaaaatcttttcagatgcttatttgctatctgtatatcttctttgatgagatgtcagtttgtgtctttttctttttcctttttatttttttaagaaactgggtcttgctacattgctcaggcttgagtgtagtgggtattcacagatgtggtcctcctgcctcagtctcccaagtatctgggactataggggcatgccacagagcttcttgcccattttaaaattttaatttaattgttttttttttccctgccacagcttctttttttttttttttttttttttttttttgagacggagtcttgctctgttgcccaggctagagtgcagtggtgcgatcttggctcactgcaagctccgtctcccggtttcacgccattttcctgcctcagcctcccgagtagctgggactacaggcggctgccaccacgcccggctaattttttgtatttttagtagagatggggtttcactgtgttagccaggatggtcttgatctcctgacctcgtgatcctcctgcctcggcctcccgaagtkctgggattacaggcatgaaccaccgtgccaggcacctgccacaccttcttgagtgggaaagtgttttcctattcttgagttttaagagttctttatatatttttgttaacagtcctttatcaaatgtgtcttttgcaaatattttttccttgtttgtgacttttcattctcttgacagtatcttttgcaaagcagtttttaattttaatgaagtctggcctatcaattatttctttcatggatcatgcttttgatgctgtatctaaaagtaatctggctgggcgcagtggcttatgcctgtaattccagcacttggggaggacaagatgggtggatcacctgaggtcaggagtttgagaccagcctggccaacatggtgaaactctgtctcttctagaaatacaaaaaaattagtctggtgtagtcgtgggcacctgtaatgccagctactcaggaggctaaggcaggaagaatcgcttgaacccgggaggcggagttgcagtgagcctggattgcggcactgcactccagactgtgcgacaagagtgagactccgtctcaaaaaaagtaaataaataaataaaagcaatcaccatacctaaggtcatctagattttcttctatgttaccatcaagaaattatctagttttgcattttatatttagctttatgatccattttgatttaatttttgggaagtgtaacgtctgtctagatttttttttgcatgtggacgtcccgttgttccaggactttttttttttttttttttttttttgagacggagttttgctgttgttgcccaggctggaatgcaatggcgtgatctcggctcaccgcaacctccacctcccaggttcaagcgattctcctgcctcagcctcctgagtagctgggattacaggcatgcgtcaccacgcctggctaattttgtatttttagtagagacggggtttcttcatgttggtcaggctggtctcaaactcctgacctcaagtgatccacccgcctcagcctcccaaagtgctgggattacaggtgtgagctaccgckccgggcatgttccaggaccatttgttgaaacaacaaatggtttgttgtaaaagacatttgttacattgtattgcctttgctcctttgtgaaagatctgttgactatgtgagtgtatttctgtactctctagtctgttccattgatccatttgtcctttcttttgccaataccacactgttttaattaatgtagcttttttatttttattttttgagatagtgtcttggctggagtacaatggcatgatcttggctcactgcaacctctgtctcccgggttcaagtgattctcatgcctcagcctcctgagtagctgggattacaggtgtgtaccaccatacctggctcattttttttttttttcttgagatggagtttggcttttgttgcccaggctggagtgcaatggcacgatctcggctcactgcaacctctgcctcccaggttcaagcaattttcctgcctcaacttccccagtagctggggttacaggcgcccaccaccacgcccagctaatttttgtatttttagtagagacagggtttcaccatgttggccaggctggtctcgaactcctgacctcaggtaatctgcccagctcggcctcccaaagtgctgggattagaggcatgagccaccgcgcctggcctaattaatgtagcttcataatgattcttgaggttgagtattgtcggtcctctgactttattcttcattggctattctaggttttttgcctctcctgataaactttattattattatcattttttttttttttgagatggagtctcattctgttgcccaggctggagtgcagtggcgtgatcccagctcactgcaacctccgcctcctggattcaagcgattctcctgcctcagcctcccgagtagctgggattataggtgcatgccaccacgcccagctaattttgtatttttagtagagacagggtttcaccatgtttgccaggctggtctcggaactcctgaccataagtgatctgcccaccttggcctcccaaattgctgggattacaagcatgagccactgtgcctggcttccctgtaaattttagaatcagttcrttggtattcacaaaataacttgctggggttttcattgggattgcattaaatctacagatcaagttgggaagaaccgacatcttgataatattgagtcttcctacccatgactcaatacacattgagtgacataacaaaatacacattttgttagatttatatataagtatttcatttttgggggtgctcatataaatggtaatgtgcttttaatttcaaattccacttatttgtcactggtatgtaggaaactggttgacttttatgtattaaccttgtatcttgcagtcctgctatataatctcttattccagaaattttttttcacttctttctgattttctacatagataatcatatcatctacaaagttttatttctctcttcctaatctgtatacttttaatttccttttcttattagttaggacttcctatgatgttggaaaaaagtggtgagggggaacattgttaccttgttcctgttcttcgtagaaaagctgtgactttctcatcaagtataatgttagctgtaggttttttatagatgttctttatcaagttgaggaagttcctctctattcctcattttctgagagtttattatttaccatgagtgggtgttggattttgtcagatagtttttctccatctattgatatgatcatgtgatttttcttctttagcctgttgatgtgatagattatattaattgattttattttttattttttattttgagacagagtctcgctctgtcacccacactggagtgcagtggcgtgacctcggctcactgcaacctctactccctggattcaagcaattctcatgcctcagtcacccgagtagctgggattacaggtgtgcaccatcacattcagctaatttttgtattttcagtacagacagggtttcaccatgttggccaggctggtcttgaactcctgacctcaagtggtccacctgccttggcctccccaggtgctggactacaggcacgagccaccacatccagcctattgttgatttttgaatgtttaacctatagtcctatggtgaggtctcagtcttttggtgagcctgtgcacctagactgtgaactttacccatttttcttagttctcctccccgcttaggtgggacagaatggccagagggggctggaattgtgtatttgccctctctcaggaagtttaggctctgagaaaatcccaacaggttagacactggcaaaataatttctcctgagggcagaccttgttaagaacagaatgttctgtcgtatttaaaaatataagaggccgggctcggtggctcacgcctgtaatcccagcactttgggagcctgaggcgggaggatcacgaggtcaggagatcgagaccatcctggctaacacggtgaaactccgtctctactaaaaatacaaaaaattagcccagtgtggtggcgggcgcctgtagtcccagctactcgggaggctgaggcaggagaatggtgtgaacccgggaggtggagcttgcagtgagctgagatcgtgccactgcactcctgcctgggcgacagagcgagactccatctcaaaactaacaaacaaaaattgaaaagcaaaatttcttataatttcattaagagcaaatcaataccttaagcagaccttcttttaacataggggaccattccttagaaaggagaaataatctccttttaatcgcagctaacttaatcacaaacaaaattcctgtttttgtaaattcccctttacaaatcttttttttttttttttttttttggagacggagtctcgctctgtcgcccaggctggagtgcagtggcgggatactcggctcactgcaagctccgcctccccgggttcacgccannnnnnnnnnnnnnnnnnnnaaaaaaaaaaaaaaaaaaaaggaaaagaaaaaaggaaaggtttctttgcccctccctctgctggaagcatgaagggattttttccccccctcagttttcactgtaaggaactcgtagagctcctggaggtaaaactcgtcaaagaatggggctccccagtaattgggtctcctggagttttaaactctcacagttgtccacactgagcctccggcaatttgttagttatagttaaggttttcctaccctagtgctgatttggtggaggattttgctccagtaaactgtgattctctgtatctgccggtctgtctgtccaatttgggaggcagcagtttcccccttaacctcatttctttttttttgagacagagccttgcggtcacccaggctggagtgcagtggcatgatcttggctcactgcaagctccgcctcccaggttcacgccattctcttgcctcagcctcccaagtggctgggactacaggcgcccgccaccacgccaggctaattttttgtatttttagtagagacggagtttcaccgtgttagccaggatggtctcgatctcctgacctcgtgatcctcccgccttggcctcccaaagtgctgggattacaggcgtgagcctctgcgcccagccaccttatttctttaagagttgatttttcagttgatttagctttttacatgttgttaggatcaggtggcgacttctaagcttcttacacatactggactggaaaccagaaggttgagtggtatttcttttctttctttctttttgagacagggtcttgctcttgttgcccagtctggagtgcatttgtgggatcatagctcaactgcagcctggaattcctgggctcaagcgatcatcccacctcaccctcctcattagctgggactacaggtgtgtgccactgcacccagctaggagtagaatttagataataataataataaaagcacttcttctgttatctgtcatatattgctttcagtgatgcccacgttctccttcctgttttcccctccagtggagccccgtcagcctgtctagcgtccttccaggatctctccattctctgtcagtggcagggaatctcctcgttctgctgcgtggtggggcacaacccttatctttagttttccacaatgagatcgtaatttccgtgtctttcgtaatgtatttacacatcttaatgtgcctagtactctttttgtcgagtattgactgggagtcagcgtgggctagaagggatgcaagcactttatgagaaagtgggagggagtacttctgaccatgcctggtggaaggacctcctaggtgggaagggtaggcagaggcatgctgtgttccaaggactgtgctaaggacagtggcggcttgaaatttgtattttagaaacactttctaaggtggcctaggggatagcatagaggagagagggatcaagaagctgggagaccagagaggaggctgctgtagtgggggttgggggaggatatacatttgggcaggagcattgagaatggaaaggaggagagaatttgggagatagggagaggaccaggccattggaaacgaggaagattttgagcctgggtgagtgggaaaaaggcactactgttaactgaaataggcaaatcaggaggaagaaattattttgaatagaggaaggaaaagattataagttgggaatcaagttagagaacaaattggttttcaaattttggggaaggaaaaataggtaaaaactgcagaaagaatgataaaaaaagtagaggaatagtggggtgattttgtacccgcatctcgccatttggtaatgtttgaacatttttttttttgagacagagtctcactctgtcacccaggttggagtgcagtggctcaatcttgactcattgaaatcactgctgctcaggttcaagcgattctcctgcctaagcctcccaagtagctgggattacaggtgcctgccactgcgcccggctaatttttgtatttttagtagagacggggtttcaccatattggccaggctggtcttgaactcctgatctcgtgatccacccacctcggcctcccaaagtgctgggattacaggtatgatccaccatgcccggccgaacatgttttttattgttaccatgttggtggtagtacagctggcatctagtgaatagagggcagtgttgctgctaaacattcctgcagtacacagggcagctttgcccctcagcaaagaatgacctggccccagatacaaagcgtcaaggctgagccgtgctggagtagaattcttaagactgagctttatcctttcttccttctggcatcctcttaaacattaacctttgctttgcaattggtgctgataagtgaacagctcatatgatctcatgtaattttcgcagaaacttctgttagatactgctacattgttttatggtgtgaaaacagacttggaggcctgcccaaggtctgcacagctattttgtgcagagccagcmctccacctgggctggactggtctttttttttttttggaggcagggtttttgtgttgcccaggctggagtgcagtgacgtgatcacggctcactgcagccccaaccttccaggctcaagcagtcatcccacctcaacttcccaagtacctgggaccacaggctcaatgccaccatgcctggccaattaaaaaaaaaaattgtagagatcgagtcttgttatgttgcctaggctggtctccagctcttgggctgaagcaatcctttcaccttgacctcctgaagtgttgagattgattataggtgttagccactgtgcttggcctagcctgttcttttaatggtacctcctggcttttcttgttttcagagaggtgggggttaataccgtcctgattactccgtagaggtgctgatgttttactgcagcactgtttttttcacctgagccatagctgcaatttgaattttagatggttagaagaaatttttcaaaaatctgcttttttttcttattttccttgtgctctaaattcagtagctgttttgatattacgctgtattctcttttccatgtagccagccctatggcttaaagatcatttctctgttgagacactggttatgtcgtgatttttttttctttctagtcattttgacttttagatgatagtcatggaactgcctgctctattttctcctaggtccaggccctcagccttggggactaagccctgtatgtgctagactgggtaccctgtgacttgtagacagtttgcggagctttcagtggcttttttgcttttcagcaaaatatagttggttaggtaacttcttatcttaatttatcaggtggaaatctttgtgttacaggttggagcagacagttcctcaggtttgtcatctgcctaagcattcattcagcggattcacatacatgaatcccaaaatatccccgttgctaaaaatgacaggggaaaaaacccaaataattaaaaataggtagatgtttgacattagagatggcatatttctttctttttcttttcttttttttttttttttttttttttgagatggagtctcactctgctgcccaggctggagtacagtggcccgatttcggctcactgcaacctcctcctcccgtgtttaagcgattctcttgcctcagcctcctgagtagttgggactataggtgtctgccaccatgcccagctaatttttgtatttttagtagagatggggtttcaccgtgtttgccaggctggtcttgaattcctgacctcatgatccacccgcctcagcctcccaaagtgctgggattacaggcgtgagccaccatgtccggcctagagatgacatatttcaagaccttgggcagcctactaagttgttgtatcactgtagcatgtagcatgggtttttcttgttttatagtgctatagaatgtaacaggcattaaataatctctttttttttttgagatggagtttcactctgttgccgaggctggagtgcaatggtacgatctcaactcactgcagcctccatctcccgggttcaagcgattctcctgcctcagcctcctgagtagctgagattacagacatgtgccaccacgcctggctaattttgtatttttagtagagacagggtttcaccatgttgatcaggctggtcttgaactcctgacctcagatgatctgcccgtctttgcctcccaaagtgctgggattccaggcgtgagccactgtgcccggccagaattttataattttataacctgtgtatttgatgtaagtgctgaggcaatggagcattattcataatgtttataattgacatgtaataattgtacatattggtcgggtgcggtggctcacgcctgttatcccagcaatttgggaggccgaggcggttggatcacttgaggtcaggagttcgagaccagctgaccaacatggtgcaaccctatctgtactaaaaatacaaaaattattagctgggcatggtagtgggagcctgaatcctagctactcaggagactaatgcatgagaaccgcttaaacctgagaggcggaggttgcggtgagccgagattgcaccattgcactccagcctggatgatagagcaaaactcagtctcaaaaaataataataataataattgtcctatttatgaggtataaggtgaatttattccttccatctgactataatattgtaccagttggccaacctctccctgtctcccctcccctcgcctctggtaagcactattctcaacttctatgagatcaacttttttagattctacacaagtgagatcacattgttactgtctttctgtgcctgacttactttgcttaatataagtactgtcctccaggttcatccatattgtcacaaatgacagaatttcctgcttttataaggcttaataggattctactgtgtatatataccacattttctttattcatctgttgatggacacttacatttattctataatcaattgatggcttttgtgactagtgctgcaatatacatgagagtgtagatgtctgatgtactgatttcatttcctctggatgtattaccagtaatgggattgctggatttttaattttttattttatttaattaatttatttattttttatttttttgagactgagccttgctctgtctcccaggctggagtgcagtggtgtgatctcggctcactgcaacactgcctcccgggttcaagtgattctcgtgcttcctcctcacaaatagctgggattacagatgtacaccaccatgcgtggctaatttttttgtttttttaatagagacagagtttcaccatgttggccaggctgatctcgaattcccgacctcaggtgatctgcccgcctcagccttccaaagtgcggggattacacgcatgagccactgcaccaagcctggattttttttttttaaacttgctttgatgagcaggagctggatcttaatggtaattctatttttaattttctgaggaccctgcatactgtttttcatatctgtactaacttacattgccatcaacagtgtgtaagggttcccttttctccacatccttgtcaacgtttgttatcttttatcattgaaaatagacagtctaataatgactagtggtggtcagcattttttcatatacctgttggccatttattttattttttttaaatttactgagacagggtcttgctccgtcacccaggctggagtgcagtagcacaatcacagctcatttgcagcctcaacctcccaggctcaagtgatcctcccatctcaacctcccgagtagttgggactgcaggcacgtgctacctaccacatgtggctttctggccatttatttgtcatcttttgataaatgtctgttgggtcttttgccttgtttttgttattgagggatggaatcttgctctgtcatccaggctggagtacagtggtgcattcatagcttacttcagcctcaaactcttaggctcaaacaatcctcctatgtcagcctcccaagctgggaatataggcacacgccaccatttagggcaaatatatwtwtwtttttttaaacagggtcttgctctgtcacccaggctaaagtacagtgcagccttgacttcctgggctctagtgatcctcttgcctcagcctcttgagtagctggtgtccattttttaattggtttyctttcctttctttgctgtgagttccttgtatattttctatattatccccttaactgatgtatagtttgcaaatagattcttccattctgtaggttgtttcttcactcttgtttcctttgctgtgcagaagctttttagtctgctataatcctatttgtttatttttgtttgtgttgcctgtgcttttgaggtcttttaaaaaaaattcctggctcagaccaaggtcatgaagctttttccctatgttttcttatggcagtttcatagtttcaggtcttactttaagttttcgatccattttggagtttatttttgtatatggtgtgagataaggatctaatttcattcttgtgcgtgcgatatccagttttcccaacactgtttattgaagagactgtctttttccctattgtgttcttgacacttgttgaaaatcaggtagctgtaagtgtggattaatttgtgggcttttattctgttatattggtctctgtctgtttttatgccaacaccatgctgttttggttactatgactttgtagtatatgttgaagttaggtagtgtgattcctctagctttgttctttttgctccagattgctttggctactggggtcttttgtgatttcatataaattttaggattggttttcctatttctatgaagaatgtcaytggtattttgatagggattgcattgaatgtatagattgctttgggtagtatggacttttttttttctttttttttttttgagacagagtcttgctctgtcacccaggctggagtgcagtggcgtgatcttggctcactgccacctccgcctcctgagttcaagagattctcctgcctcagcctcccgagtagctgggattacaggcgcccaccaccatgcccagctaatttttgtatttttagtagaggcaggattttatcatgttggcgaggctggtcttgaactcctggcctcaggtgatcagcccacctcagcctcccaaagtgttgggattacaggcgtcagccacgcgcttggccagtatggacattttaacaatattaattcttctaatacatgaacatgggatattgttccatttatttgtgtcttcagtttctctgatcaatattttaaagttttcattgcagagctctttcacctccttggttaaatttctttctttttcttttctttttttttttgttagctattgtaaacaggattgttttcttgatttccattccagataatttgctattagctggcatgcagtggcgtgatcacagctcactccagccttgacctcctgggctcaagtgatcttcccacctgagcctcccgtttagaaataatactgctactgatttttgtatgttgattttgtatcctgcaatcttactgaacttattagttctcatagttttttggtggggtctttagggttttctatatgtaagatcatgttgtctgcaaacagggataatttaacttcatttccaatttggatgccttttatttctttctcttgccttgtttttctggctatcaagagaagctgaaatgattcatttcatttttgctcaacaatttatgtaaaataacctctttggaccagcgtggtggctcacgcctgtaatcccagcactttggggggctgagacaggtagatcatgaggtcaggagatcgagaccatcctggctaacacggtgaaaccccgtctctactaaaaatacaaaaaaattagcccggtgtggtggtgggcgcctgtagtcccagctacttgggaggctgaggcaggagaatggtgtgaacctgggaggtggagcttgcagtgagccgagatcgcgctgttgcactccagcctgggtgacagagtgagactccgtctcaaaaaaaaaaaaaaaaaaaaaaaaaaaagaacctctttatactgcttgttattcccttagtattctgttttaaggaatcatgggttgacagttagtgatgcgtgcaccactgggtctggagggcaggggtgagaattcctgccagcaggtacttcctgcttttttctgtttccttcctgtcattgtgttgagtgtggaataagtgtgttattgtcactgtatttgagattttgcttgagtatcttgtgcctctcatatatatgtgtgtgtgtgtgcatatatatatttaaatttatttatttatttattggagatgatgtttcgctcttgtatttatttatttatttatttatttatttatttatttattggagatgatgtttcgttcttgtcccccaggctggagtgcaatggcacaatctcggctcactgcaatctctgcctctcgggttcaagtagttctcctgcctcagcctcctgagtagctgggattacaggcacgtgccaccatgcccggctaatttttgtatttttagtagagacagggtttcaccatgttggccaggctggtcttgaactcctgacctcaagtgatctgcccgcctcagcctcccaaagtgctaggattacaggcgtgagccgccacatccagcccatgcctctcatatctaattatgacttataaagctattatgccaggtgataaagtttgtggtttcaaaacttcttgcaaatccttgagagctcctggggttttacttgggaggatatttttgacaaattatatgataaattgaactgttacatttttgctaccatttctggcatttcttcctaccacattttattgttcctggtcatattattatttgactcattgktagttggctttttttctaggtaaatttctcacagtttgggttattggtgccagtcaccttgcttcatttattttgactgtcactaaaaaataattgacaatttattcactaaaacctattgaacaatagaggctacaggtaataaaaagcagttgaagggtttccaggttgtgagcttgtttctggccaagctagtctgccttccttctttagcagtacgggggtaaactttgaatcaggttacacaatttagaacagtacttcatctgtttgcctttgcatttgactgagatttccagagtatgtgaccggaagaaaaactagggcttttaactctgttttaatgcccgttctgttgcttggtagccagaaacccatgttggctgtgaccagacgcggcagggggattctgataagccacacagttgaggcgccacgccaagtttaacagaaaggttaaggctgcttttggttcctttgatctacacgctgtcggcctgcttcacagcttgctttgggaaaacaagaactttgggttcccttttatttttgttctttttaactaaggtagacaaccttctgggaaaatagatcctgactcttgctgtcttgttcctagagactcatgatggtttttcattttaagtaacctttgaaaaaacctcttaaatatgtcttacttaaatctgggaaaaaattgtttgtgctagaagcacattcaaattttttatttggtaagaaaatgagatatagttcacaaaccatacaattcacccatttaaattgtacagtccagtggcttttagtgtaatcacagatacttgcagctgttaccacagtcagttttagaacattttcatctttcaaaaagaaacttttagctatcatcccctacccctaagtaccccttcccaccccagctcctggcaaccactaatggactttatagatttccttgttctggacagttcatatgaatggaatcatataacatgtggtcttttgtgactgtcttctttcacttagcataatgtttttaagtttcatgttgtagtatatatcagtacttcatacttttttattaaaactgtggtaaaataaggtcaggcatggtgtgcctgtaattctagcactttgggaggccgagatgggtggatcacctgaggtcaggagttccagagcagcctggccaacatggcaaaactccgtttctaccaaaaatacaaaaattagctaagcatgctggcatacacctgtaatcccagctacttggggggctgaggcaggagaatcgcttgaacctgggtggtggaggttgcagtgagccgagattgtgccactgtactctagcctggatgacagagcaaaaccctctctgaaaaaaataaataaataaataaaatcaagtaaaattgtggtaaaataagcagcattaaaaatacaattttaacaatttaaaaatatatagtttagtggcattaagtacattcattgttgtgctgccatcaccaccatccgtctccagaatgttgtcgtcttcccaaactgaaactctgtacccattaaacttaaaccaactccccatttccacctagttacccttatttttaaaaattaatgagctcgatcagaatctgttttcagttttaagccactaaatttgtagtaatttgttatagcagtaataggacatggagatgtttgtgtcatagaggtttatagagagtagtcctgatggaaggtgattttgcagctcacgcagctcctatgacatttttcttttatcttttctttttcttttttttttttttttttttgagataggagtctcactctgtcgcccaggctggagtacagtggcgcgataacggctcactgcaacctctgcctcctgggttcaagcgattcttctgcctcagcctctcaagtagctggtattacaaggtgtgtgccaccacacccggctaatttatatttttagtagagacaggctttcaccatgttggccaggctggtgtcaaactcttgacctcaggtgatccacctgccttggcctcccaaagtgctgggattacaggcatgagccactgcgcccgacctcctgtaatgtctttaatgtggcacatggtgctctccagctttgcctcctatctctttgacaactcttcatggttagttacaagcagggactcgagccatatgcctgggtttgattccttgcttagctacttacttggtgtgtgattagagtattgaggtctcctgtttcatctgaaggccgtggtaaccagttaatgttgggagttttttgaacaagctcctagtcaaaatcagttgacagatttttagtaacactagcgtagaagatcttggaactattaatacatatcaaatggaaagccctagagaagaaggtttaaatattgcctcaagatttttttttttttttttttttgagacggagtcttgctctgtcgcccaggctggagtgcagtggtgccatctcggctcactgcaagcttcgcctcccgggttcatgccattctcctgcctcagcctcctgagttgctgggactacaggcacctgccaccacgcctggctaattttttgtatttttttagtagagacggggtttcaccgtgttagccaggatggtctagattccttgaccttgtgatccacccgcctcggcctcccaaagtgctgggattacaggcgtgagccaccgtgcccggcccacacgggcaatttcaaaaacgcttccccacctctactgcagaaaaacagaaagggaatttgtctgtttttaatgtgactcatggagttaaattgagagaataaatcgagataagatgagaacagttcttgtgtaaccctgacttttcatccatatttatccaagaagagtgatttagctcacctgcaataaagatacttactgtcctcttatttctgacagaggcggccttagcaacatgctgttccagtgctccctacctgacaccacagccacccttggtgatgagcctcggaaagtgctcctgcggctgtatggagcgattttgcagatggtgagttggtaggctactttgggagggggggatcctgttaacattttaaatcctctttgctgagataccttggaaagagattttaaatactttaatggtgttactaaagatatttgagtatattgcttttacttttactttaattgggctgcacagcttggtttgcattctaagttaattcgtgttttttttagttattatttattagtaaactagtgcaagtattcccagttttacatccagagaaggtacaatgttggttaaatcttcaatagtgcttgatgattcttggttctacatattgattaaaattttcagctcagatttagattataaagttctaatgtggagaaggtattgtttttataacattatccaaaagattttagaggatagtcccagttaacaaagtatgatctcaacgaagctgaatttaataactgtttctctgagatttctttaaaactttgagttgtttgttacagtcataatctttctaaagttttatattagataatctaattcttaaagtacctattgaattatccagttataggatatcccaacttgtctgggtttattattattattattaatgtcatgaatttactatttcattgagcacggtagaaatattaggttgatatatatatttttgagatggagtttcactcttgttgcccaggctggagtgcaatggcgtgatctcagctcactgcaacctctgcctcccgggttcaagtgattctcctgcctaagcctcccaagtagctgacgttatgcatgccaccacgcctggctaattttgtacttttttagtagagacggggtttcaccatgttggtcaggctggtctcaaactcctgacctcaagtgatccacccgccgtggtcccccaaagtgctgggattacaggcatgagccaccgcacccggccaggttgaggtatttctgtggtagaatttttttttttttccctgagatggagtctggctgtgtagctcaggctggaatgcagtggcacgatctcggctcactgcagcctctgcctcccgggttcaagccattctcctgcctcagctttctgagtagctgggattatgggtgtgccactacacccgcctaatttttgtatttttagtagagacagggtttcaccatgttggccaggctggtctcaaacttgtgacctcaggtgatctgcccgcctcaccctctcgcggtgctgggattacaggtgtgagccaccacgcctggcctgtggtaggattttgatacctgttgttttattttttttttttttttttttatgcgacggagtcttgctctgtcacccaggctggtgtgcagtggtgcaatctcggcttactgcaaactctgcctcccgggttcacgccattctcctgcctcagcctcctgagtagctgggactacaggtgcctgccaccacgcctggctcactttttgtatttttagtagagacggggtttcaccgtgttagccaggatggtctcgatctcctgacctcgtgatccgtccacctcggcctccaaagtgctgggattataggtgtgagccaccgtgcctggctttttttttttttttttttttttttgagatggagtcttgctctgttgcccaggctggagtgcagtggtgcaatctcagctcactgcaagctgcgcctcctgggttcacgccattctcctgcctcagcctttcaagtagctgggactacaggtgtccgccaccacgcctggctaatttttgtatttttagtagagatgaggtttcaccatgttagccaggatggtttcgatctcctgaccttgtgacctgcccgccttggcctcacaaagtactgggattacaggcatgagccaccgcgcctggccctgatatccattttaatcttctttggaagggcccatttttatcttaatgaaatagagcagagtagttttcaaactaaattttttaaaagaccggcctatttcagctcaatctaaaaagtagatcatatccatatgatatttgattatatgtttagaaatattaaagttcaaattggcagtctagatgttaattcattaaaaaaattgtcataatgtgaagaaaccctttaattggatagcttttccttgactctgtcaagctgtggaaatggttaagatctaaaaatgctgggaacaagttagtatgtttgaaggtacgtagctattccacacacgtgtgcacttgctgaggatatctgaggtcactttgtcattaggtgcagatagctggcatccagctaggacaacagttgatgccagctgaaaacacagaccccttgctgttaatacacaagcagaaaagattcttgtgttcaccatgcagcttgggttttaaatttaatcargttgcagtttcaaagtatagtttttgaaatctttcatcattattttggcacttttactggtgtgcctttattttttgagacaggatctcactttgccacccaggctgtagtgtagtggcacaaccatggctcactgcagcctcgacctcctgggctcaggtgatcctcccacctcagcctcctgagtagctgggactacaggagtgagccaccacgcccagctaattttgtattttttgtagargcagggtttcaccatgtttcccaggatggtctcaaactcctggccttaagtgatgcacccgtctagtcctctcaaaatgctaggattacaggcatgarccactgcacttggcctgctatgtcttgatagtcattttttctttgaggactgtttacgttctgcaacgattaagtcccatttctgctgttttttgtgttttgcatttatacaacacttttacaataataagtagatgctgaaattacatgtgatttaaaactattgtttaaatctgatttatgaggctttcatttctaacttaagaagcattttaaatgtgttacaaggtgctcctctgtgggctagactaacctgggagtttaatcctgtgctctagaacagtgctatagtgatgggagtaatggagggttctgcatctgtgctgtctgatacactcgtcatcagccacatgtcactaacgaatatgtggaatgtggcaagtgtggctgttgaactgagttttaaattgtttttaattttaattaatttaaattaaaatagtcacatgtagctcgtggccactgtattggacagcccaactctagaatgttctggtttattatatgagtcacttagtaaaagccagctgcagcatagcctactacttggcaattagccttcctctaataaagattcattgtcaattgttagtctttcttccattttgaaattttagcagtctggaagtagtacctgacagtagttaaatacagtagaaatgtctggaaataaaatttgtttgaacagaattmtatgtcccgatttatttctaagaaaaaagactattaagtaactaagaaaaataaaaagaataatttaagccacttaaaatgtaattagctcttaccaaactaatagaatggagtatgttttacatataattccaatttggggggaggaggtaccctacatttagcttctcagttatatttttattaggcaaatgttaaatgagtttccattcctgaagctatatctactgatgtaaggtagaaaccatacttgaaagcaccttggatagaaagggaaattagggctggtcatggtggctcactcctgtaattccaacactttgggaggccaaggcaggtggattgcttgagtccaggagtttgaaaccagcctgggcaacatggccaaaccctatctctataaaaaaatagctgggcgtggtggcatgtgcctgtggtcccagcaactttggaggctgaggtgrgaagatctcttaagcccaggaggtggagattgcagtgagccaagatcatgccactgcactgcagcctgggggacagagagagaccccgtctcaaaaaaaaaaaaaaaaamcccaaaaaaactggatgggaaattagtagttttctatacggataataagcatacctctaacaatctgacagttgacatagacaacaaactgatttttgttagaaaaaaactatttctttgcttcttaggtgggaatctatattttcaatataattattcagttggtcgagtccttagttcaaacacacttttttggttgtagtttaaacttaggaaaccatgaagcctagagtctcagagttaagtatatttggtttcctagctctgcagagtttagcagtcatacttgttgccagttaagagtttcagatattaatggccattggagactgttggtcattgggagtactgtgacaacatgaggaggggaaccaaaatcaagaactccaaaagatggctatggtacaaaagaagcaaagtagagaacaggcttagaagcttctaagatgcgagccaggcaacagctgctgtgtgctttagaagctgagctgccacacactgtgccgaggattttaaattcctttccaaatattttcaaatcagctttaaagtttctattatttatttttgctgtgatctagctgtgatgaaattgctaatgtatagccagctctttagaatgaatctggcctataatggaaggagatatttatggtctacaatgagggttttgttcctatcacaacaaaaaaagccagaatttatgataaattgtcaggattgataaaaaattgtcaagatttgcattaattgagagatgtggctgagcaaatacagagcccccaataataaatcacatcatggttaaagagagaattaaatatagtatgactcaagtcttctgctttccttctttttgctctaccttatgggaaagcatacacatatcctatacatgtatgtgtacttatacaatataactggtatctcccaagccaactttataaatgcagctataatgtcctttaagatgggttagaattcactccttctttgaaaaatgttaattgaagtctactgcacaaataataggtctatgtattttttcagagtattttgcatttttccttaattatatgacagatttagtttagtatgtcccttctttccatttctcttccttgtttttagcttttgaacattttacctctgtgagaatcagaggtggtaacattttacacgttctttgatcagcaaatgatttacaggtgacttggtttaaaataactagatgattctcaactttctcatttttcttcatcttggcattataagatgtctgatttcctttatttccatagtgacactgaaatgactgctctttggtacagttctctaagggttaagtgccagaaagccaaggtaaaactttctgattgggttcagctccacagcttctgtcccacaaacatctgtctcttctagcccctatttctatctaagatgagacggaaacaaacttcctgactgtatcctggagtttttgttyagkatttgtgttagttttagggtgcttatgaaaattcctgtgtttggcaaggtcaagaatgggtccttttgaaaatatgaacaagataagacacacacaactatacaatattatttgtaggaaattattaaacataaaaatattggtctgatcttaatgcatgtgagtataatttagcgtctgttttacatagactgtctttaattttaatggaaatgagattattttcattagctacatagattatgaaaaccaaactcaactgtaaaactaccctgaactaaaggaggataatttaatagaagttttgagaagtaatagttcagcctttgcattgtggaaagagatagaattgctagaagagagcgtaaatgtataaaattagctataaatgtaacttgatttttttcctttctgatactgggaaggaacatgagctctgcaacgtccagtagcagccttttcagagaagcaagtttggctgattacaaataaccagtttgcttatttatcatgaattgtggaagacacaaatgtcagtacgtattgttcattcaatgtaacctgtgccagttggcggaagtctcagaggattgctttgtcccttcctctgtcagaacagtgactctgtgttaagccacttccttctgtgcatgagtggagagatttggcctcaccgttatgagcggtctcacaggcatgaacgtttataatacacatcaaagatctctcttgaatgttgtctggaaaattgtttttgtttgttttttgagtaatagaaggctaatattagtgcttgtttgagtactaaccataataaaggcatcaaggcacaacgcagatatgtattagcaacttaaaagagtcaaatttgagacactgtcctttttaaatctagaaaacaaatgtcttcctccctattttctcttagccccagtttaattaaaaattaagccacaataaaatatggaataactcataaatagttaatattaaactaccagctactgagaaatcagctgctaaaacctatttctttatgttactaaggtcacaccatgcaaagaccagcattgctggtactccttraaggagtcatgtccctggtaactgaattctatgaattgccactgttttcctcattgtgttaggatcattaggaatttaagttgttctgttcactctgctttaaaaaaattcccttatacttttgagtatggtttaattctgtgttcctaaggcagtcaaaacttccttctcagaagtaaaacatttttctagtgttgtgcgttcccatttggtctaacctaatatttctttagctgatactctcccaagatagttgccaaattactaccaatagtccttccatacctgctttggtgccttcttttgataaccaaataaaccacagactactatgtctaatttttacatattcagagtgtctttgtcttgctggtattaaatgtttgggatttatagcatgaagccaatgcggatttctggtccatggaacgatggtttgaccgcagcccacccctctttgggaaggaatgtctttatgttgggtggagtgaagggcgttgggggtaatgtaccactttagctgtatgtgcatgtgttctctgctgcaggcttgtccatgcgatcgtgcctggagcactctggtttccaggtgacagacacgattcacggtatagtatgagacctctgaagttggagcattctctacagctttaatttctttcttttagttcttggattcaagaattgcttttaaaaaagaaagttgtaatgcttgttaagtagcaccagctacagtttgtgctgtgcttaaagaggtacagtgattaagatttcagaatgttgtgtaataaatatatcacttattttttttgtccaaagcaaatcagattcctttcttctgtttcctcagtagaaaatgacaaacatttaggaattttagaaatttatgggcctcaacttgataacttaattgaagtaatcaagttcttccttcatatcacttccagcattaaggagacaccatatatattttgatattttggtcagaattagaaacaaaccttcttctttgtccttaccagtcagtatactttcatatgtcttagctgggtacctgagaccttagggagctctgcagtgctgacttgatgtagtgaaggcacacttcccgtaaaagtgttgcttgcaagtcaacctttgggatacttagagggagggtattttatttagtcttggaagtctgaggagtgttgggtcagcaggttgccctagatcagacatagattttgagaaggtcctgaaataggcctttttaaaacctgggcttccactcacctgtctttctgctggcttgtgttgcctaaagtgttttagaagttctagtttcctacggatattcatcaagtcatccaattttgaaattattaatgtccaaaaagatcaagktgttttaggctggtccttgggataattgaagacactctagagactaccataaaatgttagaaatcacttatctgtttaaattcttgtaattcatatgtgcttattaaataatcacataagctatactttaaatcattgcattgagatctcacattttaatgtgttctgtaaaatgttttcagaaagtgctaaaagtggccgggcatagtggctcacacctgtaatcccagcactttgggaggctgaggcgagttggatcactgaggtcaggagttcgagaaagaatgctgtaagaaaccataaaagcaagaaatacgggatgatttcatttttttcatagaaatcaggaagaagtaaggttagggtccatgataactctgagaagaaaacatattgccaagaaaatatactgcaaaatgttaattgaaagagtcacataactctttcaattctatagaattgaacacattctatagagtcatggttctcatgctttttcctgccccacctctcctgagatggaacatagcttcatcatcaacagggacttggcaggccagggattataacagatgccacccctgtattaaaaattatttctctcctagagggttgagtgtggtgagataaccagggtgggtattaagggtctccgaagccacaggctacacagtaaagaagttcatgccactccaagaccaaatgggcatcacagctactgaattgaatccgaatgatgcaccatatcctcctattctcagggtgaatacgatgacctgggagttgtttcagtactcagctcaggaagataataccagattagtagaaagatggattattttccgagaccaaaatttacatatcctagaaactgaggaaactgagtctagctaacagtaggaatttttttttttttttttttttttttttttgagacagcctcccactgtcgcccaagctagagtgcaatggcgtgatcttagctcgcggcaacctctgcctctcaggttcaagcgattcttatgcctcagtcccctgagtagctgggattacaggcatgtgccactatacctgactaatttttgtattttaagtagagacagggtttcaccatgttggtcaggctggtctcaaattcccaacctcaggtgatccacccacctcggcctcccaacgtgctgggattacaggcgtgagccactgcacccagacaggattattcttacttatttatttataggtctcaaagcatttttaaaaggtcacaatcaatctaccgttttatgtaaagcctttaaaagagacagtaagctgaatgatccatttagttattttttggtgaggaaggggtggtaggaagaagagaatgtcatccatgtttcttaattttctttttttgtgtgtatttttctttttttctattaaaaaatggatggcacaattttttttctataaaaaacctgtactcttatttatatatcattttagttcagcagccaccattatatttaacatagtacctatttctattctatattatgatttttttgtgtgtgtgtgtgagatgaagtctcactctattgcccaggctggagtgcagtggtgtgatcttggctcactacaatctctgcctcccaggttcaagcgattctcccgcckcagccttccaagtagctgagattacaggcacttgccaccagacccggctaatttttttgtatttttagtagagattgggtttcaccatgttggccaggatggttttgaactcctgacctcaaatgatccgcccccctcaacctcccaaagtgctaaggttaccaatgtgagccaccatgcctggctcwttatattatccataattgataatgatttsgtttcttaaatagcatttccaatttattttgctattgatgacatgctattctttgtagctgattcatcactttttaaaatctgtctcacagcagctcatgtagtattggacgtttaaagatactttgaagataaatgttttgggtgttaaagatgttttaaatgacatttttttttttgagacggagtctcgctctgtcgcccaggctggagtgaagtggcacgatctctgctcactgcaagctccgcctcccgggttcacgccattctcctgcctcagcctcccgagtagctgggacaacaggcgcccgccaccgcgccaggcaattttttgtatttttagtagagacggtgtttcactgtgtcagccaggatggtctcaatcccctgacctcgtgatccgcccatcttggcctcccaaagtgttgggattacaggcgtgagccaccacgcccagccaaatgacatttaaatgataactatatgtgacttaatgacactttctttatgccgctttcacccattcttactatacacagactctagggaaaactgaggtgctgctttgttttcatctcccaaatggggctttattcrtttagtcataaacctacttccctcagtattagagaagtctttcattaagtactggccaaataagtttattctgtctgatggcttaaataggttaaaagaaatatacctgctatattgtggaacattaggtaacttaaagtaggtttttgaatcctaaaatcatataacacaaaatacaataaagggacatctcttcctccttggtcctggagttgtcttaccacttattgattttttttattgtatttttattttatgagacagagtctcgctgtcgccaggctggggtgcagtggcgcgatcttggctcactgcaacctcggcctcctgggttcaagtgattctcctgcctcagcttcccragtagctgagacttacaggcgcacatcaccacacccagctaatttttgtatttttagtagagaaggggtttcaccatgttggcaaggatggtgtcgatctcttgacctcgtgatccgcctgcctcggcctcccaaagtgttgggattacaggcgtgagccaccgtgcctggcccattttatttttaaagcatgaagtagaacattttgaaaacctgtgctctgtaatatgaatatttactgcttttcatagtctcatttaaaatacaaagcctaaatagccgggcgtggtggcacacacctgtaatcccaactattccggaggctgaggtgggagaatcgcttgaacccaggaggtggaggttgcagtgagctgagattgcaccactgcactctagcctgggtgacagagtgagacgctgtctcaaaaacaaaaaacaaaacaaacaaaaaaaccccaaagccttaaattgcaattttgttagaaaagtaacatttgaaaccttgtatcaaatgtatttattataaaaataatacacgcttttaagcactttttaaagtatagaaataaagtaaaaatgaaagtcctctattttctcattttactccatagctaatataattcagactttcaggaatttagtttttaaatttaaaagttcttggccaatcaaaaaatctttttcaggctggtcatggtggctcatgcctgtaatctcagccctttgggagactgtggcaggaggatcacttgagctcaggaattcaagagcagcctgggtaacatagtgagatcttgtctctacaagaaaaaaaaaaaggctaggtatggtggcacatgcctgtggtcctgctacttgggaggctaatacaggaggattgctcgacctggggaggttgaggctgcagtgagccctattcctgccactgcactccaacctgagagacagagcgagacccagtctccaaattttttttttaaagtttcacctcttaaaagctaactttaaaatagtaagtatgcctcctttattaatgctgtcactgtagcctcatttgtttcctacatcacaggctaatgaatatatgactctaacttaagattctcttgaaaactaagcccaaaataggaaggaaagaaagaaggtgggaggaagccagtggcaatatatttttcattattgtgtgccttttaagtgtagaattcagtggttttcagtgtatttatggagttgggtgtcttaggcataattgagacattctgatttcttaggtcttgaaatttcaatgtttattttttaaaagtttttattatggggaatttcagatataccctaaagtagaagagtataatgaaccccagtgtccattcctcatcttcccctcacagccagtcttcttccatcttttccctcatttactccaccagggttattttgaagcaaattccagatgttatattattctgtaaatatttcagtctgtatctatataagatgattttttaaaaatgaccacagtaatgttcacattaaaaaaatttaataattacttaatattaaataaccagtgttcaaatttctaataaatgtaaaaagcttagttttgttttataacttatagaggataatttttattaacttgttagagaaaagttggatgtcatactaaatatttatacaatgtattttaatatctacttcaaatgaatttatgtcactgaagtaaaatcccacggattcctatatatatatacacacatatatatacgtatatatatgtgtatatatatatacacatatatacgtatatgtgtgtatatatatacacatatacgtatatctgtgtatatatatatacacatatatatacgtatatgtgtatatatatacacatatatatacacatatacgtatatatatgtgtatatatacgtatatatgtatttttttttttttttgagtcagagttttgctcttgtcacccaggctggagtgcagtggcgtgatcttggctcactacaacctcttcttcccggattcaagcgattctcctgcctcagcctcctgagtagctgggattacaggcatgcgccactatgcccggctaatttttttgtatttttagtagagttggagtttcaccatgttggccaggctgatctcaagctcctgacctgagatgatccacctgcctcagcctcccaaagtgctgggattacaggcatgggccacccccsccggccccaaaatatatttaacttcctgtcttcctggacgaaaaagttattctcttacctttccatgaatatacacttggtttgagatttcctcgtcttacacttcttatttacaggacttagggagcctgaacattctgtactgaggaaacagaacagagggctggatattgcagaagtccatcttgccttcataatggtgctcttatggtataagtgatgaattcatctgggggtggagtgagggagtgggcaggggagattatcatggatttactaccacttatagtgccaatatgtttaaaaaaaggaaagactttggggcctcagccaatttttaactttggatgaagtaacttgcttttgcgagcgccattagataagggaaagggacttctgaaggctaaataacccattaactgtatctccctaagaagatacagttagagtaacaacagcataggaataaccatagtcatttagaattgtgtacaggtcaaatcccgttacaacaatttcagaagagtatctaacttatttgtcttaaagcttatactgcaaagtattaatatgtaatatatcagattatagaacttttttgttcttaagtttctttggagaaaaaaacacaaggacttttgaaggggcatttctaattaaccccacagccagcttccttgttaccaagaccctggatgggaatttgctatcactggttggctgcgtggcaccaggcagctcgttgggctcacttgcctcgtgctataccactccggagtgttcatttattcatgcagcctaaaaagtgtagtgggcatcgagatttgcttggtgctctgggagaagactaacatcaataaaagacgcagtccctattcattaggaatttacagactgcttggaagaggcgacccgcaaagcagagtctaaggaacgatgcggccacgagagtgtttggaattagggtgaagggaagctttccagcgcctaccacatcgcacatcaaaccatctgcaaagatctgaaagcatttttgtagtattttgatttttatagctttcattgtaacgggatttaacctgtaacatcttttcatcagagaactgcagattacacaaatgaaaatatcataaatccccatttgtactttctgtactttgtaccaaatgtacttaactgtatgctaaatatagtattgaatatgtatcagtgcaaacgttaagagccttttgcaaatagatttatgaacatggatacttattttgtttacttttatattacatgtactgtttatacaaaacatgcattaaaacgtctgtaatgttatttcagtgtgtgatggatgagtggttgctttaaatcactaggtttttgattggtgctagagtagctggtgttgcttaacgtggcattttttttcctgtccacactttccacccttggtacaggtatttttgataaagctgtggaatggaaaggtatgtttttcatggggtgttcaagaatctgttaccttaaatttttttaaagaggtttcctttmtgggattccttttgtgtctggcttaagcagacttagtttaatttaacaagtaacatttttagaggcagtatttgagtataaaagtttgacgtgacacaagtttctgactttacttttccccattcccttattaaagatagtacgaaggattttaaagcatttggggtggggggttgctcttaaaatatatgatctgtaccatgagaaagaatgtagcccaagggttgtttatggtagttaatgatctagtgtgttgttattgctagaatcctggttatcataaatttgcaatttcattgaggaaagtgatataagtatttcttaatatattaatatatgaaataattttagagactttattaaatacacacagtcctctttatggtagaggaacagttcagcttgagctggtgaccggctgaactagaggggttactctgggaaagtggcgagtcggcagggcatgtctgcacagattttgtgccaggtttcctgcctgcacagcgctttcttctctgtccaagttctgtgctgaccacagctgtccacaggcatgtttacactccctgttcttgcaggttgacttgagagaaccacgtagctaaattggtgagagactcagcctgaccgcttgtctttagaaggcctgattggaagagtgcactctattgactttcctctaacaatgaaattgtgaaaggtacatggggcggctgtgagacgtgcagctatcgggtctcaccggcacatcccttttctcgtaaagcaatgaagcactttctaaggtgttggtactagtgctggaggctgctggtgcattagatgctgcccgtcacatcggtgggctgagaaaccttccttaaagacctgtgatgttttgtaaaccctgactgttctggtggttgcaaagttagtgtctgtttagtgttccccatctcaccagaagtgtttcctttttctcattcatagaggtcctgtaataaagagggatccgaacaagctcagaaagaaaatgaatttcaagtaagtaattcagtctttctgcatctgtgtgagatgtgaactagtgttagccacccttcgctactccagggcttggcagtgcctcttatctacccttggaaaatcctgatctatctttctacgaggaggggctcttggtatatctatcagaagccaccttacggagactgagtgagcggtgggtattcctcattcctcctgagagtgtagactgtggaagtttggtgtctttatggcaatcgaaacagcattcggatgttggcagatggcagccaggggagcattcgtgtgtggtacctgatgaggaggccctggctgccgctgctgtgatgcctctctcaccccctttctggtcgttcccacacttcccatcaggaagcgggtcactgcccagtggttttggtggccacccattttccatgggctaacagcaatgttttttcctatggatgatacccaagttggaaaagcttcttcctagacttagagaatgtgaccccactctctgaaacacacatgtgcagatggcttgaggccaagagcactgaccgatggagcctcagaggcaggggtctggggtgttggtctgcatgccccagcgtaagcaccttttgagcatctctgccattatgtgcaggctcacagagaagggtgcatgtgcacacatgcccaacatacgtgggtctaagatgtagatacacacatcgccacatcacttttaccaattgtatattgattattaaaatggtcaagaaataggctgaatgcggtggctcacacctgtaatcccagcattttgggaggctgaggcaggtggatcatgaggtcaggagtttgagaccagcctggccaacaaggtgaaaccccgtctctactgaaaatagaaaaattagccaggcatagtggtgggcacctgtaattccagctacttgggaggctgaggcaggagaattacttgaacctgggaggcggaggttgcagtagaccgagattgtgccactgcactccagcctgggcgacaggagtcgtccccaccaaatgcraaaaaaaaagaaaaaaatcaagaaatagacattaaaacggttgagataaaaaaggaatgaaagtgatgatattttttccacacttttcagcggcttgttttacatgtgtcttgctctgggtgccctgctagaggatctagaacttgtgctctctggagtgacagtgactgggaagtccttgggtgggaagtgattgacaatctgttgtgaaccattccaagccctttgtgcagaggcctttggacatcctgttagctgaaaatggtggatcaccaggacctgcgtgatgctaaatccaaagtacttttcagttctcattttattttgacttctcagtagcatttgacatgacccccacccttttgaaatgtttcctctcctgagggcagccatgacacagagacacaaagtacagatctggctgtctacatgctagggcgccccatgatttgaccataggccctcttctcatgttgtcctgtctccctcggtcacctgatctataggccaaagggccgctacattcttcctccagccctgacctcgacttggaactaatgccattggctagcagtctctcctcggatgtctcacatgcccctcaaactcgccatgaaatcgcccggccgatttcagtcttttttatgtgaattttatatgaatttatttttaaccttttatttcataccaattttagacttacagaaaaaatttcaagaatagtacagagaggccgggcatggtggctcacgccgtaatcctagcactttgggaggccaaggtgggtggatcacgaggtcaggagatcgagaccatcctggctaacatggtgaaaccccgtctctactaaaaatacaaaaaaaattagccaggcgtggtggcgggcgcctgtagtcctagctacttgggaggctgaggcaggagaatggcgtgaacctaggaggcagagcttgcagtgagccgagatcgtgccagtgcactccagcctgggcgacagtgcgaaactccgactcaaaagaaaaaaaaaatagtacagagatttcccatgcacccctcacccagcttccctaatgcgaacatctcacataaccacagtgcaatggtcaaaaccaggacattaacgttgatgcaatagtgataactaaacgtctgtaatcccagcactttgggaggctgaggtgagctgatcacttggggtcacaagtttgagaccagcttggccaacagggtgaaaccctgtttttactaaaaatacaaaaataagctgggcttggtagtgaatgcctatagtcctagctactcgggaggctgaggcaggagaatcgcatgaacccaggaggcggaggcttcagtgagccgagatcttgccactgcactccagcctgggctatccatctccmaaaaaaaaataataataataatatctccaaaaaaaaaataataactgaactatgacctgaattgaatttcagaagttttcctatgcatattttcttttgttctgtctcgagatttagctagatctcaagattgcattggctatttctctttagtctttttcagcctgtaacaattcttttgttatttgtaatctttatacttgtgaagagtactgatccgttattttggaartgtctcctcaatttcagcttgtctagtgttttctcacaattgaggttatgcatttttggctgaaataccacagaaatgctgttatgtcttctcaagaagttcataacatcaatactcttcttcctgggttttaaataaatgaaacttcatagataaagtgaaaagtcagtttaaaccccttgttccattctcaaccacttctctctcccgtttctgttcactcttcacatgctccaatctgacatctgtccacccatcactctgaagctgttcttttttttgtcaccaacaggttccatattgccaaatctaatggccacttagcagcaccattagggaataccactctccttcctggcagtggcgcctgcctcaccttgccttctgccctggcccctctttttgctgcctgaacttaaaccagtttttcaagttgtggcttgtgaacctctagtggggcatgaaatgttagcatgttgattgctttttaaaatgaaatagagtagaaaatattaataagtgttgcccagttgtgagagtgagtattgctgtggggatagtgtttgttttgggggtgtatgcgagggtgccctgtagaaagctttcttactgtggtgacagtcacataagaaagggcattttaaggcctgtgctggttcctcctcttctgtccccaggggatcgaacccagtttgtgagctgtaaacatcaacaacatgttgaggacttgtgaattggtatctgtaagccccagtccacccggcaatctcatgctctgctcttccttttccttgattgtcctgttccagtgagacaggcctctcagttccttgaaggcgtcacacttgttccttcctcatggccctgtgctcccatggggctgctgtggcttttcacacctcagatctcaggtcagttcagtgtggcctccttagaaatacccacaccaccacaccagtcacccttgtttccctcatggcagtgagcccagtccatagctgcgtgtacttgcttactgtccatttctctctctctccccatccctccttctctgtcatgtaagccccgttgtgggcaggggccttatgtatcttgttctttgttggttccctggcgcttagcacagtgccaggacatagtagacattgagtaagtgtgttttaggcaaatgtattaatgagtctttatttctgaagcccaagtaaattgttccaagttgagatatctgaaaaagtaggaccaattttccctccactgtcaccagctgtggctaaaccagtgcgtggtacaggagagaacccagccatgtctgtccarccccctttttaccatgctcactttcaggagcaatcaggaaggtgcctggagacatagtgatgacaagaagaccaccagtagttggtacacttattctaggattctctgctgtccttaacctgtcatttttcttgcttgtgcctgggtgttctctttcattttcttttcttttgagacagagtcttgctctgtcacccaggctggagtgcagtggtgtgatctcggctcactgcaacctctgcctcccatgttcaggcgattctcctgcctcagcctcctgagtagctgggattacaggtgcccgccaccatgcccagatagtttttatacttttttggtagagacagggtttcaccctgttggccacgctggtctcaaactcctgacctcaggtgatctgccctcctcagcctcccgaaatgctgggattacaggcgtgagccaccgcacccggcctcattttcttcctctccaaatccttctctccatacaccatctccccctttcttcctactgtgaataaatattgaactacagtattacgtaagaataagtgtgtttttgtttacaatgtttagggcagtgctaaagagaattggaaagttcttacatctctttccctcttctctatgtcctttctgggttgactcagctctggagaggattctggctagtgctggtgacatgtgttgacgatgccacacgtaaataaagtcacctccgagaatccttcccagtggacatgatgtgcaaaatgctgaacttccgagtccagcacccccttgtcctgccatgcccagcccctgtttacttttgtgttttacacagcatgagggtggtggtggggaccacagtcttcagagcaccaggaccgtgctgccccctggggagcaggggagcataatgtctaagcagagacttggaggaggctttgcagacccttgcttaaatgccccggatactttctgtgatgttgggcttggagtaagatggggactgcatctctggacaacactaccataggactaaaaagttcttggaaaccttttgacaactaaatagagatactagatctttgttttcattctctaaggttttaagaaataaaacctgtctgatatcaaatcccaccctaaaattcattagcttgatagatagatgttatcagtttattgtcatatacacaaaaccacaaattaggaaagattgagcctcasaagatcacaggccataattgtgaggattatacgaatgatggttgtagacgataattgtggggggattaccggcaaatccatttacccccacaaaatgtaaaagtgaccaaaatactttttgctttaatgtggtctgatatcctttggaagtagcttttcttttttgttttcttcttactatagtactgtatcatttcctaataagtttgtcctcttggtttctcagtttttggtaacgtgaatgtgttttagaggtttctctgggatcatgttcctccacagcacattgcttcacagggggtgaattagaatcatctgaaagctttttcaaaacagccctgctggtgcctctcttttaatacttggagtaagacctaggaatctctttgcaaaagctcttttttttaaaaagagacttcggtggtggtggggcatctcactatgttgcccaggctggtctctaactcctggcctcaagtgatcctcccacctcagcctcccaaagtgttgggattacaggcatgagccaccgcctggcctgtaaaagctctttaagagattcaggtggacctctgggtaagcgtgactccttcactccaacagatggaaaccattatgctgtaatgtgctgtttaagggggaaagaccaaggactgaatttgctttgagatcaaagcatggattttgaaggcaaaatgatgatagatcccacgttaattattaggacgaagatagaacagacagcatcatagagatttcagcaagacaacaaacattcaataacaggaaaaggtcgggtgtgccaactgaaaatagcaatctaggatgctccatgctaggstgctctttggactagaaagccgtagaccctggacctaaatcagtaattttcaagcttgttggacccatgagcccaatttagtaggcagaaggtcctttggatcctttgctttaactagacacactcaaccaaaagcaaatcaacccttaccagaatggatggtgttgtggcctttggtgagataccaagggtgagactcctatataggttgcgaaataaatagaagcaataaaagcactgatggatatttttctatttttggatctagtgacctaaattaaactcatattttaaatcttatcaatatagcatagtgcttgcaagcatgaatcctgcaaatgacacgatgtgtgactttggaacctctgtttcttcatatttaaaatggggatgatgataacagtagtgcccacgtgaaagaatactcatgaggatcagatgaaacactcctrtgagagtgcttctgatgcctggcgcttagcaaacactcagtaaacacctgatttgttgccatctgttttagggggctgaggccatggttctggagagcgttatgtttgccattctcgcagagaggtcrcttgggccaaaactctatggcatctttccccaaggccgactggagcagttcatcccggtaagatttgttcataaacgcttagttgacatatgccacagacagaagatggcttctttgtctcattgctgcaagaacctgcaatgctgtgttttcactgttaacctcacctatgtcattaaactgtatcagaaatcatgaaaagcaacatttattttgtacttacatccgaacctctttcttttctgtaaaggtgtattcatccaaatttgaaatatatatgaaacttaccattttattgtcccctgaggctgtgtaccctgagactttgcccttttcaccgtgttcctctcaacttctagggccctgctttatagaacttgctgctagaacaccttggccctgctcagtctctgactgtagccctgtgggggccatgcctgttctttcccatcacccttccttggtttgttttgtgcattcctactgagtctccctacctcccatcttcctgtccccatatgctggtcaaattcttagatttcaaggccttgctccaagaccttgcagtcttatttctaagcagtcaggattattttccctttcttattgtcccaaggcagttttaatgttgctgtaacatttaccagtataccatgtcttagagttacatgtacatatctaaagcataggtcctgttcctctacccacccacccctgactccatgccctgcacaatgcttcatgcccagaggttctcatgaaccctaagtgttgaagtgtggctctgagccctggcaatacttctttgattggcaatgctcgtctttgtcagcctgcactctcttcctagatagatcagatattccccattttcattgagcgtaagttccttgaggactagaatcataagctgctagcttttcctgccctgctgcatgagatatcttatccatgagaggcctgggcatgtccagggctgccctgtacatctgtgcagatggagcccagcactaggatgcctggcagaggggtgctctgctgcgtctggctggggaccaggggcaggggtttctttgtctaatcccacagcccagaaacagagaggctagttgtgctctgtctccccagaagaggtatcctcttctagttgacagtggcactgtccgtctgtgctagtgttgtgctagctgccagtgctgaggatgtgtttagatgagtggatggtgccttcactgcgctggctttttcctttagtttgctccctggcacctggctatgttttagtagagacagggtttctccatgttggctaggctggtctcgaactcccgacctcaggtgatccacccgccttggcctcccaaagtgctgggattacaggtgtgaaccaccgcgcccggccgagatgataagtttttgaaagaattttgtaaataatagaacctcatatggttataagtggcaatataggtgaatcttacaaacataatgttgaatgatcaaactgcaggagactgtaagtagtatcataccattctataaagcctgataaattttaaaaattgtttaagaatatgtgcacatgtagtaaaagttctctttttggaaaaggtaagggaattgtgttaacacaattcagaataataaaaatatcttggggacaaaaagggcaggcatcaggacacatagattatagtatctgtggaactgattttgttctagttcttaagttctatctatgctcttgtatgtattgtttattatatattaaattttttgagatgggagtctcactctcttgcccaggctggagtgcaatagcatgatcatagctcactgcagcctcgaactcctggactcaagtgatctttctgccttagcctttcaggtagctgggagtacaggtgcacaccagcacacccagcttattaaaaatttttttttgtagagatgggtcttgctgtgttaccctggctggtcttgaactctcctggcttcaagctcttctcctgtctcagcctcctaagtcaccaggattacaggtgtgaaccactgcacccagccatagtgaagattttttwaaaattctgttatatactaggtttgaaccatatgacgccgccggtgtttgactgtttttgaccaacaagaatggcagtttcatttgattcaacctaataccgtatgttatttctagatttgcttttttttttttttttttttaagatagggtctcactctattgcccagtatagtgaagtataagtggcctgatctcagctcactgcagcttcaacctcccaggctcaagtgatcctctcacctcagcctcccgagtagctgggactacaggcacgtgccaccatgtttgactaattttgtttatttttttgtagagacggggtctccctgtgttgcccaggctggtctcaaactcctgggctcaagcagtcctcccgccttggcctcccaaagtgctgggattacaggcatgagccaccacgcctggcttaggtttactcttcactgcttgggatcaggtgatttagtttcatgattcctgtagccatctttcaaagggcatgtgagaatagccgggccactagggatagtaggtagtctgtttctctttctctactggggaaggaatttggaatactgagatttgttcatatctgagcatgttagcttcagattttccttgttgccaaattaatggcagttttgaaagctgagtgagctaccttaataagtcctgtgtgtcctgctgctggaagtggaggccctgttcttattgcagcatggtaatttgttgacagtgctgtggtgacagtgctttctggagggagttgaatagaaggttgagtccaatgcttacagtgagctcttagctctcagtagcagacatctgccacttgctgagctgcaccctgggctaggtgctgtcccagagacctcatctgcattctctcctccagctctcctggcaactctgtgagagaattcatgtcctgattcccatttgatagaaatgggaacacacagatgtatgaggtaacttggatggccatgtagctttgaaatgagaattaaagccacaatttcaactgaggtttccctgagttgggagcattcactcttacccctgtgctgtacttctttgcattttcacagaaacctctctttagatttctgcagggtggcaggttgcatgaggaagctctggaggtctcagttgattgtgagctcccatgggcctcctgtaaaagggcagccaaacaagcatggcctcgggctgatttaggggaagtgcaggatgcagaggccaggaggaagtcctctagacactgtttctttgcccaactttgccctggacacctgctctgtgccaggccaggtgctgacaccaccactgggagcagctggagacggcccccctgtctctgtgacgcatctcctggttaggacctattctggaccccacatctcacctgcaacacatcagagtagaatgtcccagctgatggaggagctggaagtggggccatgtgataaactgctgaagacatggacttcagcattgggtagtgaatagacattcagtgtggttttagaggccagaataatagatgatagtgtagtagttcaataaaatttaaggaaggagttctcatagttaaaaagggttcaaaatgaaatagatctttggaggtggccggctcctcactgtagaaatgccatagcaattgctgggtcactgtctgtagggacacagtgtccattcttaagggaatttggggcattgggtgagacttaaatgcactacaaaaacacttctcgttcctaagactgtgtgatctcactctttttagtttacttggtaaatgtcagtttttaactcccttttctttttcagagccggcgattagatactgaagaattaagtttgccagatatttctgcagaaatcgccgagaaaatggctacatttcatggtatgaaaatgccattcaataaggaaccaaaatggctttttggcacaatggaaaagtaagtggtcaaatcacttggtcctaacatagttttacagtggtggctcccagaagtaccataagtgagcatttgtttgccacagtagtcagaggtcttcctagttcactgaagtgcagggtgtcagctggtgatacttgtctcataagtaagtctttcttgtgtgtaaaagtcaattcctaaaccaggaaagaaggcttatgcaaaaatgctattgaacgggtgaagggacagaagaaagtcaccttcctagaatgccacgaacccccaaggccactcctcttcccctcagtcatggcagtcagaggggtcccactggcattgtgactgcgctgggattgaatgtttaaccaaagccccaagaacagcaagccttggtgaattgatcggtgattctttgttctgttcttttttgaaaawtttttaataggtatctaaaggaagtgctgagaattaaatttactgaggaatccagaattaaaaagctccacaaattgctcagttacaatctgcccttggaactggaaaacctgaggtgagttttccttctatttcctgactttaaatattcttagtcactaaaactgttgtcagtaaacattgattgagcttgccttatgtctggcattttacattggttttacaggatgaatttaaaccataagttttgtcatctggaattatggttctctagaggactagagattatggactctatggactagaagcccacacgtggcctctggtcagtttgtgaaggttccattgagaaggaaaatgtcaaaggagtggcttggtggccagggcagtagartgtctggtggggtggattttctctggtggggagaagggagtaagggcaggctggggagtgtgaggaagatccttcttccttacagttcaaccttggcttttgcgagaaacagagtcttcatactgatctctgaagcaaggccgtcattgtcctcagagtgatgcttggcgcaggccactcacatctgtacactaacaagtatttacaccttttttttttttttttataagacggagtctcgctttgttgccaggctggagtgcagtggcgcgatcttgactcactgcagcttcaccctcctgggttcaagtgattctcctgcctcagcctcccgagtagctggaactacaggcatgcgcccccacacccagctaatttttgtatttttgtggagatggggttacaccatgttggccagagtggtcttgatctcttgacctcgtgatcggcccacctcggcctcccaaagtgctaggattacaggcgcgagccaccacacccagccacaagtatttacacctttaattactcaggtttgtgcctcctctgctaggcttgatgatcgctgctgagggaaaacaagtaaacaaataaaataatgtcaaattgtgataagtgctgtgacagaaacagatcaaagtaggcycttagtctgcataggaggacctgsttgggtcactggtaagagaagggctgtctaagggggtgctatacaagccgagaccagcagagaaaggggctccaggagggagcggcacatgcagaggtcctccgggggaagagctgartgcagagggcctgtggagttgttgccacgtaatgacgcagttgtcagaattcacatcacagatactactctgaaactgtgtgttgctttggagcacgaatttggtgctggccatgtggagaaagcaagactgtgtgcagctgactgagaagcgtgatgggtaacagtgaaacctttcttttcagatcattgcttgaatctactccatctccagttgtattttgtcataatgactgtcaagaaggtaagaattgctatgttctgttacagatgaggtttgtgtgcatacttagaaaattactggcagtgtgtctgaaaaatgtaaggtagcatcaagagtattaggtacattaaagtatgatacaaccagacaatgaggttttgtattatttttatagagtatgaggccagtcacaatgtctcatgtctgtaatcccagcactttgrgaggccaaggtgggaggattgcttgagcccaggagttctagaccagcctgggcaacatagcaagaccccatctctacaaaaaataaaaacattagccaggtatagtagtgtgcacctgtagtcccagctacttggtaagctgaggcaggaggatggcttgagcctaggagttcaaggctatagtatgctgtgatcgcaccactgtactgtagcctggatgacagagcaagatcctgttaaaaaaaaaaaaaaaattacatggaagaaatccgaaagaatattcactaaacttgggaactgggatgaagaacttaaactttctaagtcacatattactttttcagtgtttaactccttacagtaaacatgtatgatttttttttaacctgaaaaagcaataaaagaacaagatccactgcctaccccattgagtcccgggcccttcccccttctgcaccacacagcgtagtgttgcttatcgcaacacgtgtaatcctaacacctcctctcctagtatcagtgcactgtgctattaattatttcgggcttctctgctttgaaaacatgacagtgatatgttccttactgtaacaaaacttcatcccatgcaattgcacattgaacagtctcatcagaggccccccactatgcagctcccactggtgctgctgacatggcctctctctgccttgaccttgcctcccctagtcacagtagttcaggtcccaccttgagcccttgtttgccaggctcagcagtttgcttttaatcctgagaacagtttctcatgaagactcgtcatccataagccattcatttgagccaaattaccttttactaattagctgctcatcgctggctaactcaaggagggtgtagacattacagctacagctttgtgtattacccttgcccttctggtggtgagggggtgataaatggcacagacatcactagagagaggggactggaggagatcggctgtgttgatgatggcaaagtgtaggaaggatcgaagaggtaacagttgtacattaattttgttgtgctactttgggcgtctgcctccaatttgccttttttttgagactgttactgtgtcacccaggctggtgtgcagtagtgcagtctaggctccacgtaaccttagcctgttgggcttaagtgatcctcctgccttagcctcctgagtagttgggatcacaggcgcacaccactacacctggctaattatttgtggagatggagtttctctgtgttgcccaggctggtcttaaactcctggacttaagtgatcctcccacctccacctcccaaagtgctgtgattacaagtgtgagccaatacacgttttctggtctccagtttacattgtaattgctactctaaatggaaaaagtatgctgaagagcctagacactatacctccactagaaatcctaaggagagagagctgctgaaaacctagcgaaggttggctcactggtgccagcagcaggatgtcggagatgctgaacatcatgtcgagtgtggggatctcaggaacgcaggcctgcagagccaggctgatggctgaccaactcctgacccagaatccaatactaaagcaaatagtcttgtaggaatgctgcctgtggtctccktgggaaggaaaagcaggcaagaacaaagcaggggatcccctgtggcagctgagctctcccttgcctttcttaccaggagggcactcccacagcttcccagctggagtgctgcagccagctggcctgcagacagcaaaccaagtcccagggctgctgagggtggtgtttggctagcacgagctcctgcatgccaccatgcagaacatttgggaagtactgtcctgacagcagagcaagaggccaggctttgttccacagtgatcctgggggtctggcgaggactagggctgtgagcaggggttctcatggccaggtgggtcaggagccaccctgcatagggttatgcctcccgtgagcacttctacgctctgtctaggccctggtgatgtccacagaccaaaagccacattcagttaggattccctaagggatcaaatccattctctcggctctgctgttcaaggacttgagccttctattgtaaaacataaaccatgttatccaaaccttttgcaggtaatatcttgttgctggaaggccgagagaattctgaaaaacagaaactgatgctcattgatttcgaatacagcagttacaattacaggtactgtgttacagtccagtgtttccatctcaatattgatttatcattacgatatgcttaattaacagttattagagaaaataagtcaaaatgccgctctgagttgcaagctgcttcacctggaatcagtggcttctcgtccagtggccggtgatggttgtggtgaagcagcacagccttctttgttcctagcagacagcgctagttggggacagccatgccattcagtccagactttggcattttcttttggcttcagaggtcattttcttctcataaatcctggtctaggagacacaatgttctggagtagtggttcaggtgcacctgtatagctttagtcagctgtgatkctgatcaaccacctgttgtctctctctgtcattaaagcagctacagtcctgctccctcagcaagtccagatggcaacaggagtggcgtgctcggaactcagcctttctttcttctgcagtcagggagcctccaggcatacggtttgcctcattgtgtgcactgtcttatgtcttatttcaggggattcgacattggaaatcacttctgtgagtggatgtatgattatagctatgaaaaatacccttttttcagagcaaacatccggaagtatcccaccaagaaacaacaggtaggagatgagtttttgtatacttgataggaaaattacatgtcaatttcatgcagttagaattacatcttcttttttattttttgaggcagggtctcactctgtttcccaggctggagtgcagtagtgcgatcatggctcactgtacccttgaccttctgtgctcaggtgatcctctcgcctcagccccccaagtagctgggaccacagacgcatgccaccacgcccagctaattgtttgtattttttgtagagatgggatttcaccaagttgcccaggctggtctcaaactcctgggctcaagtgatcctcctgcctcagcctcccaaactgctgggattacagttgtgagccaccatgcctggcctacatcttcatttttaaagataaccttttaaaatttggtttatgttaaaaaatgttattttgttcctgttaaatgtagacacaaacttgaccttttagtccagcttattaaaaatctctgtgccagagatacttgtattcagagaagagctttgtcatcctttgtagttccttgtagtatttttttgaaaagcccagccttgattctgctttctggccatctttttggtgatcactgacctttttctattcatttcacactatggagagagaagtaatctttcgggcaccagggtttagtagtgggaggaaatatctttggtgttaacagttccctttcctgtcctgaatgatgggaggaggctggtgattgtgtggagaatcagttctcatgggaatttcctcctgagatctttctctcccattcctcagcccagcactgaaaccttggtagcggtgctgaagctgagtaggattgggagggtgcaccaagcctgcctccaaaatagtggtctccagtttatgttttaagtgctactctaaatggaaaaagtatgctgaagagcctagacactgtatctccactagaaatcctggggagagagagcggctgaaaacctagcaaaggttggctcactggtgccagccccaggatgtcggagatgctgaacatcatgttgagtgtgtgtctcccagtgtgtcacagtagatgcatatgcttagtgacagctattgacattgtctattttaaccatcattgatcctaacacaattacttttttttaagctccattttatttccagttacttgcctgcattccaaaatgactttgaaaacctcagtactgaagaaaaatccattataaaagaagaaatgttgcttgaagttaataggtaacatttttccttttttgatttgtaaagatagctttcctctttatagactatatttgggagatgctgacttgcaattaggagtattttagagcttcttcttctttttttttttttgagacagagtcttgctctgtcacccaggctggagtgcagtggcgcaatctcggctcactgcaacctccgcctcccgggttcaagcaattctcctgtctcagcttcccaagtagctgggattacaggtgcctgccaccatgtccagctaatttttgtattttttagtagagatgggtttttgccatgttggccaggctagtcttgaactcctgacctccagtgatccacccagctcggccttcccatgctgggattacagatgtgagccactgcgcctggcctaggagcttctttttaatcgtacatctttaggacttgcactttgtcaaaaatagaatctgctacttctccattgtggccgagactatgcagagctttcagatctgagcatacagcaggcaaagtatattagtctgttctcacatggctacaaagatattacctgagactgggtaatttataaagaaaggagttttaattgactcacagttctgcatggccagggaggcctcaggaaacttaacaatcatagcagaaggcaaaggggaagcaaggcacatcttacatggcgccaggagagagaggggcagagagatagagaagaaggtaggactaccaaatacttgtaaaaccatcagatcttgtgagaactccctcactattgtgaggacagcatgggggaaactacccccatgatctaatcacctcctgccaggtccctccctccacacatggggattacaattaaagatgagatttgggtggggagacagagccaaaccatatcacaagaagagttcccatgtccaagaagggtcaggacactttgtggcattctgaactgtcatccagacacaacaacccagccatacagggctgctgccacccagagcctatagaattttttttttttttgagatggagtcttgatctgtcacccaagctggagtgcagctatgcgatcatggctcactgcagcctctaactcttagcaagcctcttgcctcagcctcccaagtaactgggactacaggcacgtaccaccatgcctggctaatttttgtatttttttgtagacacgaggtcttgctctgttgcccaggctggtcatgaactcctgggctcaagtggttctcctgccttggccccccaaagtgctaggattacagatgtgggctactgcatctgtccctgcaaacttgtcactgatgcttctggagtggcggccaccatatgctgtgttttaactcttaagtttctcctagaaaatgattaaacttatgtttatcggttttaagtcttgcttttaactgttttctcaacagttttcaaagcagggccctgaaacttccagattgtgcaaaggtctagaccactatttgtccatctctttagtcaagaggcctgtgggttgttcctattatttggggtctcctgtgacattttttggtagaatggctgtttaagtcactgtggcccctcatctttccacgcacttagcacagtcatctcctcgtggcctccagagtgctcacccccaacactaagtgtgatgtcacacctgcctacctgctgggctccaccgcagcatacatcatctctttctgtttcttgaactggtggaaatagaaaaaaacagatggaggagaacccagacagaaagggtagcacacgggactcttgtgggccggggaccacaggatgaacagagagtagggttggaggatactagagcaggcactcctaaatttgagctttatcttcatgtggatgagccctcagggtattgtttgaggaggaacttggattcacagtgacttgggggcttggtacagcttagagatggtgacgtggctcacgctctctgatctgctcttttcacttctgtgtgacaggaggggatgggacaaggatgggatttgagaattctcttgctcaaggagtgagagcttcatcccgcctccagcaaagggctgcctcttggttgctatggtgtgcaccctcccttgtagcaagcttgctttcttttctgccagcatggccacccaggccttcacctgcaccctgtgaatgtgaatatattcaccttgtgaatatattatggccaagtggcatttacgtgtgccatggccaggccagctgtgtgtgttcacactcaccagtgcacctgtcactagcagatgagggaagggtgtgggagtggtattcccattgttcttagttagtcccgtggaatatagacccatgatttgccaacactaactaggtttgcatccacacaagttaaaatgtccatctggcatgaaatcatttcatcagtcctgtaactgatactgtatgtctcttatatgtttcttgcttttatcattccaggtttgcccttgcatctcatttcctctggggactgtggtccattgtacaagccaagatttcatctattgaatttgggtacatggtatgttttagcagcgtttttgtttttttttttcttcctactcccaggtaaaaatgctatagtatttgtgaatgttggcagcaaatgactgttccttacagagggttctctgtctccccaagtacccgaatgtggtgacctggtggcatcaggacagtgtggctcagcccaggaagccgggggagaagccgctgtcactgatgctgtggttgcctttggaggttgccctcacttccaggccagctgaccttgcctcccctgcttcagagaagtgcctgcaatcctgatggggaatgtaggcatctgcaccctcgaagtccagctctgacctcagtcccttctgacacgggacagtaagtgaagaagagtgggtggctcctgcctgtgctgtggaaggttttatttatcggttaccacttcattctccagcctgtagtgcccgactttgggttggaagctggtaattattgaattagacctcctgtttttcataggcatgtttgtaaccaagctaggctgtcatttaattttaaccttaagaattgtcagccgggtacggtggctcacgcctgtaatcccagcacttcgggaggctgaggtgggcagatcacctgaggtcaggagttcgagaccatcctggccaacgtggggaaaccccatctctactaaaaataccaaaattagcatgcatggtggcgggcgcctgtaatcccagctactcaagaggctgaggcaggagaaccgcttgaacccaggaggtggaggttgcagtgagctgaaatcatgccactgcactccagcctgggtgacagaacaagattctgtctcaaaaaaaaaaaaaaaaaaaaaaaaaaaaactgtcactgacatagaaatagaaagtatttttaaccttcagacaaacctttctgttgttccatagtgaatgaatgttggtgagttgtcttggggtgggggataacacaaatgtccacagtctggtgagctgccttcctttgggacagggatgggactagttcattttgacctcctcagtcttatactacaatgatttctacttctaggcagaaggtttggtaatgcaaggatgatattaggtaaaagaaggggacattggatttttaaagcagatttgagtcatggtcaaatgatactgtacgacaaagcacacttcgtaacaaggaatattactagagataaagaagggcattttgtgataataaaggcatcagtacatccagaggacattaaaaacccttgtcttgcttcaaaagacatgatattaaaactgacaaaagtgaaagaagaaaatggcagattcacgattaaagttggtgatctcggccggttgcagtggctcacgcctgtaatcccagcactttgggaggccgaggtggttggatcacttgaggtcaggagtttgagaccagcctaaccaatatggtgaaactctatctctactaaaaatacaaaaattagctgggcatggtggcacatgcctgtaatcccaggtacttagggaggctgaggcaggagaatcgcttgaacctgggaggcagagtttgcagtgagccgagatggcgccattgcactccagcctggacaataagaatgaaactctggccgggtgcggtggcccatgcctgtaatcccagaactttgggaggccgaggcrggcggatcacgaggtcaggagatcgagaccatcctggcaaacacggtgaaaccccgtctctactaaaaatacaaaaaaaaaaattagctgggcctgttggtgggtgcctgtagtcccagctaactcgggaggctgaggcaggagaatggcatgaacccaggaggcggagcttgcagtgagccgagatcacgccactgcactccagcctgggcgacagagcgagactctgggtctcaaaaaaaaaagagtgaaactctatctcagaaacaaaaacaaaacaaaacaaaaaacatgggagatctcaccactcctcttctgtggttagaacaaaggaggaacacacgcagaaggagggatagggccttacaactctccctgccagcctggcctcatgcatgttcattaaaccccccagcaactgcagggtgcacattcttttcaaatgaatatggaatattcctcaagatagaccatatgctggcccatcagacaggtcttgataaattcaaagggattgaaataatactggatatgttctcagtgaaatttaagtggaaatcaacaacaaaagatagctagaaaattctcaattatttggaaattaaacagtacacttctaaataaaccctgggtcaaagaaattaaaaagaaaatgagaaaatattttaaactgaattataatgaaaacatagcatgtcagtatttgtgggatatacataaagcagtatctagaaacttacggctttgtagcttaaatgtttatattccataagaagaaacattacacaaaatccctatcaaaacattggcaaaaattaaatccactaacatatgtaaaaggataatatattatggtcaagtggcatttatccctggaatgcaaggctggtttatatttgaaaaaatcagttcatataattcttcatattaacagaatgaaggtgaaaaaccgtatgattatctcagggaccacaggaaaaagcatttgacaagatccaatgtgataaaaaaaaatctcagcaaactaggactagaggggatcttcctcagccagataaaggcatgtatgaaaaaccctcagccagccaggcgcggtggctcatgcctgtaatcccaacactttgggaggccagggcaggtggatcacctgaggtcgggagttcgagaccagcctgactaacacggagaaaccccgtctctactaaaatacagaattagccaggggtggtggcacatgcctgtaatcccagctactcaggaaactgaggcaggagaatcgcttgaacccaggaggtggaggttgcagtgagccgagatcacgccactgcactccagcctgggcaacaagagcaaaactctgtctcaataaaaaaaaaggaaaacccacagccaacattatcactagtggtaacagggaaaatgtcccctttgacccccaccccaagtacagaacatgcaaggacgcctgttctcactgcatgtcttctgtgttgtactgaagctcctagctggtgcagtgaggcaagacaaagaaaggaaatataggtgcactgggaaggaagaagaaacactgcctttattctttaggtgacatgattgtgtgcttttaaaataataaaggaatcaacagaaaagttgcttaacctaatgaatgagtttatcaaagtcacaagatacaaggtcagtatacaaaaatcagttggatttctacatggtagaaacaactgtacatggaaaaatgtttaatagtgtaagatatgtacattggaaactatgaaagagtgtaaaaaataaagaagtgaaataaatggagaagataccaccttgatggatggaagccttaaggtaaagatgctcattctccccacactgacctgtacattccccacaggcctaatcaaaacccccacaggcttctgtgtagaaattgacatgctgatcctgaaatttatatgaaaatgcaaagagtctggaataaccaaaataattttgtaaaagaacaaagaagacttctactacctggttataagacttctctgaagcacagaagtcaaggcagtgtggtggtggcataagtaatgtaaatcatccaggtgtggtggctcaagccagtcatccagcactttgggaggctgaggcaggagaatcgctagagcccaggagttggaaaccagcctgggcagcatagcaagactcatctctacaaaaaatacgaaacaattagctgggtgtctgtagcacatgcctgtagtcccagctgcgcgggaggctgagctgggaagatcactttagcctgggaagtcaggggagctgtgatcacaccactgcactccagcctgggcaacagagcaagaccccatctcaaaaacaaaacaaaacaaaaaacaaatcagatggaacagaatacagtgtccagaaattgatccatgtgtatataatcacctggtactcaacagaaaggccaaggtaatttaagagggaaaggattgtattttcaaaaaatgatgcaagaacatttgaagagtcatgtggagaaaaaactgaacctgattctgtgccataaacaacagtcaacttgaaacagataatagacctaaatgtgaaggctaaaactattaagtttctatgagaaaacacaagagaaaagcttagtgacctagactggtcgcggtggctcacgcctgtaatcccagcactttgggaggccgaggctggtggatcacgaggtcaggagattgagaccatcctggctaacacggtgaaaccttgtctctactaaaaatacaaaaaattagccgggcctggtggcaggtgcctgtagtcccagctactggagaggctgaggcaggagaatggtgtgaactcgggaggtggagcttgcattgagccgagatcatgccactgcactctggcctgggcgacagaatgagactccgtctcaaaaaagaaaaaaagaaaagcttactgacctaagcacagatttcttgggttacataaagcactagccataaaagaggaaaaaatagagtaagttgctgtgagcaggaaacacataaaaaccaaagtgctttttcccattcctttcatcagcaacaatcatcaccacagaagactaaagtgaccacgtcaggggtggttctccccgccaacaaacaagtaatcagttctggagtggacaccagatgggtgccctccaattccattacgacactgtctacgtggggacagagtcagaccccacaggttgagggttgagaccttaagactgccccccacttccaacaccagttgcaagtccaggcctctggaatttctgaccaactagccatatattggagttcccacgttcccctcgggttcaattaatttgctagagcagctcacagaactcagggaaacacgtaagtttaccagtgtattacttttttttttttaagacagggtctcactgtgttgcccaggctggtctccaacttctgggctcaagcgatcctcttgtctcaaccttccaagtagctgggactacagacattccgccaccatgcctagctaacaaagggtattttaagggtgaagagataaataggtggggtgaggtctgaaaggattcccagcacaggagcttctgtccctgtgggtgggttggggaactcattcttgttcaccttcctgtcagcctccacattcagttctctagaaactccccaaaccctgtcctcttgggcattttatggagatgtcattggataggcatgattgaaatgtggacaaccgtgttgaaatgtgattggacaaaaaaggtgtgatctaaacctagcaagacctgaccaggttcttcgggcttctctgtacagcattccttatcccagggtatggtgcaggaccccctctggaataagagtcttatgacccacagtcagattagagtctagctttgggcaggtgaaaggacggcagaaggtcagagagagagattctgtttactgtagtaagggctatgggagttatgagccagggaccctggacaaaaacacacatatatgtcatcacagttggactttatcaaaatgagtaactctgaacgatatcatggagaaaatgaaaaggcaagccacagactgggaggaaatactacaaatgtatatttaataaaggactcatatttaggatatataaagaactcataactcagccagaaaccaaacagcctgcttcattattattattttgagatggagtttcgctcttgttgcgcaggctggagttcaatggtgcgatctcggctcaccacaacctctgccttctgggttcaaacgactctcctgcctcagcctcccaagtagctgggattacaggagcccaccaccatgcctggctaatttttttttttttttaagtagagacggggtttctttgtgttggtcaggctggtctcgaactcctgacctcaggtgatccacccgccttggcctcccaaagtgctaggattacaggcatgagccaccgcgcccggcctcagcctgctttataaatggatggaagatttggacacttaagagaaacacatggccagtaagaatcttttcatgtgttttgtataattagtcattaaagaaatgtgaatcaaagcctcattgcgataccctacacacccacagtgatggctaaaacttgaaagaactgacggtcccaaatggcgagcacatggagcaatgggaatgcgcatgcgctgctgctgggaatgcagtcgcgacagccagtgtgaagatgggttagaccacccagcagccctcctggggaatttttccagaacaaatgaaaacaaattccacaccaagacttgcactcaaacactcatagcagcttcatttgtttgtctgtttttgagacagagtctcactctgttgcccaggcaggaggagtacagtggcccgatcttggctcactgcaacctccgcctcccgggttcaagcaattctcctgcctcagcctcttgagtagctgggattacaggcgcccgccaccgcacccagctaattttttatttttagtagagggggtttcgccgtgttgaccagtctggtctcaaactcctgacctcaagtgatccgtctgccttggccttccaaagtgttgggattacaggtgtgagccacctcgcccggtctgcaccttcatttataatcgtcccaaactggaagcagcctaaatgccagtcagcaggtgtgtggatacgacagtgccagatccgtgtactgagaacactcggcagtgcaaaaggaaggtggcaccagtgcatgacagcacaggccactcagagacagcacgctgagtgagaagccagacacgaggctgcatattgtatagtggcatttatgtgctactctaggaaagaaaagtccagtccatagtgacagatattgagtcggtggctgcctgtggccaactgcaagaggcccatgggagcttgtagggatgctggaaacacaggtctcctgactgcggtggtggagaactggctggatgcatctgtgaaggccctcaactggacacttaaaatgggctcatgcttgtagagtagaaattacagctcagttaatttttcaaaaaagttaattgtaatcttcctggcttctagaattgcagacttttagattaggagtgggtctttgagattgtgttgtcctcacacaacacaatcccagaaaaatagtggcagaaacagaacaccaagccgggttttctcccttgcctctcagtgtccttcttaaaagtcatgctgcaggagatcccgggaaataggcgatgggcatcctcttctccccttctgttctagactcgcctgtgtcccaggggtcttttgctctaaaaggtgtgttatgtcggtcagtcagtgcccacagcacccagggttagcaaggtgatgaatggtagcagtgctaagcatgtggatgagacgttcatcctgagaggcagggctgggctggcccatgcctataaaccaggcctcctgagaatgaaggtgtgtggggtgggctgggagcttgaggagcctgcacctgtagagcagcgaggcccccgagcagccctgctgcacaggccagtcctgtgcttttggtctcatgggtccgtgccctcagctcttgcctggggtggggattgggggacacatgggcagggttcaggccagcaggattccttgctgaggccttctctttgctgtctcctaggactacgcccaagcaaggtttgatgcctatttccaccagaagaggaagcttggggtgtgactgtggggaggactccatccacctcatcactggactgcatggggaggcagcagagcggggtcccctctgtgcttcgactactgctcctgtggcaggaggctttgggtggctcactactgaacacatgtgtatgatactaaagacggtattaaaatggagcgacgtttatttcatctcttgtttacgatttcactaggactcagaaacgagatcgggaagcagaaatatagtgcaatagtgcaacatctctgaatccttttaatctagagaaggcatttcatatttgggggctaaggtttccagtcagatgaggcaaacagcaagagtaagcagtgttacttgcaggtactttggttaatgttgatttaaattttcatgaatgtgctggtgaacactgtgaccaggcttttgtagatggygatgtgttatagacggtgctcactcccaagggacagcaagtgagcagagatgtactgcaaagtcgccagtcactgctgcaaggtggcctctgcctggggcctccagaagctgctcctttaccctcttggtcccatggctgaagctggagcagcggattgctctggagcagccaaggccgccagcgtgtggagcagagctctcccctcctgctgggcgtgtgtgacactgatgagtttcactgtactgcatgtgacttctcccctgcccttcctcctgatggagtgtgcagacagccatgcgtggccacgggggcagtgtgaggacctccctgtctcccggctcccctcccaggggagccagctgcttgacctagctctttgggcctctcctgccctctgctctgcctggagtgtcggatcctgtgagtaggctgggcctcccctgggcagggttctccaagggcccggtttcccggcccttacctttcctgatgcccctgacatcatcattcttgtgggagacagcagcctgtatgtggtgtggggcgtggatcgagtgtagctgtgaaatccatatatatgaaatgtcctgcgggatacagtcttagctgacttttttttactctgaactcttatttgaattgttttttgtgcatatatttctgctaccacagagattgtactatacaaataaaaaaatwaaaacccaacctcaagctgtcacccttggatgtgtcctgaatctcaggcagggctcctggtacctgaaggagcccacggagggctccatctgcacccactcagccccttagcttagcagtgctccgctgctctcagctggcatcccagcagcatgtggccccatcatcagccctcctccacctcctcctcttcttccccagcacactctggtttccctgcttctagcccagaagcgaagagccctggaggacgttggagactgggagcagtgctggtgcctggggatgctgagcggctgggcaggagggaggcttttgctgttcagccttctagagagttacagttttaagcaggtgaagccaaactgaatgaagcagtaaaggtgttgcgctcctgcacaggagctccagtggcttctcactcaccgtcttcctgtgcccaggccactgctggcctcactcagccctcgcctctgcctggtccacacgagctcgcttgcagtctcctcgcagagatacatgtggagccgatcttccaatactgggctccttcactttgccccactgtcagctcagtcacagtctcaggccttcctattctacccaggacactgccattccctaaaccaccctgggcccggccctggcccatcgtttctctccatgcagcttaactttcctggagcccctggtggtctctacatcaggccataagctcacgtggacaaggatgggctcgggcctgtgctgttcagtgcccagtcctccacgcaggtgacccaccccatccctatgtctccctatgtccatgccccagaggtgcccaccccagtgccttatgtgccattctcttggcaaactggacttctctagccaccactgccaggcacccccatgtcaaagccagggcggggctgactggtcatgtccctgggatcccacactgcacccctcctaaatcacactggggccactcaccacgagtgctgctcacctatccccacctcactgcccgccccaagtctctgcccagctctctccccaggagggagtaaggcgttgggttctggatttggtccagatccacctgcagctctccggagtccttcatttagccttctctgctcctaccccagcactgtgagcaccgtttctctaagctgaatctgctgggcatgtggaattaccttagagcccctgatacgacccctggcatccagaggtcctgagcaaagcagtccaggagccaatggacaggctcctcccagcagctggcctcagccacagctgtgggaagaaccactttgcagcttgttggcttctgggaagcacttcctctgcctcccagtgggggtgggacccaggccagagggaactgcagaaagccacccccattctgccagcaacgcaggaaggaccacctgggagggatcaggaagactgtagtctcaggtgaggggaggctgggcctggagtcaggctcagcccctgttctgaaccccggggtcctgggtaatgtctgctgctggggacagcctctacccttcctggcaggtgtgtggccttgggcgtgtgacaccatggccctgcatggagcactggccggggctcaggtgccccacactgctctgtacttccagacccctgaggcccggcaccagggcatggatattggcaccactcccaacagagagtaacccagacacccgctcacagccaggtgcacacctccaaggatggggagctcactcccctgacccggcctgggaagacatttgctcactccaagttagaatgtgctggaaacatctctccttggcccttttctgccccttttcaccccaagagtctgacattattgcagatctgctcaggtccaggccttgacttttgaggtcccagatcctacaccatgccttctaccctgccacctgcctcagctaaaaaggagggaagagagacgagacatcactgccagggcggaccgtctttattcctctcctgcctcagaggtcaggaaggaggtctggcaggacctgcagtgggccctagtcatctgtggcagcgaaggtgaagggactcagcttgtagcccgtgcctgagtagaacttgttctggaattccaccctgggggtgagaagcagaggggttggtgaggggaactcacgccttgagcagcccaggccagtgggtggtcgctcaccagtgcagccgcagggcgtgcaggaaggctgagagtccctccatcaccagcaggatagccacggtcatcacggcaaaggcggcaaagatggggaccagcaccacagccgccacgcccacctcccggcccaggcccaggcctatgcgcatcaccatggcccacagaacctcggacagctctgcaagcaaaggagacagtgggggccaacggcaagtgggtgcctgccagccccctacctacctgccgcagcctgaagccctccctgcacggggggccagcgagggacctccttggacagtcccactttacagaggggaaactgaggcccagagagaagcaacccgcccagccagcagcggtatgtgagaagccaggagctggggccagccgtcggtggccaggtcactcacgggcgtgggccaggctcagggcccacaggcgcaggtaggaggcggtgttggagacgcagcccaggcagaactcgatggtgtggatggcctggtgcatgagcacctcggaggggacgagctgcggggcgggtgcagtgagggccggcagggcctcagccgtcccacccccaggaaggcactgcacccacctcggcctcctcttcatcatccaggccccctgccttttcctcatcggagctccagccattcacagatgcgtcaggcaggtccagcaacccggccttgttttcctcctggggcatgagcaggcagtgttggcagcactccagccccaggaggtcccccaccacccgccaggcctgctcctggccactcaggagtctgtcaggaagcgaggagtcagggacacaccggacagtggcctctccccgcaagcagccccccacaccttaggccccggtcccacctgtcggtcagcgggcctcctccgcaggcggcggcggtggcggtgcagcaggtgcaggggtgtgccaagcagcaggatgggcaccatggccaaggccaggaccaccagcgtggcctggaccacctcctgccagggagagggcgagagtcagggcgtccctgctgtgcacacctgcaaaggaacctgagtcacagcagtcacggggcccagagagcctgcggtcgctcctccctccagggcccccgggggctccgtgccctcactgggtgagggtctgcctccataaggactcctgagggaagggacccccggttcccagtgccagttgtgccacctgctaaagatgcacaccatcacctctgacggccctgtctgcacggcccggggcctgcatccccgtttctcggacgaggatcttgcagctcccagtggccctgtgaccgcggggtccccatgaggccgtgtgagcccggcccccaccagccgcagcccacctgccgggggtagagcagcctgttgctggggctgtgggagaagaggaacatgttgatgaagtggatgaggatgctgggggccgaggcggccctggcagcccagacacacagccacttgtagatgactaggaacacgaggtaaccgaagagtcccagcaggaaggtgagctccggcagcgtctccagcagcagccggtgcctctggccaaagtgcctggcgggcaagagggaggtgtgctcactggggcccactctggcctgccagcctcccgtcccccgggcagccttggccctcacacgtggttgaagactccgaggaccaccccaaaggccatgtgcacgacgcccaggatgacggacatcttcatcttgaaggagttgaggaagctcaagtggttggcagccaggctccaaatctagggtggcagcaggggtgggctggactcaggggctccctcgccatcactgccaggaagtccccggcccgagtcactctctcaccaccctgttttccccctcggagcctgcagcctcatccatcacccacccaccgaggggcaacagagcgcagatgggccagctgccacggtgccagcctgggtgaccttgggcatgacctctgtgcctcagtctcttctttaggtgaggacactactaatgtgaggcccacggggttgttacgaggttcaaatagaaaatcaggctgggcgcggtgactcacgcctgtaatcccagcacttcgagaggctgaagcaggtggatcacatgaggtcaggagttcgagaccagcctagccaacatggtgaaaccctgtctctactaaaaatacagaaattagccaggcatggtggcgggcgcctgtaatcccagctactcaggaggctgaagcaggggaatcgcttgaacccgggagatggaggttgcagtgagccaagatcacaccactgcactccagcctgggcaacagaatgagactctatatccaaaaataaaaaaaagaaaaaagaaaatcacttccacagagggttgggaacagtgcttggcacagtgcaagctgcaggctggttcctgtccagtctcgctttgcctctgcacactcaggagactggttcctggctggtctcgctttgcctccgcacactcaggggactgtgatgcaggctccgcagggcaggaggcttgtctgcctcttgtgctgaggaaagggcctggcacacaggagtgctcagcgacagcgctgcaggacggctgaaccgaggggagccccagcccccactcccagctgccttcaccacccacggacactccatcccaggactcacaggatcgatgccaaaggggtagggtcccaggaagacaccggtgacgttgggatccagggtaagcatcgtgtgctgggccaggaatgcatcactgcggcaacgcaggggagggcggtcagggctgcgggtgctgcggggcccccagccgggctggggcccgggcctcacctccagccagactggttggccatggcggccacactccagcccgaggggaagatgctggtggcgcgactgaagcactcgttgtagatgaagccggtgtagatggagaacaggcccataagcaggagcaggtagcggcccctgaagaaagtctgccagatctgggggggcagtggtgtggtgaggggctgcctggccctgctaccctcatcaggaccccagccccgcccctcacctcgttctgcgcggccttcacagccggtcggttctccgcaaggaccatggccagggcgaagaggaacatgagcagcccgtggcccacatccccgaacatcacagcaaacaggaaggggaaggtgatgatggtgtagggagctgtgggcagaggtgggtgagctgggaacccccgaacacaccagcatctgcctcccggcccaagacgccacggaggccctgctggcctgcagtcaagaacccatcacttagcagccaggcacagtggctcatgcctgtaatcccagcactctgggaggccgagacgggggggggggggggcatcacccgaggtcaggagttcgagaccagcctggcccacacggtgaaaccctgcctgtactaaaaacagaaaaattagctgggcatggtggcaggtgcctgtaatcccagctactcaggaggctgaggcaggagaatcatttgaacccgggaggcggaggttgcagtgagccgagctcgcgccactgcactccagcctgcgcgacagagcgaagattctgtctccgaaaaaaaaaaaaaaaaaaaagaacccaccacttaggagctgtgtgaccttggcccagccacttcacctctctgagcctccatttccccatctgtaaaatgcaggtaacaccagaccacttcataagttctccacgggcagcacgggccagctgctggagccacaggaagt

SEQ ID NO: 94713 - DNA, 32711 bp, Homo sapiens
ggagagctctggggcacctgcccagccatgcctgtctgtgagaaacaccccctcagcaccagtcacagcgactgggccaggcatgggtgcctggactttgctgaccgatcagaaacccctaactctacagccccaaccctgaaggccacagtggctctgggaggcctccaaggaggccacgaggagggtgccacgtgaggcccaggcaagctgggagggagctcagcccgtgtgaatctgttgctggaaaccaaatgtgccctgaggcaaagttcctgtttccttccccaaatccgagtttcacccccttcactctcaggcttccgggtagaaaaaaacctctcccttgttccctcgccccacaaacaccccggcagatggacacctcctggcccgccggcctctgtacccctccgaaatgggagtaccgcagcatcccacaggagcagccgcgcccacctgatgagcacaggtgtgtagagcagggcggcgatgggagtcacgttgatgcccatcagcattttgctgtcgatgtcgggcagccccatgttgccatacttcacctcgcggtaggtctcgtcgtagtgcaggatcagctgcatctgcaggaggcctggggacaggacagagagcggcgtgcagggagcagcctagctttgggcgccaccgagcagaagacggcatgcaggcctcgcagggagctccaatcaccgaaggcattcccgctgacagcgcccctcaggacagcggggttcccgggctgcgccacgccttctgccagcccgcggccacttggccagctaagcccagacccccacccgccttgctccgccggcctccaattctgacggtggcaggtctgtccgggagcccggacccccgtcccccacccacaccgaggctctggctgggacccggggacgctgcgctacttgaccccccaaccccacccccgccgcggggggccgtggctgcagctgcgagggcagcggaggggaagtgagagcgggcgggaggcggcggcccgcggtttctgtttcccgggccgggctgggagcgggcggggcggccccgggtccccgagcggcacctacccaggtagacgccgtaggtgagcatgcccccggcgctggcagccagcacgttcttgagcacgcccaggcgcttgcggcggtagtagcggcgctcctcctcctcctcgttgtagttggggtacgcgcccaccagctcgtccagctgcgagccacgcacgccgctcgcacccgcgatcgcgccccgaacccgtgtcccccggtgcccgccgccccccggcccgccccgcccccgccggggggaccctggcccacaggggacgcccgcgcctcgcactccgggtccccgctcaccggggcctcgggcccgtccgggaccccgagcaggtcctcgtcgccctgcggccccgcagcccccgccatcgggtagagcggcggctccgcctccatggcccgaactactgcggactcgcggcggtcgccccggagtccctgcgaccgcccggccacttcctcccggcggccgggacctgcccccgccccgccctgtcccgccctgcgggccgcctcctccaggacacgtgtgtgtgtatgtgtgtgtgcgcgcgcgcgcgcgcgtgtgtgcaggggcctgcctgtgtgtgccctctggggtgtgagttcgaatccccactcagccacctcctggccctgtgactttaggaattaactccatttctttgtgcctcggtttcctccgtttcctcgacggtaaaacagaaatacatggcactacccccggggccatggcggaactattgagttaatgcaaagccttggaaaagtgccagggttgcctggctcccttaagctcccctcagggttgcctgggtcgtccccagccccacctccaagcctgctgttacagctcatcaaagagcactgcagggacagtagcgtcaccacctggaccccacctcccaccaccggacgctacagccagagcccacctcccatgtccccatcctgctccagtttgggctgtgcaaatgggagcttgagtgggtcctgggaggtggagattgtgatccccactgaactacatgggggaccctgccacaaccatgtagtggggcccagagcyacctgcccccatcctgctgggcactggatcccgggctgcagcgggagcctgtggtggggccgacactccaaagcactggctaccaccgacctggctggagccacggggccacttttgaaaatatccagattctctcccctgggttccttctggtttgaatgctcttcctgctgcgcctcccaggtggcttccttcccactcagctctcagaacaagagaccatccctgcagagaatgcagtcccttcacttcccttctggttttccatgccctccctgtgcacccccctccacccactgctctttaggtacatcctctcccaaatgcagaggatggcattgggcacctactgagtgatcaatacttgtgactggatgggtgcatgagtgactggatgacaaacacctcccaccccgcaaggattgctgggaaggtggggggaggcgtgaatctgcagtggcttcaggcttccaggaggtagaactttctccaggtgacgatgcccaagtgcagatgtggggaacagacaggtggattcatgcrggtgggtggctggaagtgggagacaggaaaggagccgaagagagggcagggcccgaggcgcaggggcagggaggaggtgggagagtatggctatggcgggggccgttctcagatggcagacaccagcatcattacacagtatgatgagaaagtgcaattctcctgactcagccttgtgagtagctggaattacaggcgtgtgcccctacacccagctgatttttgtatttttagtagagatggggtttcaccatattggcccaggctggtctcgaactcctgacctcaagtgatgtacccgccttagcccccaaagtgctgggagtgggccccccgagcttctcaatttccctgagggaccccaaacttctggggcctggtgcaatctcttcctccccttgttcctctgggcctgggggttgtggcggttgctatggttgcccatcctgggctcttccatcacctgtgctgtaccaccaattccctgcactcaatgtctcctactcaaaacacctggagagggtcgggcgctgtggctcacgcctgcaatcccagcactttggctggccaaggaggatcacttgagctcaggagttcaagaccagcctcaacaaagtgagacaaaccccccccccmacccatctctacaaaaaatacaaaaactagcctggtgtgatggtggacacctgtagccccagctactcaggaggctgaggtgggagaattgcttgagcccaggaggatgaggctgcagtgagctgagattgtgccactgcattccagcgtgggtgacagagtgagacctctcaaacaaacaaacaaacaaaaaacaaaaaaaacaaaaaacagccctggaggcactaaaccctgactgatacacctcctctctccagaaaggatttttttttttaggtggtttatggagctgctcttggggagcctggagactatctaagaggctgatagggtggcccagataaacacaccagggtgacctgcgggacagagatctgagcagggccagcacctccaccaacccatccaggttgcaacagtgcacagtcacatccccaggaaggggtggccagatccccccgtgctcactgtttgccaatgcttttctctataataagcctttactttcagttctcattatgaaaataatcgatgttccttgcagaaaagcaagcagaagagaataaatattgctctcaactggaactccctgaaacaacctcttggaatattgttgccccgcattgcactgacacaggagcgtgctgggcagcccacgtgattcccttcacaccacttccctggcatggatgtgattccacaatattttaaacattaaagccaatggggatgatgatcactgagtctggctcacaggatggtgggagrtccccaggttggggtgtgccaaaggctctgcccagtgcctggcacagcaaatgcccaggtggctgctgctttccactgagacttgaggctcctgagagttggtggcaaagggctcacccagagctgaagactccagcccattcctgtgcgagggctccaggcaccttggaagcaccgtgggccggggagccaggccaggctggttgtggatccccatgagtccttgtcactgtgtggcccagctggaaagcatggtcaataatgtctgggaattgtgaaaattgtgtgaagtgtctgcacacagtaggtgctcagtaaaggtttgttgagtgcgtaaatgaacaagtgacccgcattcaccgttgcccgtgagttctgactgtgtcctgggccctgggcccctacagcctctaactttgcctcttcaaggagccagggtgggtccagccttcaagactgccagggagggggtgggaggcagggccagggcctcagggccaaggcctggggcagccacttcctcaggagggcaaggagaggggcaggaggacattcacatgctctgagcgcctactgagaaccaggtgccctgtcggtgccttcaggtcggctctcgtttcaccctcgcagtagccatgtgaggcaggcagagtcagcccccattttacagctggggaaactgaggcccagtgaggggacgtttcttttcaaggtcactcgtgggcagatgaggcagtgagatgctcttgggcaggtctgaggccctgtgagccaggctcaggggcgtgtttctgagaagtgagggaatgaatgaatgaattatgaatggatgaatgattccacctgatgccatgctcatgccctgcccacactcctgtcctagagtctggaaggtagctctcagacccttccagagggggccgggcacttggaatggtcacagttccgggcccacgtgcatggaataacttgtttcagcctcacaatcacttacgtcccattttacagatgggaaggcagaggcacggggggttaagacactaacctaggtcacacaggtaagtgacaggaccaggatttgagcccagacctcacacttaacgccctccatgccaggtgctgagatccatgcctgccgaaccctctcattcacccacagatgcccccgggactgtagtcagccccattctcacatgggaacactgaggcccaaagaggcgaagcgtcagcccagcaaggaggaggcagggcaggcggggccgcagctgtctggcccggagccctgagcaacccctccacccactccccctggctggcctgggccttggcagacctcaccccagagctggctccaaaagtgagtcctcctggtgccctacccagagggctccccatttaccctgggctcctcaacaaagatgggactcccaggccctactgagcctctggagctttgaggagtagtgaggggcacccaacccagagtggggagggcccagccctcctgggaggtgtgtggcctcccttggggggagcctcactcccagggaaggctaggagttctgtcccgggaggacaggcctcttcgggggcctcctcccaggttgctcctgcattcatgacaagttcggcccctgtgagttgggggaaattcttcaacagctccctggccagggaggggaccctcaggatcctgaaacacccctcccacctgccagtacccgccaagatgggtccctgatttgctgtgtggccttagaccagtggctgccctctctgggcctcactcccagctgagacctacaggctcagcccctgcccagccctgcctggcacccgctcaatctggctgagctccagagaatggcagggctgggctgtcacatgctgagccacgtgactggcagtggctgggggctccatcccacacagaggacaggggctctgcagtccttcacccccaccctaactatctaatcacgggccaccggtgtgggcatggtccagaagacctcaccgccctcccaggtaggcagggagctggcgggtggggggggccatgatgagcacctcccaggtgccacgttggcccagaggccccggggccrggagctacggaggcccagggcaccagggagatggtagcagcggcaggccmaggaaggggcatagaggaggctcttccyccacacctgtcaccctgtcccctgcctgtccacacccacagyagcttgcacatcatccccacagcacgctggctctgacaggtgtatccggggcgggctgggggcaggcagggacaggcttaggcacagctgcctgtgccgaacytgaggaagatcgggactacaggaaccaccaaggcgacacgtggcatcatgaccacggtcctaagcagagaggcaggcactcctcctgggaggcagaggggacatccgaaacgggtgcagccccagctctggagcaagaagctctgccacacacacgccccatgttcacatcccaccccctctctgcccccacttcctcgtttgtaaaatgttagatctgcrgaaagacaggctctatgaatggggcggcccatggggtggtgtggaggaacacggaagcacagggcgctgggagaggagcaggcatgaggtatggtccctaagatggtatttctagactccagccacctttgggtctgacctctttgttttgcagaaggggaaactsagtcttgggtagggtgtagcaagacaagccacagacaaaacacctcagacactggattaaagaaggaagaggtttattcagctgggagcatcagcagacttgcgtcaagagccgagctccctgaaaaagacattcttggcctttttaaaggcttacaactttaaggggtccacrtgaaagggtcgtgataaatcgagcaagctcggggaacgtgaccgggggctgcatgmgtcagctaacagaacagaaagttttgcagtgctttctcatacaatgtctggaatttacagataacacaagtagtttaggtcaggggttgatattattatcacttttttttaactaccagggccaggtggtggcgccaaggtcttctggctatttctcttacttctgtttttttctaactttttgccttctctctttcctcctgtcttgtaaaccaggcaaggtggtaggaggagggcagcaggagtagtagtggtcttattccttaggggaggcattgagggaaggctggragtggggggtcgagacttccttgctattctgggccataacattccacataatattataatagaatataattaatacaataatagttccccaccccacaccgggattcccagggcccactgccccactcctcctcctcaggctggccctcagctcagtgctcagccctgctgcacagcctctcctcctcctcctcaggctgcccctcagctcggagctcagccctgctgtgtggctctagcctggcgccctctgggcgttgacttcttctctgtggtctgggaggagatgtcgaggcccccgagggaggcggtggtgaaatcttggcttgcagcctccagcccgcccagagccagagtcaggcacgaggctagggcaactccgccccacccctcccccggggactggccctgcgttggacatttcttaacagcagggccaccaggcagagcgggacagccaggaggaagggcagcttggcagagcctcaggtagagtatcccggggaggctggggctgtagtgggccagcagtcgggccagagtccagctcagcaactccgggttacaggcagcccaggcgggcctagccaccggcagctgcactcagaggccactgtgtcctggctgagctcatctgcctgcctgctgggggagaaagcggaaggaggagaggcagatctggggagtggcagcgaggtcccgggcacccccctggccagcaggcacccttccgttgtccgagctgggttgccaccgcctccttttcctgggattcccggacaccctccaagggaaccaagggaacagctctgggtccagctgccccaggaaggactgtgcgccccttccccacaggggtcaagtatcccttccagcaacagccgtttcctgggcaccagcctgcatgcccagtgctgatgcagggatgtggccatgaatgactctgggaaagratcattcttagcaatggactttgtcagggtccaagaaaggagtggccagccagccccgccccgcctgcaggaggcacttctcatcccgggaactgtgccccatcagggagccgaggctgttcagcctctttgtgacccggggctgggttggcccgagccacmaatgaggggatacgctggtccctggctccccaagggaggggctgctgagctttgggaggcctcatgaaaatccagcttaaggccatcaaaagacaaaatgacaacacatttagttatagatcaaattggcttctattcatgattcgtgaatccggacagcctccattctacaaaatggagtgagagctcccaccaggcagtggcagagcagggggttcataaggcagaaaggaggaaacagaaaaataggaaacaccaaaccgcctaataccggatcgctgcagactgcttttttctaagcggactgcttttttctaaggggtaaggcagaggggacctgatgatgccggctcaggtggactggaatctcctgcttcccggagaaactggtctgtggttttgggctctgtctgcttccttaaagcttcggtttgatgatgtggcatttggcatgagtgcctccattttggtttggtctggtctgttggggcctagtacaggagctcagttcaaaatcacagcctctcatcatgtttgtttaatgaagctacactgcaggagatcagaatcggagaccctgcggtattgggcctgtgggtcccctgaagttggcctagtgatccccgccttctggctgccctgatgggggtcccccaggccctctacccaccatgttcagtccctctgtcaccacatccctgtcctcagttgggtctcagggtgatgtccttgtctccccaacacccaccttggatcaaggccccttcaggcccctgccccaggggtctcctccctgagccctcctctggtacatccgtcctccatggatactgagcacttcccggggtcccagtgcttgaattctcccgacagtggtatgggtgccacaggcagtgcccaattttacagatgggaaacgtgaatacaaagaggtcaagcaacctgcccaaggtctccccactcacacatgtggttgctgcagtttaaacccaggtcattgggcccccagaccatgccatgctgggaggatgctcttagaaggcccatggtgtagatgaggaaactgaggcaggaagaatgagagaacgggcagagcctccgtttccctggaatccaacccacttgataggccagggtgtgaacgagcagggagtccctgcccagggacggtccctgctgtgaggttgggggcagcggctcggccagccattcactccctgtgatatgtcagccccgttcctccccactctgttcccggagcctgtgggcacccacagcgagcacccaggctggcatagtgcccagcacatgggcacctgagtattgtttttagaggcccgtggccttgagaggaagtggctggtcctgccctggcccccaggccagaggaaacagccgctatcttcatcaccaaatgatgtggcaactcccccccaccccagaagctgcaggtctgggccaaatgcacctcaacctgtgatggggggccacgccccagagacccttgggcccatcagcccctggacctcagtggctcagccgcaggaggcaagaggcagtctcagaccccacaacctaagcagtgtggggagtggcagcaatagtgaggagggaggccgaggaaatggaatccaaacagcaasagacctcccctcaccggtcacccctcccacagctggcctaccggagtccacccagccttgggtctgccgtccaggccccagcccagtgtcccttcccccaaggacttggctgcccatccccaggggactgtgagggaggtgggagctgaggtggatagccttctgctcttctggatttgggttttccaatgtgaggagctgggtggtatcaggcaagctctggccctctctgagcctcagcctccatctccttcagtggggtgaatagtggtccctcagtgggcggccgtggtggtgaaatgagcgagggcaggcatggggatcacactccttacaacctcacactgtgggatgagtgccgcgggggtgggcttgggggaccccagcccagtgcctgattcaggagttccctattctgtgtgtccacaatggctgcccagcaccctcgggagataacaggcccaggatccccccaatctcaggcagaaggcggccttggcttctccgcttgccagggtcctgccctgggcactccctgggggcctcagtccagagtgagtgacccgtaggggcaatgccagggctggttgccctgtgggagagatgtgtcctgtggccctggtgagttggtttcagcgttgctaggagggttgctggaatgttccctgcagaactccatcccccacagagctcccggcccacagtccaccattcacgttacgtgccttgcatttttgtggtttctgcagagattcttacaaagggtgagagaggcacaggcgtggtttgcctttgaccactggcagaagtctgaaggtgagagtagaatggagaaggacccaggagagtgcggagttgagggagataaatatttgcaggctacttagcaaaacacccagagctgacctttgtcgagtactttctgtgggcacaacagcaaatgttttatgcagcgtgatgtcatttaatcctcacaatgacaccaggtgccattagcatccccatttcacagatgaggaaaccgaggcagagaaggtgagtgatttgcccaaggtcccacaaccagtaagaggcagagcccggagacaggcctgatggtggctcgagaggctcgttcttggctcctgggtctcagtcctgctcccgtgacgagccatcccctatggggaccatggtgcctgtcctgtgtgcgggccactgcccagcttctcccaatcagagcaggaagatggtgggttcagcctggccccacaatcactccagctgagggctggcctggggctcctgaccaggctctcagtagcacactggtccagcagggccatcctgcagaccggagcaggtcccgccctcaaggtggccacttaacaatcacccacagccttgcgctcaccgatgctgggccctgggctcagaaccgactgtgtggtctcatcaytagctggcaggtgccatcattacaccggtaacatgagaggcttcaagcactaggtctcaaataagtaggcacagaggggcctgcctcccagtctaatgagggggaaataagggagatgtggacagggttgggaggtgggtagagtgtaaccagacatttatcacatggcacaactcagaacgctggggarcagagtcaaggggccactgtgacagtggatgagggcataatctgggtgggctgcctggaggaagcatcagccaagctgagatctggaggaaagggactcggagagggaaggaggaaagggtcaccacgggtccttggcaccaggccgaggaacgagtgcgtcagagtgctcctccgatgaacttcaagtaaacaggcagggctcgggggaatgtctaggcccctaccctgcctgccagctctggctggcaccagcacggaggcaggaacgccctctcccccgccctgatcctctcccccacagctgtttctgcctcccagcaccacagccccggcagggtgggcagcagggcctccaggaggcccgaggtgttctccccctcttcctgaggaagctgaggcacagggagaagaggctattgcccactggcctggcctccctgggcagtgcccccaggctggggacagaggaagacggagaattctgtgtctggagtgctccaaggtggtggccatggtggcagtgagtcaccccctctactcatcaagctcctgcttacaccattcagactggcaggggtgaggctgccccgcctccaggaggggcatcagggcagggcagaggccatggcttkgggttaatttctgtgcggcaggaagaagcatggcgctctgcctgcctgctcaccctcgggggctgtggtggagcagctgtccccaagcccacacccagtcctgcagccgcctccaggtccatggcagaggggagtggtgcgagggtcttcatgtgtgtctgggagtgctcactgttgggtgaaaggggttgcaggcagcctcagtccctgtggggtcatctgagtgggtccctgtgtgtgtataaggtagaggtgtctgcaagcccctgtgggtgcaggcaggtcaggggtgcccagaccctggggcggctgggtggtgcccatgaaggaggggcagccctggccacccagttcatgccaccccatctggcaggatggacccccttggggacacgctgcggcgactgcgggaggccttccacgcggggcgcacrcggccagctgagttccgggctgcgcagctycaaggcctgggccgcttcctgcaagaaaacaagcagcttctgcacgacgcactggcccaggacctgcacaaggtgggctggggttggggktatgagagggtgcactggggcaggggggcatggagggcagctgggacagcaggggatgaagacacctgcgccctccatgaagcggggctaaaagcagctcctcccctaggccagagccacccttgcacattcatccagtcacttatttctgtattcatgcagcaactatttgctgagcacctactatgtgccaggtactgttctaggctctggggatatagcagagaataaaacacagttcccatgcctacgaagatgaccttctatcggagacaataaaacagcaaataaataattgcacagcaaggccgggcatggtggctcacacctgtagtcccagcactttgggaggccgaggtgggcggatcgcttgaggccaggagttcaagaccatcctggccaacatggcgaaaccccgtctctactaacaatacaaaaattagctggatgtggtggtgggcacctgtaatcccagctactcaggaggctgaggcatgagaatcgcttgaacctgggaggtggaggttgcagtgagccaaggtcacaccactgcactccagcttgggcaacacagtgagactccatctcaaaaataataataaagataataattacacagcatattgggttgaaatatgtgccctggagacacacccagggtgaaggggagagagggggccaggatcagggtgctgttgtatatgtgggggtcagggaaggtttctctgagaagggggctttagagcagagacrtgaagatggaggggaggctccccatggatgctggggagatggcagcgggcacagcacgtgcaaaggccctgaggcaggaggtgctgggtgtttctgcttgaggagcagcaaggaggccagcatagctgtcgggggtgggagaggaagaaacagcaaagatgaggtctggggtatgggccacactatgtagggcctcggaggccgtgaggccttggccttctctctgggtacagcaggcatcatggcctctgtctagaccctraaggcttggggcctcagcccctcccaatcccagtggcagccaaggcagaaccccaagaaacacacttcccccaacccctcacccatcagggcccatgcacctgcctgcccctgcctcaggacacctgcccctgcctcaggacaccacctgcccctgcctcagcacatctgccccaggggctgcccccggctcctattctctggacaaaatatctcctccctttgccttgaaggctgtagtgttcagaccttcccccagcccattgggctccctggggactgactcccccgccaccactgagcttctgccaccggcygcctgccggccttcatgagacttgacctgacgtctgtctggtcccttttctcccttcggctctgattccacctcctgccttcccatcccagctgcaggagcggggccctacaaaggcagcagtagcccagaacattcaacctggtccctccctctggacctggtcacycccctgtccccaccctcagcaggcagcatctgcccagcgtcacgtgcaccctctcagttaaccctttggtgaatctggttgggcaaccacacccagtggcccccagaagaggctcagagagagtgtgttcttgcccaagggcatgcagccaggaagagcagagccagagtttgaacctggctcaaaatagcccagtctcccaaagtcaggtcccaggtgacctaggaggtgtggcgggcaggccaccaggctcatggggccagagcacaggctgtgggaaagtccgtgtggaaggcaccttcscccagcctcagtggctaggaggtgccagtgggcgtggcgtcttcctccctcttggggctcagctgtagccctggccttgcccctggttcgctgagtgacctcaggcagggcatctccttctctgggcttcgctggtcctctggcccatccagcaccccactggcccgtccccctctgccctgacccgggagagcctgcaccccataacctcaggcgctgcctcagscagggagccagcctggccccagtgtccctgacctgttctccagcggcctgcagcctgctgcctggctggtctctcctcccttggggygcagagggcagggagcactggctagccgagagcaggacaatgtccctattgattcrggtctcctcactcctgcttagaagcctgacagtggccctggcccctgggctgtgggaactgacagcatttacctaggggtggctgtgcctgtgtctcctgtggaccaatctccaccctgctctttgggagactgaggtgggaggattgtttgaggccaggagttcaagacctacctaggcaacacagcaaggcactctgcaaaaaatcaaaacaaactttttttgaaattaaaaaaaaacaaaaccctaagtcagatcccatccctgctcttctcaggagtccttgcctggctgcctggccccctcaccttgcccactctgcttcttgctaaacaggagcagagcaagckcacagccacctcggggcctttgcagccgccagggcctctgcccaaagtatgccgcctcccagtacccacgacttgcttgttccttgmcttcaggtcactgctccaatgtgaccgccgcctggagacctgcactgaccgctttgtaaaaacagcacacacacacatgctcatgtggatgtatacatgtgcacacctgtgcacgcccacagccacacgctccagcagtctccacccccaccctgctccatgatttccctagcacagccacgtcctaatggagccgtcagcgttctcactttcacatggaacgactgccccctgcaaggtcggcctcagggccggtccctctgtttggcacagagacagcacctcacacaggaagcacgcactgaacatggagtgagtgagtgaacgaatgaatgaaaatgaatgaatgagttgyggaagcaggccctgcctggaggaggctgtgccctcctgccaactctgggaatcctggcccaccctgaccccacccacttcctgcagtcagccttcgagtcggaggtgtctgaggttgccatcagccagggcgaggtcaccctggccctcaggaacctccgggcctggatgaaggacgagcgtgtgcccaagaacctggtgagcyggccgggctgaggcgggcagggggctcaggggatatttgctcccacagggtggcccctctgggtgggagctggctgctgaggggccggggtgctgagcacttaatttcatccccggctcccggcccaggccacgcagctggactcygccttcatccggaaggagccctttggcctggtcctcatcattgcgccctggaactatccgctgaacctgacgctggtgcccctcgtgggagccctcgctgcaggtgagagctgggcctgccccttccggtcaccyttcyccgctcgaggcctcagggccacccatggatcccaggaggacatgggagaactggcccaggtggcaaagaggactgtctggtccaccgtccccgggctgtgtggccctgggcccgtcatgttacctctctgaaccaggttctgcatctgaaagtgggtgaggctgatgcctgccctgcaggtgtgtggagaccaggagctggctacgcctcctccagctctctccctgcactgccctgcagggaactgtgtggtgctgaagccatcggagattagcaagaacgtcgagaagatcctggccgaggtgctgccccaatacgtggaccaggtgagcagggctgccgggcaggtagagcgggaacaggcarggctcaagggctgggcagcccctggcatggaagggcctgtcagtcagacccgagtccccacctcaatcctgcctcttctgagttgtgtaaacttgaccaagtcaccgcccctgtcagcctcagtttccctctgaggagcagcgagggcagcctgttgcccaggggttccgtgtctgcctccacctggccctggcatcagcccctccagcgccagctggactccaagctgggcctgccaatgccagccaaccttggggagctcccttctccccactttgcctccacccaaccctcctagagccctggctgggtcaggccaggcggggtggaggcagggcagggtccaggcagggcgggctgctcccttgtgttctcggagctggggtcccagaaggagcctcacccatcccgccttgcagagctgctttgctgtggtgctgggcgggccccaggagacggggcagctgctagagcacaggttcgactacatcttcttcacaggtgaggccgggacgagggtcgggacaggctggggtcggggaggacagctgctcaggggtcctgtccctaactctgggagtccacagggagactgaattctcctctctctctctctctggaccaggctgggagcagtcctggacccccaggaccccttaggaagggatggagtcccatgtccagggccagcccactgtgccaaccacagcgtcaggaaccatagcctctgcccccactgtccccagaccctcatacgtgacccygctgccccccaggctcttagacaccaccctactggtgcccacagccctctctgcaggcagatgagggactgggcctcagtgtcctgcccagggtcaccctgctggccaggatggggacaggctggaatgtgcacacaagcccttggagaaatccacgccagaggtcactttttttttctttttttttgagacagagtcttgctctgtcacccaggcagtggcacaatcttggcacaatcttggctcactgcaacctctgcgcctcctgggttcaagtgatgctcatgcctcagcttcccaagtagctggggtgacaggcatgtaccaccacgcccggctaattttttgtatttttagtaaagacagggtctcactctgttgctcaggctggtctcgaactcttggcctcaaccagtcctcctgccttggtctcctaaagtgcagggatcacaggcatgagccaccacacccggcttcgagtttttgagctagggaggggcagagggagcgagaggaagacagtggtgctggcaggcgagtctgcgccttacaggtcgaggcagtcgtggggaagggcctggcaggattgacctggccgcctcccagcaaaggcaaaggagccctggaaggaaccacagagcccaggaagcactgtgccaggatggggcaggggtgagagtagagaaggcacagtggctcctgccggctttaatccttgaccacaagggggagaaatgccagggccatccccacagacgcagcagcgtggtccccragtcaggtctggagaggaggccttgaggcccagacagggctagggcagagaaggctgtgtgcatgcggagactgctgggcccctggaggccagcacagaggagaggtgaggccaagccaggcaggacatggggacgcctgcatcagcctgggacagtccacctcaagggtcagaaaaaaagggctgggcaggtggcagaacttccaggtttaggtttagagaagagagacctgaatgccgtagacagagctggactccatccttgggtgataagggatccccgaagtttccaaaggagatgggtggggaggggttccatgcagcattttgcaaagagtcccctgcagggtcagccagggtcacaagcagaggcgggaggagccaaggggtttggctcagcagggggaccctgggggccgatagcagccgtgcaccattccctcctgagactctgtgcttaggggctggtcctgatgaaggatgagcagggccctgggctgcagggtggcagtgaggaacaaggaaaggccaggcgagggctgctgcccgctgactccaccacctctccagggaggagcggggccgtgggctgggccatcccgcctggtccaggtcactgaacggccactctggtttccttccatgcccagggagccctcgtgtgggcaagattgttatgactgctgccgccaagcacctgacacctgtcaccctggagctggggggcaagaacccttgctacgtggacgacaactgcgacccccagaccgtggccaaccgcgtggcctggttccgctacttcaacgccggccagacctgcgtggcccccgactaygtcctatgcagccctgagatgcaggagaggctgctgcctgccctgcagagcaccatcacccgtttctatggcgacgacccccagagctccccaaacctgggccgcatcatcaaccagaaacagttccagcggctgcgggcattgctgggctgcggccgtgtggccattgggggccagagcgatgagagcgatcgctacatcggtgagtcctgctgcccctaccacagcccacctgggccaagacccctcctcactggagggcccaaggctgggccacaactctggacccgcgcctgaaacctggccccactgccagagcccggccttgagccacagctccagtgccatgattccgtctctgtgcttctaagtctgtggccctatgaggccaaactctggtccctcaccttggattygctgagctcagatcccagggctccagggctcagcrtgctaagatgaactcccatcccaccacyggctatcctgaaaggctgtaacctcagattctccgagcccacaatccccaggttctaaactccgagagtcccgtcctgagcccccagtctcctgggccgtacggctcagcagctcatgggacactgcggcgccaacattctgggacgctgttgcctcatgaactccaagggttctaagatcccatcacccctgactgtgagaccaaggtcgggggattctytgtgtcccacaggccctgagcaggctggggaagctctagagtcccttctggggggctgtggggagactttcttccctaaacactccaaagcctgaagccttgggaagtcagaccttgggatcctggcctagagccctggcctgtggccctgtccccacctctacccccacccctgggggcggtcctgactgtggccccagggctgagctgtctctggtgcctgcagcccccacggtgctggtggatgtgcaggagatggagcctgtgatgcaggaggagatcttcgggcccatcctgcccatcgtgaacgtgcagagcttggacgaggccatcgagttcatcaaccggcgggagaagcccctggccctgtacgccttctccaacagcagccaggtgggggtgcggcygggctgggcagggtcaggagcccgcagtgggcagyacaagtggtggcagcagggggggcaccaaaatccagtggcttcaggactttgggatggtggwcctcttggctctgtctctgcccactctcctggaagcagctgagcctcacccaccccaaccctgtccccagtctgggccccactctcctaggccttcagtgggcagcttcctggggtatgggccttctctagggtccagtgtttcctctaggtcagcccctgcctttgtccttcttacacatcggggcctggtggccacatgacccctcaagcctggctctgaaggcacaggcaacgtgtcggggatgacccaaaggtgcaggtccaagaatgagccctgatcccctacccctgcttaagctgcagaggcagcctggsaggcccaaggccagagtcctcagattaaaaaacaccaagaggtaccagcagtccctacccaccccgcccccttccccggccctcagccagttcctcgattccctccacttgaactttttttttttttttttgagacagagtctcactctgtcacccaggctggagtgcagtagcacagtctyggctcactgcaacctctgcctcccgggttcaagcgattctcctgcctcaacctcctgtgtagctgggattacaggcgtgtgccactatgcccggctaattctttgtatttttagtagagatggggttttgccacattggtcaggctagtcttgaactgctgacctcaggtgatccacctgcctcggcctcccaaagtgctgggattacagggatgagccaccgtgcccggccacttgaactttttttaaataaactttgtattgggaaatacttttagatttacagaaaagttgccaaaatggtacagagagttcccatgtaccccacacctaatttcccccatttaatggtgcttagatgggtcaaaactaaaaaagtgatggcagggctgggcgcggtggctcacacctgtaatctcagcactttgggaggccaaggtgggaggattgcttgagctcatgagtttgagaccagcgctggcaatatagcaaaaccccgtctctatgaaacatttttttaagattagttgcgcatagtggcgcacacctgtaatgccagctgctcgggaggctgaggtggaaggatctcctgacccataaaaaaaaaaaaaaagtgacagcagtgctttactattaactacactctagactttatttggattttgctgtttttccactgacatcctctttcggccccaggatccaagccagggtcccaccttgcattaataaccctctcagcttaaggagtgctggacaggtctcctgtagaacatccccagcctcaggtcatctggtgtatttctcatgattaaagaaaggttactggttttaggagagaatcccacagaggtgagcctgcctctcacaccacatctggggcacctgagatgcacacgtggctagtgagtggaaccttcactaccgggtcaggacggtatctgccagggtttccctgggaagctactattgtttgtttctttattatttggaagcaagtctctaagcctaccccaccctcaccaggtggaggtaattaagctgtatgctgctctatcatattgttagttattatctagttattttatacattcttttcttattccatttgtggtttggtggaattytgttgtattgccatttgatacctttctcttcctcctttgtatgattgttttatagggcctgtgagttttgtacttttgtgtgtattatggcaaataccaacttgtttttatgttaagactcctttgagcatttcttgcaggactgatctagtagtgataaattcccccagcctttgcttgtctgggaaaggctttatttcttcatctacgaagcatagtcttagctggataccgtattcttggctaacagcagtatctacatctatttcctggaattctgtaagaaagattcatctcttgaattgtttatttaggtcactacggactcaggtatatttatttgactccaggggctgtaatccaaggtcgtgtggtttgtctgaggctcgggctcagaagcccatgtaagatgtcccagcctcttgggttgtgaccacctccttcccctctggtgctacaagcagctccaggctcatcttgtatctcccctgctccaactccagaagcagccattccttcaaggagccctgcttcatctggatactttcacctttagaaaactctacagaggttttttgacagtggagtcatctggcttcaaacttttctgaccacccagaactgatcccaggacacacagtcacacctaagacacaagtcatgcacaaggtggcttgcccgtactacctgggacgccctctgctgccttctgctccatctcctccatctgctgccactgccattgtgggtaatgctggtctcatgccatgaagtgacgtctgaatccactgggggcagtccgctttccccacatcagacaagccctgacccagctgtgatcagaggttcacggtgattgcaactaaatatactgaagtttttstgcagcaactatttagtgtctaccaatctttttttcctttcagtcttcaaataagtctacagattgaggaagaaggtccttctcaaggaccttcaagcaagggccaagcttctgtttctaaagtgcaaatctgaccacatcattatgttttcatgtccctgtgytcacaccacacagctcttcagcctccactctgtctgcagtgccctctttgcctgaacaacttctgtccctcccagtccctccactcagcaggcacatgacacccctctcctgggatgcctccctactgtccagtactgccctgctgccaytacaccctccatgtccccaagcaacactaggtttcctgcccctacccccagccctaagagtctgtgccatcagcatggaccacacatgagcagatgtccaggaaacatgtcccaagttggaagcttcatgaggagctgctacacaaccccctgccccacctgtaccatcacaggcccttcagctgacatggtggcctcagaccctttctgaggcaagatcagtgtcacagagtccagcayggaacaggctctgggtcctgaggatcctgatggggctcaaggcrgcctcacgcacatcctgttctctcccaggtggtcaagcgggtgctgacccagaccagcagygggggcttctgtgggaacgacggcttcatgcacatgaccctggccagcctgccttttggaggagtgggtaggtgcctgctaccctgcccttctgttaccatttggtcaaattgcaatagtgttacctgcatacatttctgccaaagcaccccagccccacctcaatgtagagggacaggcaaggaggcctcaccccagaacccgcatcctgctccccaccccagagggtctgagtccaatctgggcaacacagtaagaccccatctcaaaaaaaagtctgtggtggaaccttctagaccatctctgcacagacacacaatttagtgaatttttaaaaataccacacaactatgatcacactgcccactgcgatgctatttgctcttctccccaacagcatgacctggtgtctgcccctcagcagcaatgccgccggtgtcctttactccagggcagctgctcctctaaccccatcccccctccagctctcagtacracacctccccaccctgagaggcccggatgagtgccaatcctccaccccccagagcagccccgatgccactgcagagtcctggcctctgagtcaggaagcctcagagatggtcctagcaacacgctgaaggccctgtggcccaggtgacatctcccctttctgagcccacttcctcctcagagaacagtaggccccgagcaggtgacaggcagtcccgccacctgtccacactcagcaccacagtgaacgatggcagggccaggcaagctgcctcaggtgggtccatgcccttcctggagggcagccaggggcacaacagtgcctgtgctgctgtcctggctcggctcgagtttgggcggctgcccccgaccccacctagctgcctccccagccccagccccagcctcctcaacccgcctccctgccctggaggagagtcggggctgtctgtgggcacatctgaccctgctgctccctcaagaaagcctcccccagctcccaggcccccgagctgacmcttcttggtggccgtggccccaccccggcttccccacctgctgctcccacagcctgagctctgcccaggtccctaacacaccgcatggcacccacctctaaggctccccaagcctgggtcyctcttgcccccacccactctcttcgtcttattaactgcatatccttggagctcactcactgcaggaagccccccagccaaccccactccacccaggctgtgctctgaacgccctggcctggggcctcgtctgcctcccaacctagacgctgaggagagttcactgcacatagcacctactgggtccaggggtctcaacatcccctcaatccccaccacaaccttaggagggaggtacccttgtcaccccacgacagaggagactgaggcacagtccaaggtgacatggattgtttgcagcagggccagagtttaacccccggcagtctgactctggaatccatgcccttgaccaccaccygcctatcttgccctggcatctggcatccccagggcttactgagctggtgccaagctcggggcyaagccctttacacacagtgcctcatgatcagcccactggacagatggggaaactgaggctcagaggggagaagtagcccgcctaggccccactgtctgtgactaggagacccccagcgcctgaccacctgtgttctgtgccactgtacaggtgccagtgggatgggccggtaccatggcaagttctccttcgacaccttctcccaccatcgcgcctgcctcctgcgcagcccrgggatggagaagctcaacgccctccgctacccgccgcaatcgccgcgccgcctraggatgctgctggtggccatggaggcccaaggctgcagctgcacactgctctgagcccttccccaggcccaggctgtagaccaccatgacagctgtcgcctgcggctggtggagacggggcctgggctcccgggcccgaggaggaaaaggattgccaaggctccagggcacccctcaaagcagcgcctgcctcctccctcctgggtcttccctctccctgcctcagcctcctccctcagccgctcccaaccatgagagccraggtgggaggcatgggaaacagtgcagtgactcaccccctgcccccgcaccaaccacccatattcaggagaagaggacagacacggcacctctgagtcacccctctcctgtggagcgggcgtccgaggggccctggcatctgactcaggccacaccatggaatcactgcatccaaggccattcctgccctctctgagtctcagtttttccatttgttcagtggagagaattaaccattgatacctcctggctgggtgaggcggctcacacctgtaatcccagcactttgggaggccgaggcaggcggatcacctgaaatcaggagttcaagatcagcctggctaacatggcgaaaccccgtctctactaaaaatacaaaaattagcctggcgtggtggcgcatgcctgtaatcccagctactcaggaggctaaggcaggagaatcgcttgaacccgggaggtggaggttgccgtgagctgagattgcgtcactgaactccggcctgggtgacagaaggaggctctgccttaaaaaaaaaaaaaaaaaaacctcctgggactgttgcaaggatgaaatgaaggattgagggattgagggattgctgagctggagctccaggtgtcctatctttctcagtggggtggcacggagcggggccgcctccctcttctctccaggcaggtggggctgtggttatgcgatagggtctcccttccctccagcccatgccagaggagcttgtaactctttatcctcatggtgcccactacgagtcatactcttccccatgctgctcatcctcctgggccccatccactcagccaaagcagaatgcagggtttcctgcctgacaacccttctcacctcccaagtcccacttttgaacaagctgatgattctgaaactggcccaatttcctaacaagccggatgcttgagaaacctacatttggacaatgagaggctgctcctgcggcctgcgggccacctcctcttccttggctcctgctttcttttyagactatatcaacctacaactttagtcgggaagagggacaggggtggacctgagtttcgtctcctgtctctctggctgatgtcacctgaataaagccttcttccctggcaatacttacatctcagtgatttgctttctgtgcatctagcaacaggactctggaccaaggccctggcgttgggtaacaattctgtaatgctgcaggacttccccaatccacgcaggaatccccgcaggcatccacgcaggaatcacctgatgaagggccagggtcaggtgtgggccaccatcccaagacctcccttctctctagggccagcccctctcctctgagcacctgctgaccagcccaaagccctctccactcctcagcttgaactcccccagggtctccctgtggcccacaggtcctttggaggctcgggcatctgcatgcaaatcccaaaccactgtcccctttgcacacactgagcctgcccttgtcctcgtcctggtctaccatgcgtgtcctccctctgcacgggcatgggacatgccctctgcctccttcctgtcctggcctgcccaactcctacctaccctcagcgcagatcctcccaacacacacatgcaggcagcctcggggcctctgcgggtccctctaccacagcattcccggggaaaggcccggcgtggtggctcacgcctgtaatcccagcactttggcaggccgaggcaggaggatcgcctgagtccaggagttccagaccagcctgggcaacatggcgagaccccgtctctacaaaaaatacaaaaattagccgagcctggtggtggcaggcgactgtggttccagctgctcgggaggctgagaagtgaggatcacccgagcctgggaggtcgaggctgcagtgagccgagatcgcaccactgcattccagcctgagccacagagccagattgtctcaaaaaaaaaaaaaaaaaaaaaaaaaaaaaaaattcgctggtaggaaacataggctggttgagtacgggagtcatacagatcaggtggatcaggcggccgcacaccgcagctctacggcccgggaacgttactaaatactcccatgcctcagcttcccgccttaacgtggtaacacgttactgtagtttctccacgcagagctgctgtgaggattaaaagaggccgcgtgagttgagcatctcgtcgccattaccgtcatcacacgccccccacccaacccggcgggcccaccctctgcacccacggcgaaagcactctttctaaaccacgccccggatgtcccgcctccagcggctcggaggtcttcacttattggcctccccaaaccaacatggcggccccctacaaacttcaagcgccggtctctcctagccaatcaaaagaaagatatttctgaatcccgcctctttcagcagccttgctggccaatcagaccacaccatgaagcatcaatacagaaaagggggaacccgctggcccaatggcagcgtcctacagtgtagcctccgcctcccgattgactggcctgcttggcaaggcaagtagcggcggcgcttcaaggtgggtgttcacgttttggccgtgaaagtcgggcttgggcagcgtggcgtcgggggcgagtgtggtgtccccgttggcgccgccagctctgcgcctgggcttcccctcggctcactcaggatccgcggcctccgtgtccttcaggtgcagcggggagccggctctcagggcgcatgcgccgcccgctctgcgccaccggcctagttagggtcggagatcactgggaaggtggggaaggtgctgggttgggtccctggaactgcagtcagtgatccaaaggagtgggcctgttagggggttcacaggtcgtgggatgagctcttatgagcgccggctaagtgccgggctctggggtgcccttggcatgtacgggctcccctaattcccaagaccaaccgcccccaacccacttcataggtgagaagacggaggtcaggtcacatcatctgcccaaggtcacgcggcaggctgggggacagttccaggagggccttgaagctggggaaaggaatgtggtaccgaggactgttcaggccttgaagagtttccagcagggcagggctgggttccgatcctcggcccacctccttatcgtgtgacttccgacaagtcacttttttatcttttttttgagacaaggtctcactctgtcgcccaggttggagggcagtggtgcagtctgggctcactgcaacttctgcctcctgggttcaagcgattctcctacctcaacctcccgagtagctgggattataagtgcccaccaccacacctggctaatttctgtattttttggtagggacggggttccaccatgttagccaggctggtctcaaactcctgacctcaggtgatccacctgcctcagcctcccaaagtgctgggattacaggcgtgagccaccacacccagccctagcgagtcactcaacaaactgagtcccagcgccttatttgtgcctccctcgtggagtccttgtaaggataggatggcagcgctttccacccctgggcacggttcctgggggaggagagctaacaaagttcgctctcagtgcatgctggcgggggctggtaatgttgtttttggttagatttggggaggatgaagggaggagcagaaaggtgggaaacaggatctctgggagggagaaaggaaggatggatttaaaaggtttcttaggtgaggcagaacttggggtccacagaaactgaattgtagctcagccaagctgaatcagatggaaagctgggaggcgctgggaacaggaaagccatctgtgcctctgacagcaatggggtgcgagtagagggcaaagtgacacatgtcagtggagacttgggatccttgcggtgccagtctcagaagaggatggttcttgggcacaccccaccctccatccctttttatgccaccagatgcgctgcctgaccacgcctatgctgctgcgggccctggcccaggctgcacgtgcaggtaggaccaaagaagcctttgctgggggtaggggagtccagtctcctggtatgaggtcacgcccttctttttgcaggacctcctggtggccggagcctccacagcagtgcagtggcagccacctacagtgagtacctgggtggcctctagcctcaggtgttcctgactggtcctgctggagtaggggaagagacctgagttccagtcctggctttgtcaggggcgttcttctctgagcctgtttccacttttaaaatgattatggtgatggagactgactctgattcacaggggcagggtccatcattgccgaggttagcatgtgtgatctcagagctccctgggtgtgatggggagggggttgccaggtgtgagccatgggtacctgtgcctattgccagtccctggtgaaggcaaaggctcaagccccccacctaccccccttgattcctctttcaagccctgttgggcagggaagtgcgtctgggctccaatggccacccaagcacagggagaggtaggcacggacgggctcaggccagaggcggcctccagggtccttgctgaggctggggagaggtgtggtgagtgtacagcccctttgtagcccagcagttgcacctggaagtgagggccaggctgctctccctgaggctccagggagacagtgtgtgaggcctcttgccatggcctccctgcccgcctctctgcagagtatgtgaacatgcaggatcccgagatggacatgaagtcagtgactgaccgggcagcccgcaccctgctgtggactgagctcttccgaggtgcgtcctgggcaggaggggacagggaaggtgccgggtgggcacggatgcatgggggaggagggtgcccctgcccaccacacccgtgctgcccacaggcctgggcatgaccctgagctacctgttccgggaaccggccaccatcaactacccgttcgagaagggcccgctgagccctcgcttccgtggggagcatgcgctgcgccggtacccatccggggaggagcgttgcattgcctgcaagctctgcgaggccatctgccccgcccaggtgagcccctgccccaaccggccaccacgccagcccctgccactgggagagggaggccaggcagccctaggcccaaaccctagcccctgcttgatgtgcgtccccaggaagtccctttccccctctgagccacttccctcgtgaatgggaatgatgagggcttgttaccagagcacagagtcagtgagttggcagagtgaagcttccagccctgggcaggcgcctgacacacagaggttcccccttggggtctggccaagggtgtgacccctgggcctctgagccatggggtgacacctgaggccatccacgcctccctggatgtagccaccgtttccggagtcctgcttgtgtgcctgttgcagcttcccttccccagtggctgctcccctgaggcccggctttccgttctcttagtgggtctcgtgcttacccgtgggggccaggcctgccagcacgggaacaatatgactcggtcagagctctggtcagacccctgtgtgtgcctggcaggagccccggcagccgccgtcgctactttctgtgtgcacagcaacccctcccagtgttctgtgactcgggtggctcctgtccagatcctagtttgtcctctggagcactcccaggtcctccaggccatgagctgcggccctgatgtctctactccagccacggactgagagtgcataggagtgtccccaaacagcagtcacgatggtcacaaccttggcttccagacagtgagtgctgtccacagacagacccgttgctgtgccatgtgtgtgactcacagcctctcctgtaatctccacaacccctcgaggaggtcgaggttattgtctccatctttataagcactaaaggatgagcctgccagccacaggtcccactgtgagttgtggacactacatttctgggatgggggcatatgagagtccttgccaagcacatttgaaggttttcccagccagcccctcccccagcgggctacccaggaactgagagttaggacgtgcccttgagtttgggctgtgcccccacttgctgtgtagctttggggagcccctcaacctctcggaaccttgtttttctcatccatcaaatggagagaagtagatttaaggcacaggattgcacccaacagtgtaggcattcttggcgatgttgcaggttcggctccagaccatcggggtaaactgagtcacacagctgttttggttttccagtgcatttaaaagttagatttagaccgggcacagtggctcatgcctgtaattccagcactttgagaagccgaggtgggcggatcacttgaggtcaagagttcgagaccagcctggccaacatagtgaaaccccgtctctactaaaaataacaaaacttagccgggcacgttggcaggtccctgtaatctcagctacttgctaggctgaggcacgataatcacttgaaccgggaggtgggggttgcagtgagccaaaattgaaaaaaaaaaaaaaaattagggccggttgcggtggctcacgcctgtaatcccagcactttgggaggccaaggtgggcggatcacaaggtcaggaattcaagaccagcctggccaacatgttgaaaccccgtctctagtaaaaatacaaaaattagccgggtgtggggttgcacacctgtagtcccagctactcaagaggctgaggcaggagaattgcttgaacctgggaggcggaggttgcagtgaactatgattgcaccaccatactccatcctgggccacagagcaagacttcgtctcaaaaaaaaaaaaaggatttacactgtactgtaggctgcgaagtgtctaaaacacaatgtatataccttaattaaaaatactttaggggccaggcacagtggctcacacctgtagtccaagtgctttgggaggtcaaggtgaggggattacttgagcccaggagtttgagaccagcctgggcaacatggcaaaaccccgactctacaac

SEQ ID NO: 94714 - DNA, 12531 bp, Homo sapiens
tcacggagcttatattcagagggaagaaagccacttagcaggacaaagagctaaaatggatagtacagtgtgttgagaggtaacacacatgacagaaaagataaggtatggggccaggcacggtggctcacacctgtaatgccagcactttgggaggccgaggtgggcggatcacctgaggtcaggagtttgagaccaggctggccaacatggtgaaaccccgtctctactaaaaataaaaataaattaaaaaaaaaacagccaggcgtggtggtgggcgcctgtaatcccagctactcgggaggctgaggcaggagaattgcttgaacccaggagacagaggttacagtgagctgacacagtgccactgcactccagcctccatgacagagtgagactccatctcaaaaaagaagaaagaaaatgtctaaaagctgcttggcctgtcccctggactgttgtctggaagaaaggtgatgcctgcaggcattcttgctgtggagtgcactggatgtcccaagttggacatgcctttggaaaggcctctgccctgcctcagtaacattccctccttgagtacccttgttttctatcccaggacatcctctttgatgcgaatacacacaaagtgaagaagtttgttctacacaccaattaccctgggcattataatttcaacatgtgagtacacctgtctgtacctcccctctgtgaagtgagttttgggctgaaaaccccaggaaagagcttttggctttgggtgttcactaatttatctacacctgaattcttgctgtttcatgggaagtgaatttcctgagtgcttgctgtgttcctggcacagggtccaatgccttacatctctctgtttgaacccattttacaaatagggaaataagttcagaaagcttgatgtcttatccaaggtaataggctctccagaacccagggccaagatcttttctgttcgacttccgtgcctaaatctggcctcccccagtgaacactgtcaggcactcagagccagggctttgggcaggtgtgtttggttctgtttctcctggggtgtggggttggaatatgggagtggccaggccttctaggaggcccagcctttacccatttgccttctctctagttatcatcgctgtgagttcaagatcccactagccataaagaaaggtgagtagtgaaagctctcagggtaagggaggggttttagagtctgttttccactatgaaaagggagaaagatcgaagcagtggttggatgtgtggagcttctgcccatggcctcagttcctctggggtgggctcattgttctgggggctgcagtgttcttggtctgagtctcctagaggcccttgaggcctcttcctatgactgtgggattgccggcctctggaggggagagtttcttatctacagatgatcatccagggggccccagcccatccttgttgcctgccacccactgccaattgttgttgctcacacctgactgacctcccttcacccctccatcctcttccaccctggaactccaaaacagcctgttaatcctccccatgtactccaaccccagtgcaaagggacaccaggtctggttcctacctagggctggggccacaggtaggctgggccagctacaaatctgccccactgtcttctcttttcagaaaacgcagatggtcagacagaaacatgcacgacctacagcaaggtgagcacctatcttcctacctggcatagcctgagaatgaggtggacatgagcctgcaggcagtatggggctgtgtcctctaggccagccattggtcacagacatgttcatgtccctactaacccctgctcccctctatccctcttgcagtgggacaacatccaggagctcctgggccaccctgtggagaagcctgttgtcctgcacaggtgagtgggagtttgatgtccccggccaccccacctgactcctcagagcccagaaagcccagggaagcctggcacagtggatgttgcttaaaaattacagaagtttctgatattgccacaagcatacttcctgccccactctgcacattaggactgagtcaactgttctgtgtgttcatctttgatagagagaatgtccccaggggtagctcccctctcccaagcctacctctaggtatgggggccttctcaccctcagttattcaataaggaaggagggcttggctggctggcctgggctctttttccctttgagctttgagctgctgcctgctgaagtccacagccccgttcctggttgccatgctgcctgagattctctcactcaagagggccctcttgactcctcgccaccctagtccagttccacagtaacttttttgtcctgttgggctctgtatgtataattctgagttgagtgagaccatccctacccctaggatcttgcaggcctgtgtgggaaacagacagacactcacagccatgagagactactggccagtatcccataccccagaaaagactggatcccttgctttaaggccgtggcctctgtctgcctctctaattctgaattctttggcctcaggtcttcctccccaaacaacaccaacccatttggttccacattctgctttggtcttcagcgaatgatctttgaggtaagctgtggaagccctagaaataaactgcctggggggttgctggtcatggcagggccaggtgaatgatggagggaaattggggagggcatcactgccatagtgggcagattcatccttcttcagcaaccgtgtctgctgcatacctggcctccccacacttaacaatgaaggttcagaaatgatgttgagaaatctggggtcacagaggccgaagcagtggtctgtgtccaacaagatgggaggtaacggatcccaagtttctatctgacaacatgattatagcagggaagggaaccacagggcaagtggggcccagcagagggtgttgggggccctccagtggcatgtgaacaaatgcattgtaggggagtgagtggctctggaggccctgctgacttgggagaacagcaagctgcccttgttttccctgtggatgcagtatctccagcagacacttaacagttccagaaggactggacacgtggccatggtaaaggctgtgtgtaaccattgagaaacaggcagatctcaggcagaggggggcctttagcatgaaccaggggaggttgaggagtcgggaaacccagccattaggtgcaggtatgtcacacaacctccagccctcatgcacaggatctgcctacatccctttacctctcccccttgacccactgtcctcttctcacaccaggtcatgcagaacaaccacattgcctcggtgaccctgtatggcccccccaggcctggtagccacctgagaacagcggaactcccctagggacaccaccacccatgcccctctgtcccgtggaactgtgcatcacatcctgctcagtgggcctctgtaccaccctgtgggttttcttggacacctggccagtgctgaagggctgttgtgatgttctgaggttgggctcaggctgggtgctctgccatgggctgagtggcccagatattcttctgtccatctttggcctgctggtgccagcaggggacacagactgcaaagagaagcacaaagtttgagccttgattcctggacccaggagctctcaactaacaaggaggcaggagaggtcaacccttgtcccatgcacattgggaagacttggggctctttctgtgactgaggacacaggcacccaggataaggacaaggtcctgcctttggctccacattgccacatgacccttaaggcaagcaggtagcgtgtccatagtacttggttgcgacatttgcactacatccactttagttacttgatgagctggctgtggccagggtggcccacctgcccttccctgttcctttcttgcacgcgctccctgcctgggcacaccaaactggttgaaacacagctttctaccatccaggtacatgcccaggcctggttctcacccctgttggagtcagctttcaagattgcctgtgcccctgctctgccccatcctggctggcagggctgcatgtttccatcctgtttgcctcttttatttaatgccaaagttttagccaaagacatcttcctacttttgttgtgtttcagcattctgttctgcactgtgggctggctctctgccccaaccctgggcactggcccctggctgggccatttcatggctcaaagcctctgggggctcaaggaaggctgggctgctcagtcccttcatgggtcttgctaatggaaagtagcatatatgtgctttaaaaatattaatccttttgaaaagaactgagaagaaaaatgtataattttatcccatttttaatattttggtctagcaacttgtgatacatagatgacaattttgtgagtttttcaaatgtgtgtacagatttttgtaaatatgactcttttgtaattaactcatgtacagcctcatcctgtatagtttaatgatgaatgtgcaggggacctgtctcaggctcctatatggttcctgggccttatagccaggtttgtgtggcgctcccgacttttgtgactgactggtgtcttcccatttggactgtggcctggccagagccccttgcatatccccactgtcaggggcagccaggactgttcccatcctcctggaatgggggaaccttccttatcccctgcccacatcccctctccaataaagcacctgtgccctcagcaatggcctgccatgtgctgttgctgggatgtttgtattaaggtaagtgtgggtattggttttttgagcaagggggtggttgaagcatatggggaaattaatagtggtggcatctcaggggaagacattccttggctcctctgaggggatacagcctccagtgggagactggcattgttgtgtgagttcaggaggtgaggaaagactaggtaggaccgtgcactcatttgtcccttatgtgtggctccatccctggtgctcagccacacctgggcccaggagaggttgtgggaagcataatatctgttttcagatgagctatggcaaagtgcctgccaggttcatgaattcaggctgtggcggccggagcccctccacctccctgtggggcctggccttgagagcctctgcatacgtccgcgtcagcctagggggttccaaatccagcagagtggtaggattccctaagtccctgccaccacaccagaacacacctctgtgctactaggaggaccagacatatccactgctctgggacctgttggacaagagatggtcatctaccacccagccttggctcgctcaaagggtcaccattacacgggtttcaactggttccagcagggtggaccgccaggagccaagcttaacccccatcccctgggatcctgtggagacaggcacctggtgatcagggaagaaccacatacacggcaataatctgggaaaccggctccattctgggtctgagttaggagcttggggctgtagtggggagctaggagtcccattggaaggggcctgcagcgacaggctgtggatgcgcacaggctggcccatgcggcccgtgcagcaggcgccacataagccagatgtcagcggccgagagcccgtgcactacaaccagctcacggtaaaagcaggggtcgaaggtgctcaaatgcggcgcggctgaaggctgggggatgccaaaggtgcggaaggcagggtgaggctcgggcgtgagccgcaggcgctgcagacacatgcccagaaagacgtcgtcgatggggaagagctcgacctgcgcacaggcgccagccaggcggtgcagcgtggccccggaaagcacaaagccaccgccgcccgcgtaggccggataggcgggcaggccgtacacggcctcggggatgtagtacttgctagcccgcgtgcggatgggccgcgcatgcacaattacgtcaccagcaagcaggtcttgcgccgggtcccgcggcgccaggaactccaggagatttcccacgttcacgaacacatctgcgtcgcccttaaaaacgaagcgcacgtcggggcagaaagctgaggcccaggctagaaagtggatctccttgagcgttaggttaaaaaaggtgtcgtcgaaggsccagagcaggatgtccgcatacgcaaggctctcggcccgcagcagggcgcgccagtgggttcgcgcgccctccccaacttcgtcggccccgcccgagcctgcgcccctgggcacgcccagcaagaacacgcggcgcaccagcgcyccctgcacgcgaccctccgcgccccacgtctggcgcacggcttggcgccgctcgaagtcctctgccaccgacttgacagcaataagcaggtccgggcggccaccgggtgcgccgtcgccgcggcacttgtgcggctggttaatgagcagtggaaaccgccgctggtccttggcgcgcaaatagcgggcgaagtcaaagggtcccgtaggcgtgggcggcgccggtgtgtccccttcgtaggccggcggggctgcacccgcgtcgggtaactggaacgcgcggggtccgggggtgggcctcggtgccgccctccctcgccctcgcggcgcgctcgccgtcggggccgcgccgtcgcgctgcgcatagagtaagaggcccagggaggcgccaaggagcagcgtgagcaatgcgtccctgcgtaggcgcagcctcctcctcatctccgcgcggcctgcgccctccctcccctgtaagggtcgcagtcggcagcagggggcagcgagccccgccctccccagctgagggggcgggaggccacgccccggggggggctccagcgaccgacggttgagccccttgcgttgttctcctcctcccggccgtgtcgcaccgccgggaccggcagcctgaagggacaagaagttcacccatgtagccaactcccccgcggcctcagctccggcccaggactgcgacccagggccgggcagggagactgggagcctcggcccctcccccgcccgcctccctcgcgctgaggccgaatcccttccaccctgccatcccctcaatgtcgggccctggggtcccgacactcacgctcggccctcggaagtggcgcagccccggacgccctggcctccggggctcagcgcagggtccgaggggccgccatggaccgggcccgagccaaatgcagcgttggcaggaagggggaccggtgccgtgccacgtgaccctccagctgtgcgcgcccagacttctggagctcagctccgccccggcgccaggagcactccggcctcagagtggggactaatccctgagagggagcctcctcactctcagtccctctgggaagggctggtctgggtgctcacaccccaaattcgcctttctggggattgggaagaagcatcaactcccctggttagctcccccaactatccactccccactcccgcgtctctggagtggggcggagcctgggctgctaggagcccctgagcaggccggttccaaatgcgcatgaacctggccaccatcccgggcgggcctctcctcagcagccctgattccatcaggcagggtgcatacgctgcccccgagacacatggctgtcttcttactcctggttctgccatgctccccacccccagtaaacacacgcacgggacaaacaaggcagcccacccaatcctcagggcaactctgccagcagctctcattcatgcccagatggggacactggggggctcttcggggagttaagtgacttgcccaggatccaaaggccagaaagctctgcccccaggtcttctgaaattcaggccaggattattttatctgtccttgccccgctcattcatccactgggatacagaacagggggccaacccagtctgctttaatttcacaggcaagcacttcagcctgtctccccgggggctaatggacctgagcccaagccaggtgcagttctgagtcccctggtccccagcatagcctactgcaggtagaaatgatcaggcctgtgcagctgcaggtcagacagggctggcaaggatggggacagcttgggaagactcctggcggaggccttggctaaaggattgctctgggatgcaggtggacagaggtgctctgcaatggagagctaagtccttgcgcagctcagctgccagctctctctttcttggtcccagcccatgtggtggagcctggaatagacagcctctactggtctcttaagaacccagccccatcctctgtccaagggctatatctgctcctgacggcttcttcccaccaatgttcaatcttaaaaagccacctctctggctgggtgtggtggcttatgcctgtaacctcaacactttgggaggctgaggtgagtggatcacttgaggtcaggaagtcaagaccagcctggccaacgtggtgaaacccccatctctactaaaaatacaaaaattagctagacatggtggtgggcacctgtaatcccagctacttagagggctgaggcaggagaattgcttgaacctggaaggtggaggttgcagtgagccaagaacacaccactgcactccatcctgggcaacagagcgagactgtctcaaaaaaaaaaaaaggccagtcgtggtggcttactcctgtaatcccaacactttgggaggccaaggcaggtggatcacttgaggccaggagtttgagaccagcctggccaacatggagaaaccctgtctctattaaaaatacaaaaattagccaggtatggtggcacgtgcctgtaatcccaggtacttgggaggctgaggcaggaaaatcacttgaacccgggagacgaaggctgcaatgagccgagatcgtgccactgcactccaacctggcaacagagtgagactctctccaaaaaaaaaaaaaaaaaaaaaagccaaatctccaccctgagccttactctttttggtcacaaagtaatcaggagtcctctgctccagctttctccgcggcctcaccttccattccctcctgtgataaagcttcgggctgcctccaccatgactcagaaagacccctgactggtaagctccttttaactgagtccaacagacactcctcggtcttgactacccgctccattatagtgggtgggtaatcccctggtttccaaatctcctggttttcctccttcctctttggctgttcccattctggttggtgtccttcaggacatcccctggggccaccccacccactccccacctgtctattcatcaatctttagattgaaccctcatcctgaactcagaactacagacccaactaccctcatactctctccccggatgcactgcaggaacatcatgctcaacttgtcccaaacagagcaagcatttcatttccccccagggccccatcccagcaagcagtcccacccaccatccaactggcaaaggcagaaacttggggccctctctcagccattcctcacccagtgtcaccaggcctgttactcttccacccacacagctctttggtggtcatccccttccctccatctctgctgctactgccccagcctggggccaccatttcccccacccccatcctcatcaacctcccagtcttggccaggtgcggtggcacatgcctgtaatcccagcactttgggagaccaaggtgggtggatcacctgaggtcaggagtttgagaccagcctgaccaacatggagaaaccccatctctactaaaaatacaaaattagctgggcatggtggtgggcgcctgtaatcccagctacttgggaggctgaaacaggagaattgcttgaacccaggaggtggaggttgcagtgagccaaaaacgtgccattacactacagcctgggaaataagagtgaagctccatctgaaaaaaaattaaaattaaaaaaaaaaaaaaaacaaccacctcccagtcttaactcccgaaactcttcaaaggcttcctactggcctcattgaaaaacccacaagccttcctcaagcccttgcctgagactgtgccccgaacactgcccttctctcgatagcccacccctatgcctactcacactcatctcctccaggaagcctaccccctgtcccctgcccaggttaggccccttcctccatcctccacaacttctctttttttttctttctttttttttttttttttttgagacagggtctcactctgtcacccaggctggagtgcagtagctcagtgacatctcactgcagcctcaaccttccatgctccagggatcctcccacctcagcctcctaagtggctgggactacccaggctggtctcaaactcctgagctcaagcaatcctcctatctctgtctcccaaattgttgggattacaggtgtaagccactactacttgtatttctcacatcaaaatccgtgttatactttattatcattgcttaacattcggggtcccacgctgagtgtgagctgggggcaggcaagattgattcctgttttacttcactgcagtatctgcagcacccaggatgaagtccaggacaccaaagatcaaggtgcttcatgagtgaaactgtaagggctggctgtaagccccgcttctgggatgggagaaggtgaggctgatctccaaagcaggtcccccccaccccacactctatcaaagtacctgaggcagaatccccaatgatgcacccccagtggtctggctcctggggaaggcaatcaactctgccccagcaggtccagcagataggccaagtggagtttcagggtcccgtggatggacaggggttcagcaatagccgcagaaggaaccctaaggccatccaggttctccaaaagctggctgcacccctggtctaggccaggccgccattgggatcggtcaggcccagcaagtcctctgccaggctggtgagctcgttctcctcgagtgcctccaccaggcgctgcagcgtggcgcggcggccctcggcctgcacgaagcgccgcagcagctggaaggcctgctcgtacagtccctcgcgctcgtactcgtaggccagcgagtccagcgccgggtcccgcagcgcccggcagcctcgctgcagtgagcgccccaccttgcgccatttgagacccacagagcgcgcgaacgtctgttggtccttcaggctcagcggccgattcactgcagagggagtggggaaacggggtgagggcggggacccccagcgccggtcccacccatccccacccggcaacgacccctgcccctccccagactccaacctcctggtgaccccgcctctccacctgcgcctcacctacaggctgaccctggaacagaaaagtctgggcaggtggcggcggcggcggcggcttcacctccgacagagagggcaccgggggctgcaagggggccgaagcgacctccccgtcgccaccccgggcccccgagccgcacttcagatttcgcagcgcatcctccagctcagccagttcttcatcccggagccggtcgggctaggggaatggaacgtgccgtcacgggggacttaaccgcggatccccgccctaccccatcctgaccctagcccggccgcacctgctgggctaggatgcaactcaaacagcgctcctcgtccgccagcaaagcgtccagccgctcggcgccggcgcgcagctccagttgcagcggcaccgagtgctgggcgagcgcggccgccaggctcctctgcagcgcggcgcgcagcgccccctcgcggtaggcgcggaggaagcggccacagggctgccgcccgcagaatcgcagctgcacgatcagctgcgggtcgctgcggtggatcttcagcatctgcagcacgtccgggctcccgccgctctctgcggaggcgggcggtcaggcgccgggcggtccccaagctcggccgttctccaaacggccggaggaggggcgaagcccgtggtgaagccccgcgtcccatcccctgacctagggtgcagttaccccagagtacccagctgggaagcaaaattgggatacaaacagcaataacccagaaagaagaccaggatctgtcacagggagcaccctaagacagagtgggtgccacctaacccccgctctcacgccccaaatgagggttggcaaaagagagggacttcgaagcacagaaaagggggcgtgtgccctgggcaaacaagccgtctgggtaggcggccagcagggcagaggagggcgagaggtctcaggtcttcggcctccaccaagcgcgactcccactgctcgggaagaagaggggctctcgccgctctgaggccacgaacagatcccccaacccgcttcagcctcctgtggcctctgccctgagatgggaaaggggggcctggaagggtaggtactggggaggggtcttgagcaaggagtgctgcagtaagagaggaaaagaggagag

SEQ ID NO: 94715 - DNA, 37821 bp, Homo sapiens
gagcctccactggggatgacttatcccagaccactgccacaaactggccagcagagatcccaaaatctgccattcttgcagtgcagtactgacagacctaaaaactgctggccaaaagggaatcaagactgggcagagacaaagtgcaatttaatctgtgagatatcataaaatatgattagaatcccaacctaacttgtaaccgcccactagggaatgctgacaacattagaaactctactgtatatgctaaagagtctgaatacatgaaccccattatctcaagtcttcataagcccaacattcccaaagaaggcagatagcttccttggtgagaatcctgacttggaagagtcaagaaaggggattagaggcaagtaagaaggttggaggcagaaagatgatttcctctttgacctaagataattcagcatgaacggaatggaaaacacacaggacatcaattaggcaaagtgtgacttggcaaggaaggcaaataaattgacagaaataacccaaccacagattcaatgtttttaaaaagaaacaacacatttaaatttgcaaactgaatactggttattttccctttcatcaaaatatgaaaatttaattccactgaatctgcagtgatcaagaatacttactatgtctgtaccatttaatattagctacattgttcaaagcatcttctaaacattatctcaactgaatctcagaacagccttaaactagatattattaccattttacagtctggaaactgaggcaatttacgttgcccaagtcacacagctagtgagtgctacatggataaagtgagagctgggatttgaacccaaattcatctgactgtaaatcccatgcttttaacctatggaaatttccctccagggatcaacttcctcttccacttgatacttaggtgagtatataatatgctcacaaagaaattaggtcaagagatagtactctactcagtttctcctttctttcttaaacattaatgacaccagtttccaatttaaaatagctcaaataaatgaaacaaacaatttgtggtagaggagtcaaaatggattagttttatgttgaacacttcagacttctgcagaggtggccaactcagtggcaatcatgccaccacagatacagactgaattcaagcgaagtcactacactcttgtttcttttaaaatgttgacttcggctgggcacagtggctcacacctgtaatttcagcactttaggaagccgagccaggcgaattgcctgagcccaggagtttgagaccagcctggccaacatggtgaaaccccatctctactaaaaatacaaaaattagctgggtgtggtggtgcatgcctgtaatcccagctactcacgaggctgaggaaggagaatcgcttgaacctgggagatggaggttgcagtgagccaagatcgtgccgctgcactccagcctggtgacagagcgagactccgtctcaaaataaataaataaataaaaaataaaaaattatagctgggcgtggtggctcatgcctattatcccagcaccttgggaaggcgaggcaggtggatcccttgagtccaggagttcaagaccagcctgggcgacgtggtgaaaccccatctctactaaaaatacaaaaattagctgggcgtggtgacagaatctatggtagtcttatgtagtaatcttatgtagtcccagctactggggtggaggagagggcctgaggtggtaggactgcttgagcccaggaggttgaggctgcagtgagccaagattgtgccactacattccagaccctgtctcaaaaaaaccaaagttcacttcaagtaactctcctctttgcctacaaaacatactcaggatgttaaatatttaacactcaagcattaaatactatagcactttgatttgtcactcttttcctaaaggagttactaaaggttttatttgctagactgatgtcaattggccttctggatccacggcctccataatctggctctacctgtatctcccaccattccaaagtgatccctccttattctatgaaaaccctttgcattttcccctcatcatgccttttatctagctccttccatatgatccaactgcaagcgcccctaaaaggatgctaagtgttatcagacaagtaggattctttagtcatttaactctgttttccttaatgacagagggcaagtaaaaatggaaaaaaaaaaagaaaaaaaaataattaaaaagacaataattctggttttgttttttttttttttttgcgggggtggtggggaggacagagtttcactcttgttgtccaggctggagtgtaatcttggctcaccacaacctctgcctcccgggttcaagcgattctcacgcctcagtttcctgagtagctgggattacaggcgtgcaccaccatgcccgtctacttttgtatttttttagtagacggggtttctccatgttggtcaggctggtcttgaactcccagcctcaggtgatccacccgcctcagcctcccaaagtgatgagattacaggtgtgagccacggcatccagctaattctgtggtgtttttgtttgtttgttctgttttttgagacagagtctcactccgtcacccaggctggaatgcagtggcacaatctcaactcagtgcaacctccgccttcagcgttcaagcaattctcatgcctcagcctcccaagtagctggaattacaggtggacgccaccacacctggctaatttctgtatttttagtagcaacagagttgttggccaggctattctcaaactcctgacctcaagtgatctgcccacctcggcctcccaaagtgctgggattacagacatgagccaccgtgcctggccaattttggtttttaaatccctaaacagcacacaatcaagaactgaaacttttaactggcacatgatgtcgaggaagaacccttgcaaacttcaaggtgtgcaatatgggatcaatctcccatttaagaaccagccaggcaagatgggagtatggattgctgggcattaagttataagaaaaaaaaaatgacctgtttctagaatgatgttggaataggttcttccttgggacaatagaaagggatgaaaaagaccccacctactagactaccacaactttgcactgtacttacagaaaaaccctcataaaggaaacgaagggcaaaagcttacttattagctagagaaaacaagccaaatgtctagaccttttcagcaacatttacggaggcttttatagggcacaggttttgagtgcagatgacctagggttctatttaccactggatcttatgggcacatgaccatggataagttactagactctttgaatttgttttctcatcagtaaagtagggataaaaacctcatattttgcgaggctgctgtaagaagcaaatgagaagataaaaataagcaaggcactcggcaggctctggcacacagagctctgtaaagtaatgttctagaactctgggcttccacttctctgtggctagtttacctgcctttgcttcaagcagtcctataaaaccctgcttctccttagccatgcctgataggaggacactccagggagtgatgggaacctgctttttcattgttagaattagtgtaagagctgcgctttatgatctttggacagtactccagtgggactgtgtcagtaaattagaagaatgtaaaatgctttgcgttccgtatctcccaaaactaatcttatggcaagaggagcttatgaactacattcattaaacatcaaccctcaaaaaacaggcatagccactactttcagtcagcatttttcaaataaaataggagataatattcttttaaatatctaaagccaaagtgtgatacttttcatcatcagaattttatgttgctgttgtgaatttgtcttttaaaacaaaaaaacccgtaaggaaaaagtgtccagtatctaagacaacatgcttagaagctgtgagtcaggacccagtttcataataagaggtagcatcattgtcacgtcactgagcttgttgggtacctctccaactctgactgaggcacacacatgtgcatggcccttctaaaatgttactggcaggcagtaaaagcggatgtctgagaacagactgttttttaggtgcccagtaagcatcaaatcttgaggcatttggtctctcttctggtgaaaggggacaaaagcaaaaaataacactgaagtttgggcttcagttcaaaaaattctttaactcgggtgcataaaagagttccaagaatactgacagttatcagaaaggaaaatcctaattaaaattaactaactgggctgggtgcagtgactcacacctgtaatcccacactttgggaggctgaagcaagtggatcacctgaggtcaggagttcaagaccagcctggccaacatggagaaaacccgtctctactaaaaatacaaagattagctgggcatggtggcgtgcacctgtaatcccagctacttggtagactgaggtaggcagaattgcttgaactcaggaggcggacgttgtagtggaccaagatcttgccactgcactccagccagggagacagagtgagactccatctcaaaataaaaaaaaattaaattaaaaacataaaattaactaactgaagctcttgtgcacatacatgtcactgcctggcctctgggtgaccagtaccaagtgggcctaaccagcctgctgtgcaatccaagtcagccattgcccctctctgggcctcagtttccctgccagctttagcagaatggtaggaaggcacaattacaacctgcaaatgagacctaagaaacctactatgtgcctgtccctacacgggagacagacaagaagacacttgttccctgccctcaagagaacgctctgtctagacacttagactaagaccttagaggtttttttttttttttttttttttttttttttggcagagtcttgctctgttgcccaggctggagtgcaatggcacaatcttggctcactgcaacctccgactccggggttcaagcgattctcccgcctcagcctcccaaatagctgggattacaggcacccaccaccacacccagctaatttttgtattctttgtagagatgcggtttcgccatgttgcccaggctggtctcgaactcctgagctcaagtgatccacacgccgcagcctcccaaagtgctgggattacaggcatgagcctggcccagaattttttttaaaaagtgagaatcaacaatgaaacaggaacgtctccaggcatttggcgtgtgtcaggaattagggtttcagaaaggatacccaaatgttagtttccacaggaaaggctcattcaaagatggatggatagaactcagaaacaaatccttatggagaggagtgttttacctaaaaccagaaatatggatctaaaattttaacctttggggtaagttttggcttaggaggtcttccccgcacccgtgcaggggggagccggatattctgaaaagactagatttgacaaggggtgtgcaaagcacaactttaacagacacaatgatggggtctgactgcaaacacaaaatcgacagaatcacatgctcttgtcgtcagttactcttagcccaaaaaccgtttacttcttcctactaagccttctctgatgacacccccgtgaagtgctctgttagtggctagaccgtgacctccttgagccatccagagcttggcactcagtaatgtcagaatgaagggcaccagcctttcccgaacttgcagatcctacaaatcacccgagggagtggttaaaatgagattcctggaccacacccagacccactcaatcaatccttctggacaaaggcctagctgtctgttctagtaacaagcatccttccgatctggatacttaattatatcaactcaacacgctgggggttcggacaagttgcaggttcgaaattacaatcgtgagctcaggtaccccccgactccaaggctttcgtgctttgctgccaggaacccccagggaccaaaacgtcacggggactgaggcccaaggtcacaaygattggctactggtaggaccgggtctcagaaccaggtctccccgatcccaagctcggagccgtttctcctcagcgtggtgtccccggggcctcagagtagggccggctrcgcaagggacgaggcagccggggaacggcagaaattcccagtcaggaccccagggaggttagggccggccctggcccctcacaccgacttctcaggaataaaccagccggggctttcagcggggcggccgtggctgcgttcccatcgaggaacggggtgggaagagaaaatgagaggatgtgggaacgagggtgggccgggaggggacagttgagggagctctggcgctcagctggmccccaccactctcacctgccgcctgggctcgctcccggcttctctccagccgtcgactccacgcctygcgcctctcgcgagaggaggaggctccacggagcgacgacttccgccctccttagggccgtggtcccgtagctaccggtcgcgtcgccgtgggcgacgtgcccgcttccaaaatggcggcggcggcggtatctggtgcgcttggccgggcgggctggaggctcctgcagctgcgatgcctgcccggtgagggggctgccaagccggggagaggcggggagcgcggagggggcgcgaggccggcttcagctgggttcgacggtggggggaagaggccgttggggcggcccacgagcaaggtgaggtgaagggcatcggcgcgggctcgggcgagccgcctggctagcttcggccctgctccgctgyctgtgaggggcagatgcagcggggcagggcctgtcacccccatttcatggagttggcagagcctcagagagggctcggggtacgaaagtcacgcagcctgagcctgttggttacagaactggcagtcgcagacccattctcaagtccattgccaagtccactggaaggacaggtggacacggccacagagagcctagtccattgtttcccgaaagccagccgtttcctcaccacttcacgaattctgtgatactctcttaccacctttgccactatgtactcagtatttttatttttaaataggagttcttaaagaggaaactttatatcattgtcataaatggaaaactaatatcgccttccttaattagaacgtatgcattaacactttagcatacatacataactgatgaaacgttcacctgtatttcacctaaaatcttctcatgaccctcagtggtactacagtcatactttgcatctgctccttccttttcaaagttttgcggatatttgtgccgtatctttcagtacatgtattaaaatattgatattttggcacatactattctgtttcttttttttcttttttttttttttctgagacagggtctggctcctcagcctcccaaggagctgggactacaagtgcgtgccaccctacttggcttaattttgttgttgagacagagtctcactctgtcacccaggctggagtgcagtggtacaatctcggctcactgcagcctctacctcctgggttcaagtgattctcctgcctcagccttcctagtagctggggttgtgccaccatgcccagctaattttttatttttagtagacggggtttcaccatgttggccaggctagtccaaaactcctgacctcaagttatctgcctgcctcagcctcccaaagtgttgggattacaggtatgagccaccgcctagcccccttttgttgtatttatacaaaattccaaactaaagatgtgtagtaaaagtaatgtctatgaccccgcaaatccaccaagagaaatgaaggtatgtgtctacaaaaaagttagtacaagtatattcatagcaattttattcatagtagccaaacacagaaacagtccagttgtctagcaacagaatagtattttttttatggaatactattctgcaataaaaactaaaaatcagtcaaagagaaagctggacactaaagtgataaggaccatttttaatcagtaataactattgcaatagggaaaagagtctagcatgaacggagcccaaccttgagtttagagcatgcagaagtcactgggtgtttcaaagaaaaaatgagggaggagggaggaaggcaggtggggaytcagtagagtcaggatagtgaataattataaataagattggtctgctagctggcagttaacaaagttaggattctgttttcccacagggagacaagccctatccttcttaagtgttagcctgaacaaacagtaaaattttttttgacagccttgagtyttctcaggcaggcactttaaaggggggtagggttatcttaagggatgtggccctgagtgatgcttatgttagtgtgtgttcaagtctttataggccaaggttgaggcctagataagaagagggctcagaggagcctggttagagcctgatcaaggagagaatctttgccagatatactgataggcataaaaatatggatcaatctcaaaaatatactaagtggtccaggtgtggtggctcacacctgtaatcccagcactttgggaagctgaggtgggagggttgcttgagccgaggagttcaagaccatcttgggcaacatagcaagactctgtctctatttaaacttaaaataaataaatatatatatatacacacacatatatagtcctaagtgaaagaagctttactgaaacatgtacatatagatgaaatcttaggacaggcaaaactaagacaagcaaaaactaacctagagtgaaaaattcagaacagtatgaatggggaatgactgaaaaggcataagggaactttctggggtgacagtaatgttctctgtttagattgggtttaggttgtgcaagtgtatacatttgtcaaaactcatagaatggtacacttaagatttatgcatttcattgtgtgtaaatggcatctgaataacaaaacagtgaacrtagaagtctttgatgctaaaatgtttagaggtgaataatactgatatctgcaacaaatgcactgaaaatcaagatggatgaatgaagaacatgacagatgtgttgaacctagtggcagatatacaggtgttcattccataattctttcaatttgcgtgtttgaaaatttttataataggctgggcatgatggctcacgcctgtaatcctagcactttgggaggccaagacgggcgatcacttgaggtcaggagtttgagaccagcctggccaacatggcgaaactccgtctctactaaaaatacaaaagtgagcctgagagtggtggcgggtgcctgtgatcccagctactcgggaggctgaggcacgagaatcacttgagcctgggaggcagaggttgcagtgagccgagataatctcactgcactccagcttggccgacagagtgagactctgacaaaaaaaaaaaaaaaaaagaaaatttttagaataaaaaatgttgggaaataaaaaatactatgagtttatgcttaggaaacatacttctcatctttcttaaagtaaatggagatgttgcagatattgcagatgagaaagcagatagagattagtgacttgtccaaagataccatataaacactgggggagtagggctgagacattaaattactattccagagctcttgccataatatatataaatctgtaacatttgcaagccacttttactttttgtttgggccacacagtgctctcattgagcaagtagagattattactctaaatttgcagatttaaaaatctgcacattggggtgaaattgtttgccagttacccaggtaacaagtggtagaaacaggtcaagatgctaggtagatcatttttcctggcttaccacttttgctaccacttcgtgtcccaaagttcccagtttacccaatatttttgtgtgggacccaacacttggataagtggttctacaggagtctctggcctgcttttcctcctccttatctgtgttaccactctgggtctgaaagggtcttctctrttgaatgtccctgactgaccagtttctgtttcagtggcccgttgccgacaagccctggtgccrcgtgccttccatgcttcagctgtggggctaaggtcttcagatgagcagaagcagcagcctcccaactcattttctcagcagcattctgagacacagggggcagaaaaacctgatccagagtcttctcattcacccccsaggtaggcaccaatccacctatttctggccacttcatatgcttcattatgtctgttcctccttcacttcctctctcctctccatcccctttkgtaccttccttcatttccaaggccatctttgttttttagaattttttattttttgtagtgatggcttctcgctacgttgaccagactggtctcaaactcctagatttcaagctgtcctccgcctagatctcccaaagtgttgggattacaggtgtgagccactgcacccagccacaaggctgtcttaggaaagaacctattgtttttataaaattggtgcctgtttgttctaaaacacctaaacagtatagagaagttcacaaaaataaagcagttttatccaaaattacagagataaccctgctaacatttttgtgaatatccttttagatgtttctctaagcttatttcatatgtaaatttttgtatagaatagatataatgtgtataaactctacatgctgttctagaacctgttttttcactcaacagtacatttgtaatgtcttttcatagcttaatagttgtataacattccagcaaatagctgtgccaaaatttatttaacctgtcttttattgatggatatttagatttccttcactagtataagaaataatatgataaagtgtgtgaatctctccttagaagtgggagcactgagtcaaaggatatgtacatttaaagattttttacttatgtgggccagttgccctccagaaaggtaatactaatttacatttccattagtgtttttttttcctaatcctgccattgaaaagtttctctatatctgaaattagcgtgttccttttcatttttctgatttcctaactaaagtacttttcatttcaattcaagaaatattttttgaggccctactatcatgccaggccctgtgagtaatatagcattactcctgccctcagggaggtagtctggtgtaagtttagatgaagaaaccctctgagcacagtgtgctaagggctgaaaacagggaactccagggtgcagcaatgccttcataccacatggcctcatttgctggattcctctccgtgcctatggggaggggaaggatgatctagtttttactctgttggcattaaaacgttgatactggctgggcgcggtggctcgcgcctataatcccagcgctttgggaggccgagacaggcggctcacttgaggtcaggagttcgagaccagcctggccaacatggtgaaaccctgtctctactaaaaatacaaaaattagccggacatggtggcacacgcctgtagtctcatcgacttaggaggctgaggcaggagacttgcttgaacccgggaggtggaggttgtagtgagctgagatcacgccactggactccagcctgggcgacagagggagactctgtctcaaaaacaaaaaacaaacaagaaaaccacattgatagtgacacaagagtaaatgtcttccyagcatgtgcttagaggagatccagagcccctagtttctggtcatgcccattgtacatgccaggagatgaagtatgctgggctgtgtcctcttgtctcaggtatacagaccagggcggcgaggaggaggaggactatgaaagtgaggagcagttgcagcaccgcatcctgacggcagcccttgagtttgtgcccgcccacgggtggacagcagaggcgattgcagaaggagcccaggtgtgtataggtgagggtggggccacctaaccaagatgagccaggatggagtcacaccaggcagagcggggggcctcatgccttcttccagtctagctcagagcccctcacagctgcaagattgactggtttttttcccccaatagggtggaactggctttattttgtagttataaagaacataccatggagttggttcttgggagttgtgttctaaaggcaatctattaggcaagaattgtctgtgatcaaaactcccatgtttcattgactctaagatgccattggttgtaagaagcatcatttttaaatgcatcagtaaaaaagaaaacatactgcccttcgaactatgacaaagcacttctgtgattcacactgattttttaaaatgaaaaatatatctgcatcttagaattaatgacatatggtgtttgaaaacccccaagaaggcaccactttggagaccaacacatcttattttcccagaaactctaatagcattttctgcattagtacagactgctgctttagattaggcagcaggctcatgttcaggccatgttgtagagaatcctccagcatagcaagataccatcctccaagagactgaggggatgacagagttgcatcttccatcccaggcttgctgcagggcatctacccatggacaatgggcaaggttgctgctttactgaaatttaactgttatttccttgtcttctctcactcccaagtgcacatttggtaacagaagtctcattagtgaaatgtgggtgctctgactccactgtaggctcattgtgaaaactgaacaatacaaacaaatataaaaaagaatgtagaaaacacctataatcacaccaaagatcatactatcaacatttatgcctagatctttccaattaaaaccctttatatgattcattctttaaatgtttattgagcaaataatgtgccctaggcactgtgctagtccaagagacatgacaggggtcaargtggtcaagatggatctgcttcctgcccttgttgagcttccagtctagcaacattaataaaatatatacaaatgtttacttagaagatgtggtaagtgctatcaaggaaaggtgctgttgggctgtataatggagggacccgatcattagatcaggtcacagctgcgagattgactggtttttttccctcaatagggtggaaatggctttattttgtagatataaaagtaatgaaccatggaattggttcttgagagttgtgttctaaaggcaacctattggcaagaattgtctgtgatcaaaactaccatatttcattgactctaagatgccattggttgtaagaagcaccatttttaagtrcatcagtaaaaaaagaaaacatgttgcctgttaaactatgacaaatagtctaatttgtcctattaaagggttggagggctgggcacagtcgcgcatgcctataatcccagcactttgggaggccaaggcagagggattgcttgagcccagcagtttgggaccagtctgggcaacctagggagagaccccatctctacaaaaaatacaaaaattagccaggcatggtggtgcttgcctgtggtcccagctacctgggaggctggggtgggaggatctcttgagcctggtaggtcaaggctgcagtgagccataatgatgccattgmactccagcctgggcaacagagtgagaccttgtctgaaaccatatatgaggtgggtaacagggtggtcaggaaaggcttttgagctgagaattgaagaatgaataggctttacctgactttgtgggtaggagatggacaagtccaaatacagaaactgcacaggcaaggtggaaagaaaaagaaggatggtacgttagaagaaccacagagaaccaccatgcagagagtgcaggaagagagatttgagatgagcaaggctggaaaggtcagtcgaggtcaaatcaggcaaggtcctaaaggtcatgatgaggagtcaagcttttcttctaagaacaattgaagatattggattaaatttggcatttcaaaatgctcattttggctgccagatgaaaagtggattggaggcagagagagactcrttgggggctgctgccagacatacaggagagatgaggtggtctggcttagagtaatggcagtgggtaagttcaggaatagcttggacatgggagagagtgacaggatggcaccagagttgcaagtttgcatgtgtgggtacccaatggtggtgttttctaaggtgaaggccattggaagaggaccagctttggggaagggtacagtcttgatccttgttgagtatgaggagtttttgagtcaaccagtggaggcatcaagcatacaggtcaggaactggaggaaacagctggactagagatacacatttgggcatatatatatatatatacagtatatatatgcacgctgattttatatatatatatatatataaaataattatggaagtcagtgagattgtccagggcaagaatataatgtcatatgagaggggagtccagactctcaaggaacgcggacatttaaggggagagtagaataggatgggccgtcaaagtctaagtcagagcatcctgatgttggaggcaaagcaggagagtgtggattaagcagctagacattggttactggggcaacaaccrtttgggtggagaactggatcagaaatcaactggagtggatcgaggtgtgcatagaaggcgaggaagtggcgaggcgtttggctgcgaggggtagaactagggtgcaccaagcaggagaaacagatggaagtttggacatgattgaacacaaatgggaagagtacagaaacaagagtggaccaggctcatatgtgtaatcccagcacttggggaggctgaggcgggaggattgcttgacactaggagtttgaggccaacctgggcaatatggcgagaccccatctctacaaaaacatttaaaaattagccagatgcggtggcgcatacctgtggtcccaggctaagatgggacgattgcttgagcccaggaggtcaaggcctcagtcatgccactgcttgagtgacagagcaagacactgtctcaaaaaaaaagtaaaaagaaaaaagaaagaaacaagagtgagggtgaatttacaagagaaaatagtcaaaatcaagaggatgaggttccttgaaggcaagaattgtgggatctggacaacagttggaaggactggccttagatgtgttaggtgcaaagttggagaaagcagctgcaggcttagtttctaaaaaagaaagaagacctgttgatatgttcatccctgagctagtctctgtgaacttgttattcaagcctagatcccactcttgcacacacaccaaggggctttgcagggtggagggaccggtggtggtcagtttcaccaaaatcacatggacccagagtgaagaaatcaagctgctgtcactaggaagaggctctagtgatgaacaggcaacaaatgtaccctacacttgggcaccgcttttctgttttctgtctccccttttgtagtctctgggtctctccagtgcagcagccagcatgttcgggaaggatggcagtgagctaatactgcattttgtgacccagtgcaatacccggctcacacgtgtgctagaagaggagcagaagctggtacagttgggccaggcggagtaagtcccatggcattactactcagggtggcagctaaggatcagggaacttgggccctaccagctatgcccaggaggccaatccaagcagaacccaaagagagcagcattgggcagccctgctgctgtgatgggactgaaacctggcagcctgtctctgacrgctttagtcaggccagcgtcaggagctggtgggaccctcctccctagggctgagtaaaccgtggagcactgagcccctgcctttcactcagagacacactgttttcttttccctcttccaggaagaggaagacagaccagttcctgagggatgcagtggaaaccagactgagaatgctgatcccatacattgagcactggccccgggtaccaagtctatatccaggccccagagcaacaataatcctaatatttatcattctcagcacctttcactcagatgactttgtacactgttcagaacttagcttctcaatctctataaacccgacaatacttagtacacttggtaaagctgggtttcaaacttggacataccaaagagagtgactgagccatctgtgtctcagttcttggaaatgtgagtggtccgggtactggatcccatcctgggtggggttctcctagtggtctgagtgtgccaccaggtctgcagggaggaggaatccatgcaggaggttagaagagtcagaagattttattggctgtcttcacttgaataacagccctgtggcattttagatctcgagcactgggatttgtcaattgtcaatgtgatgcttggggactggcatattcgttgcaaggggttttttcaccttttctgaagcttcctttttcctctgttttaaagcatatcacagtatgggccattctctgagtgaagaaagtacagagtgaaagtacacccgaagtgagagggactcagacatcttgtgtcctttgctcagctggaagactactragcacgtagtttcagtcattcagttgatagacatttgaacacttatggtggtgcctaaccccaggccgagtgtgactcattccaccttgcagttaaagcagtggaagtgcacgtatgaggccctcaactgccttcctgattcagcatagtgttttcttctgggctgcttcactaagagaaaaccttacagccaatccaggacctctctgatcacctccccagtggatgtagcattggtaaagtggaaggaccttgttctgtttgtcagtaggagctgatgtgtgtgaacggactcctatctctgcttcttcctttgtgtgacagactggggtatctttgcccatccttgcttagaccagtctagaccctctggccctctgcattcccagttccaaatgctagggatggagaatgtgcttgggcttgcataagacggggctatgcccctggctctcctcagctgtagtcagyattgctagctgcccacaactcacgccagtgggtgaagatgctggtctcagagaaccagagcttggcaggccccctcatacacctcttggagaggtagatgstggtcaactatgcaccattacctgtgagcagagcttactcctctgccattctctctccaggccctcagcatcctcatgctccctcacaacatcccgtccagcctgagcctgctcaccagcatggtggatgacatgtggcattacgctggggaccagtccactgatgtgagtgctttctgcaggcccacaggaggctgggaaaggcttgtgttaagcatttcttcaagaagcttgtgaaattgctttgatcataagcccctgcaggggggctgcagtgtcattcccatctaaggtatgaggaaggtccgtcaagaagccaaagtgggatctaggtcatcttcattcagggaccagcattctagccacaaaccagttattatttcttccagcttgtggtgacaccaggtgtcagagatcctttagcattggcraaagctaattgggctgccattttattatcatttccctctctcctaagatgtagattctgcagcaaaattcctcttttgaaaaaaagaaatgccatggaggcacccattgctttaaaaagaaattcccttccccagcccatcttggcctgctttgctaagtgatcaataaggctctttaaacagcaccaggaaagaatccgacttgttaatgctatcatatttctggtaggaaattttaaaaaatacaccttcataaaagaaaatgtgatgatactttgtggaatcctggatgaggaggcacagaaatactcccaccatagttataacaaagtgttttaataaacttcctcyatgtgggaatataatgccaacagagacggtaggaaaatgaaattagaaagcaaagaaattaaaggaataaaacaccaagcagctgagctggtcctctgaagagtagtttgctagaacaatcagaagttgctgagggacttgaactctcagctttgcccaggtattgtaatctgtccatgagcctctctcagccctcactttattgatgaacacaccaaggttcggtcatagctggctgattacagcgtcttctgggactcagatgtcttaagatgtaggctttctactagcagttccaaaatggattggatgtagccaaatcatctgggatacttattaagtttcctgattcctggcactttatttagatccattgactctactcttaagaggttgggcccaggagcttgcatttttmatcaagtaggtaattctgatgctcagtcaagtttgagatggtagtgttgtccagagggccagatgtatctgtgacagtcaagaagtagtcaagagggaacccaggagttcccatggccttgggtaggaactgcctcagacttgcaccagcccacagcggtagtgtgggtttctttacagtttaactggtayacccgccgagccatgctggctgccatctacaacacaacagagctggtgatgatgcaggactcctctccagactttgaggacacttggcgcttcctggaaaaccgggttaatgatgcaatgaacatgggccacactgccaascaggtaggtggggactagccattggggaaccctctttagaaggcatacctattctcctcaggtcacagctggtcttgctcccttttggcctcagctgacagtcctgagggccttcccaagggcctggctggttcttcctcaggccagcccttccctaagagccacactttgctcatttgcatttgtgattgtgttgtccaaagctctccttccagtaacgtggcccccttgtcttcaccttttggggctcataggcctcctgatttgtcctgcctgtctcaagtttaactttgtgttggtggcctaagggaacctgacactgactccttctaggtaaagtccacaggagaggcactggtgcaaggactcatgggtgcagcagtgacggtgagtactgcccagcacatccctgcccctcctctctcccattccggctctgtgatacatgtgttactgacttcacatcattttgtagccctaacctggaaacaataatctaataataaggctgacaatggttcagccctagtgtcttgattccaaaaaccycacttctttattttttcctgtcatcaggagatatcactgactcctgggaccctggtatatcaagtctctgtatcatagccacacctgccaccttgcaaacctggatcttggccaggtgcagtggctcatgcatatcatctcagcgatttgggaagatcgcttgagcccaggagtttgaggacagtctggccaacatagcaaaaccctgtctctatgcaaaaaagaaaaaaaaaaagagaaaaagaaaagctaggtcttttctattagagtctagaggcaaggtaagccctcactattctctttatttccattcccgtgtcagctcaagaacttgacaggtctaaaccagcgtcggtgagaggaaggggtataagctacaatgcctagaagagaatgagcggacagattgaaagagctttgaaaagtataaggtgccatccacataacctggtgttcrcgagaacacactaaaggactcctgagtcactaccacagccacctggaaaccacaaggcatttgatgctaccgttctggtcagggattgggctgcttcttcagttcctaataccagaccaagcctcctgatgcctttctgcactgcaactgtgtgattgaaaaatgagatgttcatccaagcagtcaagccacagaaacccagcatgtccctgtcacaatctcatgggcaccttgatcatgtcttaaccttcccttaaccttggggctcccaagccagagtcaaggtctgacgccacctcaaggtgacagctcatctccagcacagcacaggcgtgtgcacacagaggtgttccttgmagccccctccctctcaggtgtcctgagatgctgytcctgggagccccctcagaaaactgcctcacctgagacaagtgcctgctggacagaggtgtgattccaggcctggtgtcacatgacaccagcatgcattgcaggattattagtgtattttgagtctgtaaaaataataaatatgtttgaagtagttwcccattgtgtagttagtttccttatcaatcatgataggtatccaggaccccagagggagacaggttaagttatggcagccaggagacctgtgttctggcgctgccactgcctaatacatagtggtaattatagtacctctgcgtctctgggctcaagtcttcccatcagtaaaatacgggtaacagaagccttcccacagaccatcagctcccttggctgctcttgtctgacgattttagtggtacattctttagccccagtaattttctcagcctctacactggctgggttccctttgcacgtctggttagctctgttttctgctttgctctcttctgcctgtcagctgaatattaatgggggaaagtcagcaactaattgaatttcagatctcttgtgggtcttccactggatcttttttgcacctctcaattccttgtatctcttgacatcctgtgaagttttcgcagtagctgttccagttttcattgcattctcctttttccttcatagcatccatcttacactcagcagacaaccataattcttaatttaccaagatgacacaggttatggagcagggttccatcagtgcccaccctctgtttcaggaagaggtgtcactctttgcaaaggcaaactcctctttatctggttactcttctcccaactcttaaatgtatttcctgccacgttctattttagagcttttctctgttggagcagcagccactttttttgaggcccatttaaacctctctccagtctgtttaggggacttcagtagttctttgttgagcatgcaccccacatggtgcccactgccaggcactggggatgcagagacaaagagttcccactcacccaccacagctacacagactgtagaggaagcattaggttaaagaacattgtatcttttcctgaagttttcagaagtgcatggtccatacttgagactgcaagggaaagggtatttacttataattcaggtatactttgctaaaatatacattcatattaaaatatacttttgtttttctatagatgtacaagttctttttaagtgcttcatagtattccatgtgtgtatactccaccaggtctcttatcaatggacagtacaaacagtactaccacgaacgtccctgcactcgtatctttgtttacaactgcaagtgtttctgcagtatgaattcttagaagtgttactgttaagtgaaggacgtatgcgtgttttgccaaactaccctccgagatagctgaatctggtacattttaaagcaggaggccgcagaagacgctcggcrgttctggcctccgagcagcaggcggcgctgtgagtcgtctttgcggaagccgcggaggcctcgctgactgacttccggtgttggcggtggcgccgcgcagtcaccgcggagcagacgcggaggctggtggcccctgggcgagatgccgtacgccaaccagcctaccgtgcggatcacggagctcactgacgagaatgtcaagttcatcatcgagaacaccgacctggcgtaaggctaccgagggaagaggctggcggctctggggcgccgggaggcccaagccggggccccggggcagggggcgggggtgtagtggggtggggtgggggcgatgtccttccagagctgcccccctgcaccagggctttagctttgggagcctgcggcgcgggcccagcctgtcgaggctgcagcgccttcacgccccttggcttttsatctttcagggtggccaattcgattcggagggtcttcatcgctgaggttcccataataggtaagcgactccccttcctcgttcccgcgcccacgggttcctgccccgctctccacccacacactctttggggctccttccagtccttggttcgggctgagggtggtagtgctgagaaaagtgcattgctggagacttgaccataccctgtgcccttggctcagtggccgcctccctggcgcccacgggccacttaggtccacccttgtcctgggtatgcattgctgagaagcatgggtttagcagtgtgcagacttgggttcaaatactgttttcactactattgttacaaaagtttttaaaatgttttcaacttttattttggagtcaaggggtacattggtgcaggtttgttgcctgggtatagtgcgtgatgctgagatttggggtataaatgatcctttcacccaggtagtgagcatagtacgcaataggtagtttttcacccctagccccactgcctcccttccagctctagtagtcaccagtgtgtttattgtcatctttatgtccgtgcgtacccagttttagctcccatgcggtgtttggttttctgttcctgtgttaattctcttaggataatggcttccaggccgcgctcgcgcctgtaattccagcactttgggaggccaagactgaggaacacctgaggccaggagtttgagaccagcctggccaacatggggaaagcccgcctctactaaaaatgcaaaaattagccaggtgtggtggctcccacctgtaatcccagctactggggaggctgaggcagaattgattgaacccagaaggtggaggttgcagtgagccgagatcatgccactgcactctggcctgggcaatagagtgagactccttctcaaacaaaagaaaataaaaaagaagatagtggcttccagccacgtccatgttgctgcagaggacatgatttcgttcgttcttatggctgcatcacttactgcttttgtgaaacttgggcaagttattaaacttctgtgtgctgcagtttcctcatctgtaacattcggccactaatgatccttatcagggtaatgttaaggattaagtgaggtaatccatataagtgctttgtgtttagtgagtgctcagtgctggtagatggcttttttattaatctattccttcaacagcatttatggagcatgaaagtggcaggcatggtggtaagctctgggaatgcaaagctgtagagaacagggtttttgccctcatggagtccacagtgaggttgtaggggagagatgaatccacagacaacactaaagcaaggtagattttgatcagtagttcaggagaagcatagctgtggtgcacttggctcttagaggagggaagatcaatttctggtctggttccagccactctgctccaggtgcttaatgcattgattatacttgtatgaaatacttcaagcatttctgagagtcagctcagagagtttggattaggcaaaataaatataagtcatagctgtggcatcaaatattcagacttttaaggaaataagcaggccaaatgattaggcaagagaacattgtagtttatccactaccaccaccaccccacccccccgccccccagtcacttcttaaattcagcttggagtgctggacctccccctgcctaagcacttcatgcctctggacctcagtttcatcaggagtcaggtgagggagttgtacttcatgatgcagccctgccattctgagtctaaatgcctctttcccaacaaattcagttctacaaataatattgagcacccatgctaggaatacaaagacatcccaggacctgcgtgaaggaatttctgaagcttgaggtatagacataacatacacaaatatgacacaaggcacactatgacaagtgtcttsagggaagtctgaacagagttttgtgagagaggagttgaaagggagggaatgtcacatctgtagcatagagagcaggcaaggcttagttttcaggaggcacagaggatcttaacctgtacagcaaggaggggaagggtgtgctggagggaagggctgggggattaaagaggcagaaaagcttgggtcagggttctctcagttggcttggactggggaagcaatgggaagcatagcaggacagagcaggtggaggcctggcagggggaggtcctcttccgaccgctgttcctagtgtctgtgtccctcgtttggcagttgggctccagtgccatttgattcctggatttagttggttccatgcaaatgtttatgaatgaataaatgtgtgtttaagtcaagcatgtgtgatcgataatacagtctttaccctcctacgagctcattgctgctagggattgggttctatatttagtatactttgcgcattaaaagaattcagtaaacatttgttgattgagtgtttaaaaagtgctaagttgggcagtccagtcattatatcctaaaatgaggtatggccccrtaagtctgtgttgcttctgtgagggtttccctgactttgaagygctcaaatagttcatgttcttggatttagtggtggcacaggtagcagatttaagtgcttctcatgcaaatactcagctcaaataaacatgtttccacttmtatgatattctataagtcagtgttttctgtgaagcagggagccccctgcattaaattcacctgggcagggaggtgaggtgtggtgtgtgtgggtcttattaaaatgcaagtacctgggccccactctaatgctgtggaatcagcccagcaatctgcagtttagtgtcrggtgawtcctaaatcttgagaaccactgcattaagtctgtaggtaaatttgatggctaaactccrtgtctgcttctttcattttttagccattgactgggttcagattgatgccaattcctcagtycttcatgatgaattcattgctcacaggcttggtgagtactccttttactaggaggttaaagggagggtattgtgcctagtgtcaggagggggcctccttccagcctcaccyccagaaggcttctgggttctcattttggcttggctgtttggttttctttaaagtgcttttctgttttttacaggattaattcccctcattagtgatgacattgtggacaagctgcagtactctcgggtatgttgtgtgattgggtggaatgtgaggtttggtggggaggctttggttctcaaagggatttttcctgacatttggcatccagcttgaatactgttgtagttctggaacaacaacgtggagatgttgtctagagcctgggcaggccttggtcctgcgttctgatggggcttcagattgattagcacgcagaacatcagggagtgttgttaggcagctccaccacagtgcccatttatacttagagtggaggttcttccttccaaagcatctcttcccagtagcaggggccttaggatgctacaggagtcaacagaaggttggggtaggcaaggagcagagggaatgggagctgtctcacaagagcagctcctgggggactagtcctggtgtctgcagattcatgctgtcccctccctcgcaggtgatgctgcttaaacatggccacactcttagtgtctcacccccttcctcctggtcgtgtttgctccctgatggcatgttaacaggccttcagagtttggagagagtaggataggagtcggttaccttcatcctttcactaggctgcattacacagcagcttaaggctactccctcttgatggctttgggtgatccagaatcagtccattttctaatattctcaagggccatgtcatttttgtgatggctaatttgatatatcttataaatatgtgtgtatttttaaaaaagaaatattcagctggatgcagtggctcacacctgtaatcccagcactttgggaggccgaggcgggtttatcacgaggtcaggagatcgagaccatcctggctgacacggtgaaaccctgtctctactaaaaatacaaaatattagccgagcgtggtcccgctcccaagtagtcccagctactcgggaggctgaggcaggagaatggcatgaacccgggaggcggagcttgcagtgagccgagattgcgccactgcactccagcctgggtgacaaagtgagactccgtctcaaaaaaaagaaatattcaagcacagaaaagcatggagctagtgtaataaatactcatgcttctacctaatactacgttgtcacattttaacattttgccctatttgtttcagatctccagatttttgttttttaataaataaaacatagatattggtggggaccgttgtacaaccaattaagagcaatttggcgatatcttacataaagatacgcatgctctatcacctagcagttcctttcattaaaattttttctagtatttattgcacaaagatggcatggtctgtctctctctctctctggctttttctgaaaatctgtagaaaagttgaaaaactaaaataataccctttacttttcacctatagttaccaattaatattttacatttgctttatttttcatatgcaaattgttatttttgctgaactgtgtgaaagttgcagacatcctaacacttccaagtacttcagcatgcatttcctaataagaatagtttcctacataactacactttcattgtgcctaagaaagttagcattaatctgtaatatcaatattcagattttcctagtttttccccaaatatcctttattgtttttctgtttgtttgtgggtcagtcttgatccagtgaagattcatttggtcctcatagcactttagtctcttttcatctcaaacagactcctctcctttcagtacattttttttaggttaaataccttttcatatttttatcttccattacattttgattctcccatttcatatttctttatttttctattttttcagacaggtctcgctctgtcacccaggctagagtgcagtggcatgatcttggctcactgcgacctcagcctctgggctcaaatgattctcctgcttcagcctcccaagtagctgggactacaggtgctgtgcaccaccacacccaaaaaatacaatttttttgtattttttgtagagacagtcttgccatattgcccaggctagtctcgaactcttgggctcaagcgatcctcccacctcagcctcccaaagtgctgggattataggcatgagccactgtgcccagccccatttcatatttctaaaagtgattctgtctcaagggtctgggttgccttcctacctcacctgtgtgtgactgcagacgacctaggtgggacctctagctgctgcttcttcctcagcatgcaaacatcaaaagagtgttgggttttcctcactggtgtgagggagagaacagcttgcttgattgcatcctagtaactgtcttcttgcctgaagtgaaactgcaattaatagtccctaacatgggaatgagtcagttgttttaagaatggcaaaatgttaataattatggaaggtggttgatggttatgggatggcagtttcttacgtgcttctctatttgtgtatatgtatgaaattttccataatagaaaggattttttagaaaaggttagtgtagaacttgaaaggtacttttttctgttccttggtggttttattttaaatgatggttacattcccaagctggtcctcttagttcttgggaagctgaactatagagtgtgaaagcattctcctgtgcctcatagccttggttctctgaggaagagtagttcaagggccagagggagatgttagcaatatgtccccagaggtggcctggcagctggtgggagtgggaaagaaatgtgcgtgccagtgtatgtataagttgtctctaaacttgggcagtccatgagaatggtataccagattgtcayagcccacaagaacctggatactgatgaacccctttttacaggtgaagaaacttaaggaactgggcattagatgcaggaagccaagacaaggagccaaggcaggagttgccatctccctttgactcattcctgcttcccttcctgccttaggactgcacatgtgaggagttctgccccgagtgctcggtggagttcaccctcgatgtgcggtgcaatgaagaccagacgcgacatgtcacgtctcgagacctcatctccaacagcccccgggtcattccggtcagtgygggagagcatcctcttttccctgggatcttttctcttctctggctggctccaagtgggccagactggggttgatccttagaaaatgttggctttccctgttaccctctgccttaatmtgatccctagaagtgctaattctggattcytcttgggcatcgttagcatcgttggtgctgcgcaccctctatcacccagggactcttttaaaggccatggaattgttttgcctgaggctaccaccacaccctgaagtgggggttggagtcctgggggcatctgtgccaccacctcgtcaggtgttcgttccctggttgacagattgcagtctagaggtgctgggatatggatgccagaggaggtgactggggaggtgagcagctaatgaatgcctggtggactccctacaggtgacatcccggaaccgagataatgaccccaatgactacgtggagcaggatggtaagtcttcctgacctgtcaccgtgtgggccagcgggaaggagggaccagacacagcctctcrtgctgcctggtctcctcgaaaattggctttagaccrtttttccagatgtgtgtggtcttgcagtggcactccaagtcagaatttggagaagcatgtctctcctggcccttgactgacttgtgcctctccctgcagacatcctcatcgtcaagttgagaaagggccaggagctgagacttcgagcctatgccaaaaagggctttggcaaggagcatgccaagtggaaccctactgcaggggtggcttttgaatacgatccagacaatgccctgaggcacacagtgtaccccaagcccgaggaatggtatgttccccttaggagtgatggcaggcatttggggtgggtgtggcatagaaatggctgttgttgactgagatgtggcaggctctctaggaacttgggtgccccaaaaggagcagtggcaaccttgtgctgacctgtgtttgacctcaggccaaagagtgagtactcggagctggatgaggatgagtcgcaggctccctatgaccccaacggcaagccagaaaggtaagagcctggttggacatgggaaggtgaagtgtggaagaagggatggttttggttcaggccgtgagttaggcattccctctcccccacctcgcagttctcataagctgaggaggggctgctgactgctaaactagacctgtggtatgtgcacatcccaggggcaggtcgtcagccccttttggtcactgacaaagaggaccctccatttatccaggtggttcctgttctgattttcagcccccaaagaagagattcttcaggtcaacgctaggggcagagatttggacccaagttccacagggtgactgtgaaaggtctatcactggtcactgctcacttggttttccactctctcctcagggggcatgcatacatacagaactttaggattttcacaggtaccttatgaggtagttgtagcctccttgaggttgtgcaaagtgtgttgaaactaccctatgtaagaggttttacatgaaaggaagttagccctggcccaaggtcaagttccatgtgggaacagagccaagacccggaaggaggaagggttgtccatggccagagctcgggtcggccagcctgcctcgcagtgcactcactggactcttgcctcctaggttttactacaatgtggagtcctgtggctctctgcgtcctgaaaccattgtcctgtcagccctctcaggattgaagaagaaactgagtgatttacaaactcaattaagccacgagatccagagtgatgtgctaaccataaattaactgcagcttgcctgcttcagcaaaaacggagattcaggccagcagctggatatgggggtctctcttcagactcttctcgtttctgagaatctagtctactgttggttgagcttcttggcaggacatcagtaccaactagaagtgggtcatagatagattaccagggatgcagtggtgtttaggcaggataggtctttactggccctgactgctgttaataattggcagcagtgctccccagatcccagaaggtccctgctggagtgtttccagtgcacctgtagggaaccaactagacttctctcctggttagtccagctctttactctaaaccctttctgtccaaaatgagtcattttcagttgtaccttagatgtctggtgttgaggatcaagtgccatagcctttattcagggggcctataaacccttccagttcttgccccagggctggcctgctagcgcttcaaattcccaggtgtccctaatttgagaagtaaccttttggaatagcattagaccctggctgtcccctccccaccaaataaacatgatatttcattctctgtccagcagtcatgaaccccttcacctccaatgacctgatcatttagtttggtgggggtgggggtgggggtgggggtggaagcagccgcaggagcaagggcccctcccacatacacaggaggagtatttcatttctccttaatgaaggctctggccctaacccctcagcactgtctccagataggaacatgcacaaagcagttaattaggcagcctggagaaaaccagagatccagtacagaaaggaaaggatatttattgattaacagaagttgtctttttaaaagtgtttatttttggcaataaagagcacaacataatctccttcatgcgtcatcgtgccacttagctgagccagccagctctgcctccctccccaaagacctttggaccccagttcccctctacaggctagctcatccctctgggtggtcattccccgggtcacgttgagagcgaggctgactgcaccacctccctagctcaagggctcctttgggaggggccgcgtgctttatcatcctcctgccacaactcaaatagtggttatttacaagaaggtctgttcccacaaatcaggaccctaaagtattaaaaaacaaaacccaaaaaacaacaaaaaaccccacacaaccaaaagtttgacgtgaatagaaagatagcccttctgcatggtagtcaacaaataccagcactagaaaatcaattgctttaattgcattgcagcagggagcctcagcaccatgtggggaggaggaaatgggaaggtcttggtttcagagtgcttttggctggccagagggtggccaaacagggcaagggggctccctctgcttgggcattgtccacccctggtcagtgagaggggggcagcaggggtgctccccacggcagtcctgctgcggccttccctcctggcctattcctggggcaggaacaagctccagccttcctccacatggctgaggtaatcagcacccctaccccaggggcatcttcccagcctacaaagcaggaaggagcctgtgcagaagttacattttaaaaccagattttcacctgaggcgtcaaccagatgtcacctctgcttaaaactccaactgcaaggctggcaagcagcacagaggaagtgcagatccttcctgtgtcactccaggcccagaggaactgagaagccacctgctgttccggcccttgggctgtytgggaaaagccagcagtcagagtgccagcctcaagctctgattatccccctcctgtggccctggtagttcaagcaggtcctggcagcaggagggctgtgccatggaggatggayacgactgcactcatactcaaaaacagccttgaccgtggcctggtcatgggattaaaaaatttgtgtgtattggtggggaaggatggggtgagggtgaggggatctcattgatacagagtatgtcataagccatatatattaaaatcattaacagtatatagtcccacggtagctccaacccctcacacatgctcaggtggtgtggccagccctttgcctcagtccagcctcatccttgggggcaaggagggggcagcttgctccctttctccaggctcttggccgacagccccctgaggctgtccacggtacactgcagccagccccgcagcaggcagcccccagcagtcatcggtgctcgccagcactgtggtcactgggatggggtcttggcctcactgctgtccccctggctgggctttggctttagcaggatgaatctgttgaggaggtctgtttccgagctggcctgggctgccccatacccctcacctgtgggcacagaagcaggctcagaactcagagctaggtcaaaagacccctgcccaataggcctcatcctccacaaagcctcctggcaggtgggtgtggggcatggaagcgactcaccagcatagctggaggcttcggcgatgttctgggaaccagtgatgtggtgccagtaggcactgcgcggcagcatggtcgtgggtgtgcagggatacgagtaatgttccgtgcccttgttcagcagctgtggggcaaaggaaggggtcactcccattagtggcttacagtatccctgagcagccaccccaagaccctacctgcctccactgtgtaccccaggcacttggccctgcctgcccgcccgttcccccctccccccgtaccctggactgatgcccgctgcctcaccctcacgttcttctccatttccagcaggacccgcttgtgctgctctgcgatggccagggtggcactgtggacgcgctggtaaatctgctccccctcttgtgtctggaaggtatagagtccttccccagcatcacacatcctggggacacagcacagagggcaagatggtggggacccaccacagacatgcatgtgattagttaggctctcttgcaactgcaagttgtggttgcattccaggccgggaggacaggtagggctgtggtctgggggtccgaccacacggtgcaaatgtgctgagcatattctataccagctggtgcttgaaatgcattataagaattaacccattcagttttctctaccacctccctctggtctctgtaccattaatggtttcctcattgttatgcattttcccaaaccattttatagatgaggaaactgaggcatacagaagctaagtaactcaaccaaggttctgcagaggattatatggaatttcagtctaggcagactgactccagagttcaagtgaggggatacccagtcttcactataattctaggaggttaggtactttattatccccgaaacccagactcagatccacagtcacagaagtagtaagtgcctgaacctgcatttgacttaagccaaagtagtatatgatttttggtaaatagcttcacttgacctgcatgctgtgggcaagttactcctctaagcctccatttcatttcttcgtctgtaaaatgggaacattacattcccccttgggattgctaggccaataagtaaaccaagctcctagcacagtgcccaacacagagtgaatggcagccaccatcacaccatagtaggacagggctgggaggcgagagggtcctaccggccagcctcgaaggtaaagcgtgtggcatcccggccatagcggcgcagtgagcagaggggccacgagacgagcttcacacgggggttgtggatgtcccagaggtagatgttctcgtgggtgatctgcagcttgcactcgccatacacgtccaggttggggcagggcagcaggaagacattgaagcgatctggagtgggggagggtggacaagtgggaccagagttgccccagatggggacttcctccctccctycctctcttcctcctccccctccccacccccagggccagggcccggcctcacctgtctgttcacactgcacccctggggccaggaggtcaggttctcccagactgatgtcgttgaggcgggrccccagacactccacagatagtgtcttgtaccactcctctgcctctagctctgaagaaaatgctacttcatcatgcagctccagagcccggtagcccaccccgtctgcccagcctgacttatgccaccatgcacagcagggagggtaaggacagtgggttctgcctgcctgtcttgcctcaaccctgagggcctgctccctgaaagcacccccaaccccacacacaccacaccaccatctccacccagggttagccctgctctgcccgctcctagctggacctctgaccaagaccaccccaggggaggcagatggaggcccatactcgcgcctcacctgagtcgcaggtgaaggtacgtgccgagtcatcagtgaatatgatggccaccgcctgccgcttggtctccttggggagccgcgtaacacacttgacgttgctgatctcagtcacctgggacagcatccacaagggacttagccaggccagtgcatctctctctctctctctctctctctctcctccctccctctctcccccctcctccttctctctcctcctctccctctctccccctttctcccctctctccctctctcccctctctccctctctctctctccatcccccacagccctgccacttgggggagctagggcccaggcctcctaaccttggggcagccccggaggcacaccgacttctcatctggatacttctccagccgctggggccccttgctggaggatttccggaacaccagccagcacctccggtagatctgtggagcgagatgacagggctcaggcctccctggaccactcccaccccaccagcatggccctgcagccacccctgcctgccacasggggcggtgccgcacagccttccctggagccccagcctggggacaccgggggtgggagtcaccagcagtgtcacctccctgggagagaagcctcctccccaaattgaaaagtcattgacttcttggctggctccaaaacgctgttccacaaagggtgctctcctgacctgccatgtactgtgtgcaccgctgagtttagtgtgagtagccaacgttcctgagtgcttcctgctcacacctgttattagcactgtgcacagtctcagggccactcctgagatcagttctgttatcatccccattttatagatggggaaagggaggcatcaaaacactaaggaatggtgatgctggtatttgcagcaggctgtctagatccagggcagaccctcacagcccactgcaggatctggccagggctcaggcagtgccagccacaacagaggggtctcctggggatagggattagacccttccccctgcccacctgtacatccccgtgcccctagttctctgagtcaggtgagggtctttacaaaggtaacccccactcttgtctcctggggctttcactcaccctctcttttcattctcttaccaaccctgaaatgtaaggggccctgctccagctgggaacccaaagctgtttgaggtaaaggggtggagctaggaatctgaggctcctcccacagcatggtgccttccctcctggccctggccactgctgatgcccctgtaccttaaactacctacattctctgtagcttcagggactcccccaagggggtggggagcagaggggagtgaccactctaggattgaagggacagactggcctatcattcatgggtggtggagagggagttggccccagccaccagccagagctgcccttgcatgacccctccctcctgcctagacttttttctgcccaaagtctgtggctggggtttacctactccttccagcgggcattccaaaagcccgacagagcctgttccccaggcatctctggtgttcctcttactggaaacagtagggagactgagtggtggccgagagcacagcagaggaggccagggggcctctaggccccacccctcctcggccctactgtgccatgcgtacactaggtccttggcaggcagggtcccagggtgcagtggccctaggcagcccccatttcaagataccactcagagccaggccatttctggctcctatctgggaccctaggaggcatgtctgctcctgcacccctgaccctggcttggcccctgtcctacccacctaaaccacagcagccctcagctctcagctgcagcgctcccttaagacagacactgaattttatccacagaatcctcactcatatcctggtagcctcattaacagccatgctaaacaagtgaatgaccatatgaaggaaccgtgaatgaatggatggatgaatggatggatgctgccgacccagatacaccctgccagggtgggctccatgcagcccgcagcatcaggggcagaaggcctgggggcctgagcatgccggttgcctggttacaggatacacattcacagccccagggagccacgcgctcaagagccctccttcccacttcgcacagggctttgatcagtgcttcagaaacactctgccacagctctgccrcgggagaaaggccctggcaggtaggagagccggctcctgatctctttcagcccctcccccctcacctctgtgggctgagatgagaatggctgctggggagggaccrcagcctctcacaccaggggaagtgaggctcctggcttcagagggaagagaattccctgcatggatagggcctggctatgccccacctccccatccaggctgtgcccacctgtcagccactcagtctccctctggaacaggtttgatactgagcccaagtggctgcccttgtggctggtgccttcctggcacactctgccctgggcaaggcctcagcccagctggcccctggggacctgctaagtctggggccataggaatgagaagtgatgttagaagcgaagcctctgcttccttggcctccctacctcagcctcagcttctctctttgttctgtgctccaagtcagtgggctgatccccctttcagaggaagagcaaagtagccgatggctgccagggcccagtctcaactaggttgagccccagggcagggaggcacaggaggggaagtggggccagaaccaccttctccaagaccagccctgctctgtctggtacccaggtagggaagctgggtggcagatccctctcccactccgcatgccccccaaccccactcaggctgagccagggatccttgagcagcctgagccgacccgcccccttcaaggcaatgggagagagaagggagaaggggacaggagtcctgggtcaaacacaagacttgggtgacctcagtcaccagggctgtccttcctacaggggaaggggcaactgccagacctgtctttggcaggggggcctggcagaggaatagaggcagctctcagacagcctcgccgagatcatgaagttgatcccctctgctcctgtcttctagggggtcttcaccagttgggggtctacagagggtaggacaggatgr

SEQ ID NO: 94716 - DNA, 18006 bp, Homo sapiens
  misc_feature (1)...(18006): n = A,T,C or G
actgatctagtagtgataaattcccccagcctttgcttgtctgggaaaggctttatttcttcatctacgaagcatagtcttagctggataccgtattcttggctaacagcagtatctacatctatttcctggaattctgtaagaaagattcatctcttgaattgtttatttaggtcactacggactcaggtatatttatttgactccaggggctgtaatccaaggtcgtgtggtttgtctgaggctcgggctcagaagcccatgtaagatgtcccagcctcttgggttgtgaccacctccttcccctctggtgctacaagcagctccaggctcatcttgtatctcccctgctccaactccagaagcagccattccttcaaggagccctgcttcatctggatactttcacctttagaaaactctacagaggttttttgacagtggagtcatctggcttcaaacttttctgaccacccagaactgatcccaggacacacagtcacacctaagacacaagtcatgcacaaggtggcttgcccgtactacctgggacgccctctgctgccttctgctccatctcctccatctgctgccactgccattgtgggtaatgctggtctcatgccatgaagtgacgtctgaatccactgggggcagtccgctttccccacatcagacaagccctgacccagctgtgatcagaggttcacggtgattgcaactaaatatactgaagtttttgtgcagcaactatttagtgtctaccaatctttttttcctttcagtcttcaaataagtctacagattgaggaagaaggtccttctcaaggaccttcaagcaagggccaagcttctgtttctaaagtgcaaatctgaccacatcattatgttttcatgtccctgtgctcacaccacacagctcttcagcctccactctgtctgcagtgccctctttgcctgaacaacttctgtccctcccagtccctccactcagcaggcacatgacacccctctcctgggatgcctccctactgtccagtactgccctgctgccactacaccctccatgtccccaagcaacactaggtttcctgcccctacccccagccctaagagtctgtgccatcagcatggaccacacatgagcagatgtccaggaaacatgtcccaagttggaagcttcatgaggagctgctacacaaccccctgccccacctgtaccatcacaggcccttcagctgacatggtggcctcagaccctttctgaggcaagatcagtgtcacagagtccagcatggaacaggctctgggtcctgaggatcctgatggggctcaaggcagcctcacgcacatcctgttctctcccaggtggtcaagcgggtgctgacccagaccagcagcgggggcttctgtgggaacgacggcttcatgcacatgaccctggccagcctgccttttggaggagtgggtaggtgcctgctaccctgcccttctgttaccatttggtcaaattgcaatagtgttacctgcatacatttctgccaaagcaccccagccccacctcaatgtagagggacaggcaaggaggcctcaccccagaacccgcatcctgctccccaccccagagggtctgagtccaatctgggcaacacagtaagaccccatctcaaaaaaaagtctgtggtggaaccttctagaccatctctgcacagacacacaatttagtgaatttttaaaaataccacacaactatgatcacactgcccactgcgatgctatttgctcttctccccaacagcatgacctggtgtctgcccctcagcagcaatgccgccggtgtcctttactccagggcagctgctcctctaaccccatcccccctccagctctcagtacaacacctccccaccctgagaggcccggatgagtgccaatcctccaccccccagagcagccccgatgccactgcagagtcctggcctctgagtcaggaagcctcagagatggtcctagcaacacgctgaaggccctgtggcccaggtgacatctcccctttctgagcccacttcctcctcagagaacagtaggccccgagcaggtgacaggcagtcccgccacctgtccacactcagcaccacagtgaacgatggcagggccaggcaagctgcctcaggtgggtccatgcccttcctggagggcagccaggggcacaacagtgcctgtgctgctgtcctggctcggctcgagtttgggcggctgcccccgaccccacctagctgcctccccagccccagccccagcctcctcaacccgcctccctgccctggaggagagtcggggctgtctgtgggcacatctgaccctgctgctccctcaagaaagcctcccccagctcccaggcccccgagctgacccttcttggtggccgtggccccaccccggcttccccacctgctgctcccacagcctgagctctgcccaggtccctaacacaccgcatggcacccacctctaaggctccccaagcctgggtccctcttgcccccacccactctcttcgtcttattaactgcatatccttggagctcactcactgcaggaagccccccagccaaccccactccacccaggctgtgctctgaacgccctggcctggggcctcgtctgcctcccaacctagacgctgaggagagttcactgcacatagcacctactgggtccaggggtctcaacatcccctcaatccccaccacaaccttaggagggaggtacccttgtcaccccacgacagaggagactgaggcacagtccaaggtgacatggattgtttgcagcagggccagagtttaacccccggcagtctgactctggaatccatgcccttgaccaccacctgcctatcttgccctggcatctggcatccccagggcttactgagctggtgccaagctcggggccaagccctttacacacagtgcctcatgatcagcccactggacagatggggaaactgaggctcagaggggagaagtagcccgcctaggccccactgtctgtgactaggagacccccagcgcctgaccacctgtgttctgtgccactgtacaggtgccagtgggatgggccggtaccatggcaagttctccttcgacaccttctcccaccatcgcgcctgcctcctgcgcagcccggggatggagaagctcaacgccctccgctacccgccgcaatcgccgcgccgcctgaggatgctgctggtggccatggaggcccaaggctgcagctgcacactgctctgagcccttccccaggcccaggctgtagaccaccatgacagctgtcgcctgcggctggtggagacggggcctgggctcccgggcccgaggaggaaaaggattgccaaggctccagggcacccctcaaagcagcgcctgcctcctccctcctgggtcttccctctccctgcctcagcctcctccctcagccgctcccaaccatgagagccgaggtgggaggcatgggaaacagtgcagtgactcaccccctgcccccgcaccaaccacccatattcaggagaagaggacagacacggcacctctgagtcacccctctcctgtggagcgggcgtccgaggggccctggcatctgactcaggccacaccatggaatcactgcatccaaggccattcctgccctctctgagtctcagtttttccatttgttcagtggagagaattaaccattgatacctcctggctgggtgaggcggctcacacctgtaatcccagcactttgggaggccgaggcaggcggatcacctgaaatcaggagttcaagatcagcctggctaacatggcgaaaccccgtctctactaaaaatacaaaaattagcctggcgtggtggcgcatgcctgtaatcccagctactcaggaggctaaggcaggagaatcgcttgaacccgggaggtggaggttgccgtgagctgagattgcgtcactgaactccggcctgggtgacagaaggaggctctgccttaaaaaaaaaaaaaaaaaaacctcctgggactgttgcaaggatgaaatgaaggattgagggattgagggattgctgagctggagctccaggtgtcctatctttctcagtggggtggcacggagcggggccgcctccctcttctctccaggcaggtggggctgtggttatgcgatagggtctcccttccctccagcccatgccagaggagcttgtaactctttatcctcatggtgcccactacgagtcatactcttccccatgctgctcatcctcctgggccccatccactcagccaaagcagaatgcagggtttcctgcctgacaacccttctcacctcccaagtcccacttttgaacaagctgatgattctgaaactggcccaatttcctaacaagccggatgcttgagaaacctacatttggacaatgagaggctgctcctgcggcctgcgggccacctcctcttccttggctcctgctttctttttagactatatcaacctacaactttagtcgggaagagggacaggggtggacctgagtttcgtctcctgtctctctggctgatgtcacctgaataaagccttcttccctggcaatacttacatctcagtgatttgctttctgtgcatctagcaacaggactctggaccaaggccctggcgttgggtaacaattctgtaatgctgcaggacttccccaatccacgcaggaatccccgcaggcatccacgcaggaatcacctgatgaagggccagggtcaggtgtgggccaccatcccaagacctcccttctctctagggccagcccctctcctctgagcacctgctgaccagcccaaagccctctccactcctcagcttgaactcccccagggtctccctgtggcccacaggtcctttggaggctcgggcatctgcatgcaaatcccaaaccactgtcccctttgcacacactgagcctgcccttgtcctcgtcctggtctaccatgcgtgtcctccctctgcacgggcatgggacatgccctctgcctccttcctgtcctggcctgcccaactcctacctaccctcagcgcagatcctcccaacacacacatgcaggcagcctcggggcctctgcgggtccctctaccacagcattcccggggaaaggcccggcgtggtggctcacgcctgtaatcccagcactttggcaggccgaggcaggaggatcgcctgagtccaggagttccagaccagcctgggcaacatggcgagaccccgtctctacaaaaaatacaaaaattagccgagcctggtggtggcaggcgactgtggttccagctgctcgggaggctgagaagtgaggatcacccgagcctgggaggtcgaggctgcagtgagccgagatcgcaccactgcattccagcctgagccacagagccagattgtctcaaaaaaaaaaaaaaaaaaaaaaaaaaaaaaaattcgctggtaggaaacataggctggttgagtacgggagtcatacagatcaggtggatcaggcggccgcacaccgcagctctacggcccgggaacgttactaaatactcccatgcctcagcttcccgccttaacgtggtaacacgttactgtagtttctccacgcagagctgctgtgaggattaaaagaggccgcgtgagttgagcatctcgtcgccattaccgtcatcacacgccccccacccaacccggcgggcccaccctctgcacccacggcgaaagcactctttctaaaccacgccccggatgtcccgcctccagcggctcggaggtcttcacttattggcctccccaaaccaacatggcggccccctacaaacttcaagcgccggtctctcctagccaatcaaaagaaagatatttctgaatcccgcctctttcagcagccttgctggccaatcagaccacaccatgaagcatcaatacagaaaagggggaacccgctggcccaatggcagcgtcctacagtgtagcctccgcctcccgattgactggcctgcttggcaaggcaagtagcggcggcgcttcaaggtgggtgttcacgttttggccgtgaaagtcgggcttgggcagcgtggcgtcgggggcgagtgtggtgtccccgttggcgccgccagctctgcgcctgggcttcccctcggctcactcaggatccgcggcctccgtgtccttcaggtgcagyggggagccggctctcagggcgcatgcgccgcccgctctgcgccaccggcctagttagggtcggagatcactgggaaggtggggaaggtgctgggttgggtccctggaactgcagtcagtgatccaaaggagtgggcctgttagggggttcacaggtcgtgggatgagctcttatgagcgccggctaagtgccgggctctggggtgcccttggcatrtacgggctcccctaattcccaagaccaaccgcccccaacccacttcataggtgagaagacggaggtcaggtcacatcatctgcccaaggtcacgcggcaggctgggggacagttccaggagggccttgaagctggggaaaggaatgtggtaccgaggactgttcaggccttgaagagtttccagcagggcagggctgggttccgatcctcggcccacctccttatcgtgtgacttccgacaagtcacttttttatcttttttttgagacaaggtctcactctgtcgcccaggttggagggcagtggtgcagtctgggctcactgcaacttctgcctcctgggttcaagcgattctcctacctcaacctcccgagtagctgggattataagtgcccaccaccacacctggctaatttctgtattttttggtagggacggggttccaccatgttagccaggctggtctcaaactcctgacctcaggtgatccacctgcctcagcctcccaaagtgctgggattacaggcgtgagccaccacacccagccctagcgagtcactcaacaaactgagtcccagcgccttatttgtgcctccctcgtggagtccttgtaaggataggatggcagcgctttccacccctgggcacggttcctgggggaggagagctaacaaagttcgctctcagtgcatgctggcnggggctggtaatgttgtttttggttagatttggggaggatgaagggaggagcagaaaggtgggaaacaggatctctgggagggagaaaggaaggatggatttaaaaggtttcttaggtgaggcagaacttggggtccacagaaactgaattgtagctcagccaagctgaatcagatggaaagctgggaggcgctgggaacaggaaagccatctstgcctctgacagcaatggggtgcgagtagagggcaaagtgacacatgtcagtggagacttgggatccttgcggtgccagtctcagaagaggatggttcttgggyacaccccaccctccatccctttttatgccaccagatgcgctgcctgaccacgcctatgctgctgcgggccctggcccaggctgcacgtgcaggtaggaccaaagaagcctttgctgggggtaggggagtccagtctcctggtatgasgtcacgcccttctttttgcaggacctcctggtggccggagcctccacagcagtgcagtggcagccacctacagtgagtacctgggtggcctctagcctcaggtgttcctgactggtcctgctggagtaggggaagagacctgagttccagtcctggctttgtcaggggcgttcttctctgagcctgtttccactnttaaaatgattatggtgatggagactgactctgattcacaggggcagggtccatcattgccgaggttagcatgtgtgatctcagagctccctgggtgtgatggggagggggttgccaggtgtgagccatgggtacctgtgcctattgccagtccctggtgaaggcaaaggctcaagccccccacctaccccccttgattcctctttcaagccctgttgggcagggaagtgcgtctgggctccaatggccacccaagcacagggagaggtaggcacggacgggctcaggccagaggcggcctccagggtccttgctgaggctggggagaggtgtggtgagtgtacagcccctttgtagcccagcagttgcacctggaagtgagggccaggctgctctccctgaggctccagggagacagtgtgtgaggcctcttgccatggcctccctgcccgcctctctgcagagtatgtgaacatgcaggatcccgagatggacatgaagtcagtgactgaccgggcagcccgcaccctgctgtggactgagctcttccgaggtgcgtcctgggcakgaggggacagggaaggtgccgggtgggcacggatgcatgggggaggagggtgcccctgcccaccacacccgtgctgcccacaggcctgggcatgaccctgagctacctgttccgggaaccggccaccatcaactacccgttcgagaagggcccgctgagccctcgcttccgtggggagcatgcgctgcgccggtacccatccggggaggagcgttgcattgcctgcaagctctgcgaggccatctgccccgcccaggtgagcccctgccccaaccggccaccacgccagcccctgccactgggagagggaggccaggcagccctaggcccaaaccctagcccctgcttgatgtgcgtccccaggaagtccctttccccctctgagccacttccctcgtgaatgggaatgatgagggcttgttaccagagcacagagtcagtgagttggcagagtgaagcttccagccctgggcaggcgcctgacacacagaggttcccccttggggtctggccaagggtgtgacccctgggcctctgagccatggggtgacacctgaggccatccacgcctccctggatgtagccaccgtttccggagtcctgcttgtgtgcctgttgcagcttcccttccccagtggctgctcccctgaggcccggctttccgttctcttagtgggtctcgtgcttacccgtgggggccaggcctgccagcacgggaacaatatgactcggtcagagctctggtcagacccctgtgtgtgcctggcaggagccccggcagccgccgycgctactttctgtgtgcacagcaacccctcccagtgttctgtgactcgggtggctcctgtccagatcctagtttgtcctctggagcactcccaggtcctccaggccatgagctgcggccctgatgtctctactccagccacggactgagagtgcataggagtgtccccaaacagcagtcacgatggtcacaaccttggcttccagacagtgagygctgtccacagacagacccgktgctgtgccatgtgtgtgactcacagcctctcctgtaatctccacaacccctcgaggaggtcgaggttattgtctccatctttataagcactaaaggatgagcctgccagccacaggtcccactgtgagttgtggacactacatttctgggatgggggcatatgagagtccttgccaagcacatttgaaggttttcccagccagcccctcccccagcgggctacccaggaactgagagttaggacgtgcccttgagtttgggctgtgcccccacttgctgtgtagctttggggagcccctcaacctctcggaaccttgtttttctcatccatcaaatggagagaagtagatttaaggcacaggattgcacccaacagtgtaggcattcttggcgatgttgcaggttcggctccagaccatcggggtaaactgagtcacacagctgttttggttttccagtgcatttaaaagttagatttagaccgggcacagtggctcatgcctgtaattccagcactttgagaagccgaggtgggcggatcacttgaggtcaagagttcgagaccagcctggccaacatagtgaaaccccgtctctactaaaaataacaaaacttagccgggcacgttggcaggtccctgtaatctcagctacttgctaggctgaggcacgataatcacttgaaccgggaggtgggggttgcagtgagccaaaattgaaaaaaaaaaaaaaaattarggccggttgcggtggctcacgcctgtaatcccagcactttgggaggccaaggtgggcggatcacaaggtcaggaattcaagaccagcctggccaacatgttgaaaccccgtctctagtaaaaatacaaaaattagccgggtgtggggttgcacacctgtagtcccagctactcaagaggctgaggcaggagaattgcttgaacctgggaggcggaggttgcagtgaactatgattgcaccaccatactccatcctgggccacagagcaagacttcgtctcaaaaaaaaaaaaaggatttacactgtactgtaggctgcgaagtgtctaaaacacaatgtatataccttaattaaaaatactttaggggccaggcacagtggctcacacctgtagtccaagtgctttgggaggtcaaggtgaggggattacttgagcccaggagtttgagaccagcctgggcaacatggcaaaaccccgactctacaacaacaacaaaaaatacaaaaaattagcccctgtaggcccagttacttgggaggttgaggtgggaggatcgcttgagcctgggaggttgaggctgcagtgagctatgagctgcaccactgtactccagcctgggtgacagggcaagactctgtctcaaaaaacaamaacaacaacaaaaactttattcytaaaaagtgctgacccagagataagaagcaagcacatggttggtaaaatgacatcagtgagcttgctttatgcagggttgccccaaaccttcaatttgtaaaactcaaaatatctggaaagcttggtgaggcgaggcgggactgtaactcagcactcaccgcagggtgagacccttagggcagcgggtgctacactgaacaaagcggtgaacagccccctcgtgagagggggttcttggcagatgacgccagcagctgacaaacaggcaaggcaggccgggcacrgtggctcacgcttgtaatcccagcactttgggagtccaaggtaagcggatcacaaggtcaagagatcgagaccatcctggtctacatggtgaaaccccatctctactaaaaaatacaaaaattagctgggcgtggtgatgcacacttgtagtcccagctactcagggggctgaggcaggagaatcacttgaaccgggaaggccgaggttgcagtgagccgagattgtgctgctgcactccagcctggcgacagagcgagactctatctcaaaaaaaaaaaaaaaaaaaaaaaaaccagcaaggcagggacgccagcagggcacgtgctgaggagacaggcgcgagcaccagaggtgcagggcggcctcttagccggagtccaggaggcctttgaggggagagggcttctggcagaccccaggggtggggatgagcagtgacaggggccctgggggctgggatgtgacagggcagcgtggcagtgtctggtggcccctcccgcaggccatcaccatcgaggctgagccaagagctgatggcagccgccggaccacccgctatgacatcgacatgaccaagtgcatctactgcggcttctgccaggaggcctgtcccgtggatgccatcgtcgaggcacgtgaggcccccgggtgggagggggcctgaggctcctcagcagggcctaaccaccgtccctgcacctcaacmtgcagggccccaactttgagttctccacggagacccatgaggagctgctgtacaacaaggagaagttgctcaacaacggggacaagtgggaggccgagatmgccgccaacatccaggctgactacttgtatcggtgacgccccaccggccygcagcccctgctgcccaataaaaccactccgaccccacggcctcttgtcttgactctggtggtccagggtggggccgttcccggcctgcctgaggcctgtggtgcctccaactggactaggtcgccacctagtctttatgctctctggagtcctgctgccccagccctgccttcctgtagactccagggccccaccaggctctcatggctagaccacaggccgcagcatccctgtcaccctgcctcttcctgggcgtcttccccaaggcccagcgatgccagaggtcaccacagacctgccgttcccactctcccgggtgtcctggctggggcctgggcctcctgtctcccaagagccatccacttgtaagacgcttaggacttggagcctcccaagacctcaggctgaagaacagcaagtggcagaaactcaggccggggcatccttgctgggggtaggaggaagcctgcttggggtgacagtcacacgagggtgacacaggccctgctggccctgagctggcctgcgtccagccacatcctctttcctgtgttccctacgccagggtgctggcccggccactgctcaccacttcctgctttgctggcccagcgacacggtggggtttccctagggccacacacaagccccttgcccatataatggccaaaagcagcccccctgaacttgtgctaagtactgtggaaggatttcacttcatttgcagtgagaaaaccagctccgagaggtgaaagggcttgctcagggccatgcagggcacatcccataataaaactcagttcagagaccttgaccccccccatctaccatcatttccaaaagtgctttttacaaagcactactttgtaaaaagctacttcttcgaaagaacaagtttcctggcccagtgagtgttggaaatgctccagctgctgtgtgcctgctggcaggtactgcatggtagacattcaaggctctgagaaggcctgcagcaaaaacaccagcctctcccagcccattcccagggagcttttctcaggtctaacacctgggcctccttcctagaccaggcattgccatctaatgccaaagtggccaggctcccgcttgggccccacagcctgtggcactggggtgagaagtaactgcaggaggcgaggggaagcctggagcccgggaagtgtccacaggtctggcccgcagctcatcttggccactgatgaaaacaggtgttctttccaaaaacaaggcaggcgcaggactcctgaagcaccgccggtttagcttttcccagacgtaaccgccgtcagagcgtggcatggagcctgtagctgtgcactgaatacttctattccaagcgggtcagtctttccagctcaccgctgggttctttcccttaccgtggtctcccaggcacttactgctgagaccccactcaggctgtctggttgtatcaggccccgaccctgtcagaacaggcctatggcgcccaaccacaagtcccccaattttctgaggaaccacagctgagcttggctgtgactcagtttccaggcccggctctggggctccacttgtccacccctgccgcagccccacaggcctgtgctcgctgtgtggggcttagggatcaccagagctgaagggcccctggcctccagtgggaatgccccaggcctgtccaaagtgcaggcagctggacggtcgtgagtcccagcttccaggcactaggacctgatgacgcccatggtgctgacctggagcaaggtcacagtgacacccccctctaccccccgcggctgcagctgcaggtggagctgacagctggcctctggccccagggtatctcccagggcctgctgggtgcggggcgctgggcagaacaaggcagcatggcctggccctgtgtcctgctgccagtgaagcaggcccagagtggggcagccacccacccaagggccagagcggggcctctccagggtggtcaagagcaggaaggtgtaagcaccggcgggtttcactgccgcccaagggaggggtcccggaggtgggggagcatcctggggaccccaagcccatgagcctgcgaatgttggggtcccatcagccagaggcgcacaagcctcgaagtgagaggagagcagggtctcatctcctatcctgagctgggcctgagcggagctgcccctgcatcggggccagcatagacgcgcgcggttggcagtggtctgttatccgctcctttctccaggcctcctctccgggattaagcgcctcaggacccgtccgccaggccacagcctgggctcaacctctcccagacttcctggactccagtggagccttgggccgggggcggggcgtccctggcccctcccccgtcgtcccgcctgcccggaaaggagtgagcggcgcctagtcccgggctggcgggagtgcagttctgagtcccgcccggcgtgcgcggagcggggcagccagcagcggaggcgcggcgcgcagcacacccggggtgagtgcccctgccggggtctgcggagccccagaatttcctgcccaccctcttccccctgccccggggaggagatcctggcgccccacccagttggctccgtgaatgcagctcagcccgccaccccgcagggtgtcaggccttgcggggggccacggaggatccccaagggaggaggagaaggatggggtgtttaccaacacagcccagcgttcccgggcctggtgtgcgcggagctttccccgctgctgcttccttggagggagggacccattctacagatggggaagctgagaccacacaactaggaagtgtcagagctggagaccagctgggtcatttgactccagagcccaccccatttggaatggagggggcgccagaccctctcctactgccttcccatcatctggaggggagggcagaggtgcagagagacctgctgggttcctggaggggccaggaaaggggcacagggtgaggagtgggctggagcctggaccccagggccgcaggatggaggcgtattcatttacaccataaaagtggctgggtgacccctggctagagcggggaccaagggggacaggggtagggggtgagccagtggagcctcacatgccaggcacgggggctgatcacgtccccacacctttccccccgcccattacaggttgttcccccaccccctgggaagtgctggaaggagcccggccctcgagccctcggcatagtggctgtgggagccctgatggccctgagccaggggtgacccctccccagatccccagagctgattccccacacctccttatttggccagcacagccccaaagggagccaggtcagacacaaccctcctctgagctcaccctttgtgctgggcacataacattggactttacctctccaagtgtcagtggagtcctgtatgaaacaaaagcaccgtaccccctccccaagggtttctccccccagggattagtgtgaggtcgtgtggatgaagggattcagttgaggctctggttatttttgtcacctccctagatcctgtctctgtcaggggtgccacgtcccattcacccaaagaggaagtagaggcacagagagggtgagagacttgcccaaggtcacacacccaatctcagcctgggctccaagtccctctgccctgtggccgggcctggtccttagggatggaacccagccccgctgccccctgccctgcccacctgcagccttgggccatctgctcagtgttccctcgttccctccttctctcctttcccaggctggggctggggctgcgtttccctgtttagagttaagtaaaccagacccaggggaggaagtgactggctgggcaggcggggccctgaccaggcctgtcccctccccctaattttcgagctaagcaactgattcccacagaggggccctgggccctgagagcagtggctttggagctggaggggccccagcatccagggcgggttggaggtggcctggcacctgcccccaccccacatcggccttgagcaaggccccgggcccttccccgccattctgtagtttcacttttgttggtttcaacacctggaaggctgcggctgctgccgggcggcccgggcctcaggggacagcccccccacagcagtgctccctggctagccccagggtacccggtggagatgcccgctcctaccactcagcacatgcagctccacagggagcagcgagggctccagccacccccggggcagccctgggcctaagtgcctgggccagtggggtcctgtctagggtgacggcagcccgagaggagggaggccagagtgaaggtgggggtggagccggtgtcactgggagacgctggaggtaggggcgggggtccccatgggcagagcaagccaggagagagcttgaggtcggcctgagggtgggcttcggggtctcccagtcccactgcttactttctgcgtgacctcagcaccgcatcaagcctgcccaggcctcagtttccacctctgtcagatgggggtggtaacagcagcttccaggattcagtgagtgaaggtgcacaggtgcccgtggttgggaactgtctgtggtctgcccctgactggcccccatccgtgtccacccacaggaccatgggctccatgttccggagcgaggaggtggccctggtccagctctttctgcccacagcggctgcctacacctgcgtgagtcggctgggcgagctgggcctcgtggagttcagagacgtgagttgggtgggcaggcgtgggaagggggctactgccaaggttagcccggaggccggtccaggatggggactgccccccctccgccatagggccctggccccatttgaaccccagcggcccctgccatgggcactgctcatgggaagcccgcagctgaggcccctgagctggctcctccccataccctcctggggcatggggtctggtctgtgctctgatctgcgtcttgtggctcccagggcactccacacctttctggaggaggcagctaaggcctggggagagtcaggcctgggctctagggtgaggagctccctgacccccttcccgggacactcacccctccgtgtggcacccacagctcaacgcctcggtgagcgccttccagagacgctttgtggttgatgttcggcgctgtgaggagctggagaagaccttcagtgagttggtcccaggcctacattccaggcaggcttcctggaggaggcatgggccaagtttgatctgaaaggaagagtctgggtttgccaggtggaaggcagagaagggaggtatatgcagggccctgcagggccaagacagagcagctgggatctgtgaagtgtgcttgcgaaggtggctgccttgtgtgggctgagcagagggcctagggcagggctggctggggaggcctcgaatacagcataagagcccaggacttcgtcctgtgggcgccaggaagccacaggggtttctaagcagggaagaggcacagacagctttctcctctacagctgggctggggtgggtggggcccaggatctagggtagggtacccctaaggagcaggcaaaagggacccctgccctgggcaacccctctcaggaggagcctgtgggggcaccaaggcaggggcatggggcaggcagggttttgtgtttgctggtgcagtttacagcttttcaatgatcaggcagacacaggactcacgccagctccggtcccaagccctgcagcgcaagggccggcctgtggggagacctcaggccctcttctgagtggtggccaagggactggggagggagagtgagcccagacctgagctcagggaggggagcacagcttctggatgaaagtttggccgggattttctggccacctccacctggtgaatccagcagctggtggccgatggagtttggggcagcaggtggggccctcaactgttgagacaacctcaactgcaccccactcccgttcctctgcgcccagcctt

SEQ ID NO: 94717 - DNA, 26538 bp, Homo sapiens
gaaagggaggcaaaggccaaagaaccataactaatggctgggcttcaggagaaagtggtcattgtctctgcagactgcagagagggagacgggagggaaggtgtgttcgctcttcctgccaagggccctagagacagagaagagggatgtctttgtcataagcgatcacaggggactcctgaggactggggagggctctctgtaacttgggaggttccccagtaggtaaattgatggatttttctcccccacagtgcgaaaacaggagatcattaagattacagaacagctgattgaagccatcaacaatggggactttgaggcctacacgtaagtagagacccatttttttttgtgacctaagtcatctcccaaggccttccctgcttccagacaacaattaggaccctggggaaagggaggttggaccttgggcaaagtatctgagttaagccctctcctaaactgggagcccttccaggtagattccctgagctcacccatggtatcctggcagtgggccgaaagcacagggctgagtggctcagcaggcaggcctggaagatctttgctgtcttgtctggcatggccacaggtagcctgctgctactggatagacaccgctgataaggaaggaagacaagtcactccatagaagcctgataggctgcttttttttttctccctgtaggaagatttgtgatccaggcctcacttcctttgagcctgaggcccttggtaacctcgtggaggggatggatttccataagttttactttgagaatcgtgagtgggttcgtgctgctgatatactcctgcctgcccctttacccctttgtctctgtctcctgctcaccttctcatcccagttgcccacttttcccttatttgaccttcgtgctgcactcctactctgtatgcttgtccccttgtgccccgatggttgtagacaggcacctttgaaggccctgctcctgagctccaagtgccattcattctgcagctgctttgtggcagtgccagtcaccacaatcaagctcacttatttcttgccgggcgcggtggcttacgcctgtaatcccaacactttgggaggctgaggctggcggatcacgaggtcaggagatcgaggccatcctggctaacacggtgaaaccccatctctactaaaaatacaaaaaattagccgggcttggtggcagtgcctgtagtcccagctactcgggtggctgaggcaggagaatgatgtgaacctgggaggcagagcttgcagtgagccaagatcaggccactgcactccagcctgggcaacagagcaagactccatctcaaaaaaaaagaaaaaattatttaagcctcacctctttccaagacggattggaaggaaaccctttgagattaggttgagatgatctcagcacataagaactaagctctgtgtctgcaggtttcacaatagaggaaattaaaaccaggataagaatgtgcaaaccagggcactgttggtgatttgcgagatcggaagttgtggctagaatcttcctgactatggaggaaggcagacgtcttgtatagggggtggggtgtacattctggacagttcatggaaaataaggggataagaagctgaatcatcaccccctcccatctttctctctgctctatgagaccctccccttccttatttttatctcttcccactttatgctgggccttccctatcctgccctgagttatagttagtcactaacttctccgctggctcccacccttatcacatctcagctacatatataaactctctgttatctaagtaattctattagccagaagcaattccagagtttatattagtactaggaaggtgtcatgtagcccctgtctaacatttgaattgaactaaaatgtgaatctcaataaaagcaacacagttttcacagcatatgctgataatggcaatccaacttcttttgccttttccccagagaatcctgggaatatcctgagcttggtgctttgatgattctatttcagctttggtgccttaaaaaaaattacaaatcaattttgaatggtttaagttcatgattttgttctgcagccctagctaggggtgagccaagccttatgaaatctaaactcagcctaacagaatagaaaatctataggctttagttaagagtcacatggtcctgagttcaggtgtgtgatttgagcaaattattccttgagcctatttcctcatcttataatgaagaaaatattatccaccaagaaatacagctcgggcatgtaaaaccccagcacaatgcctgattaaaagcgcagcaggtactgtcactgttacccatctttctgttccttttggataaaggagactaatgtaatgtggcatcctggcctctggagggcgttcaggggttcgggggtgggggggggcggtacttggagattctgggagtggttgcttgggagatggtaagacttggaagtgcaggctgggaggaaaatgcaggtgcccaggcctgatgtcctcttacctaccccaccctgccctgcagtcctgtccaagaacagcaagcctatccataccaccatcctaaacccacacgtccacgtgattggggaggacgcagcgtgcatcgcctacatccgcctcacccagtacatcgacgggcagggtcggcctcgcaccagccagtcagaagagacccgggtctggcaccgtcgggatggcaagtggctcaatgtccactatcactgctcaggggcccctgccgcaccgctgcagtgagctcagccacaggtgcacctggttgacgggggagaggggctggaagggcctgggataggtggggtcagaggaagaagagaaggctgggaggtggtcctgggagaggaggtgtgggccgtcccagaggactggcaaagcctggcagaatggttgcaataagttatgcttggaaatcagacagactagggtctggctccgtgactccaaattggatgacctcagacaggttacttcccctccctaaactgtttccttagctgtcaaagaaaggcagagagtggtgcctacctcatttaatcattgtgaggattaagtaagatactataagtaaagcacttagttagtgcttagcaaatgggaggcagttttgtatttaagcattagcttcacccactttccccaccttctcaggccgacttggccatgtgtttagcgtgctaaagtcgctggaactcatctgtgtgctcattgtcctctgttctgttaccacattctgtcctgtttgacaggggctttaggagattccagccggaggtccaaccttcgcagccagtggctctggagggcctgagtgacagcggcagtcctgtttgtttgaggtttaaaacaattcaattacaaaagcggcagcagccaatgcacgcccctgcatgcagccctccygccygcccttcgtgtctgtctctgctgtacygaggtgttttttacatttaagaaaaaaaaaaaagaaaaaaagattgtttaaaaaaaaaaggaatccataccatgatgcgttttaaaaccaccgacagcccttgggttggcaagaaggcaggagtatgtatgaggtccatcctggcatgagcagtggctcacccaccggccttgaagaggtgagcttggcctctctggtccccatggacttagggggaccaggcaagaactctgacagagctttgggggccgtgatgtgattgcagctcctgaggtggcctgcttaccccaggtctaggaawgaacttctttggaacttgcataggcgcctagaatggggctgatgagaacatcgtgaccatcagacctacttgggagagaacgcagagctcccagcctgctgtggaggcagctgagaagtggtggcctcaggactgagagcccggacgttgctgtactgtcttgtttagtgtagaagggaagagaattggtgctgcagaagtgtacccgccatgaagccgatgagaaacctcgtgttagtctgacatgcactcactcatccatttctataggatgcacaatgcatgtgggccctaatattgaggccttatccctgcagctaggagggggaggggttgttgctgctttgcttcgtgttttcttctaacctggcaaggagagagccaggccctggtcagggctcccgtgccgcctttggcggttctgtttctgtgctgatctggaccatctttgtcttgccttttcacggtagtggtccccatgctgaccctcatctgggcctgggccytctgccaagtgcccctgtgggatgggaggagtgaggcagtgggagaagaggtggtggtcgtttctatgcattcaggctgcctttggggctgcctcccttcttattcttccttgctgcacgtccatctcttttcctgtctttgagattgacctgactgctctggcaagaagaagaggtgtccttacagaggcctctttactgaccaactgaagtatagacttactgctggacaatctgcatgggcatcacccctccccgcatgtaacccaraagaggtgtccagagccaaggcttctaccttcattgtccctctctgtgctcaaggagttccattccaggaggaagagatctataccctaarcagatagcaargaagataatggaggagcaattggtcatggccttggtttccctcaaaacaacgctgcagatttatctgcacaaacatctccacttttgggggaaaggtgggtagattccagttccctggactaccttcaggaggcacgagagctgggagaagaggcaaagctacaggtttacttgggagccagctgagaagagagcagactcacaggtgctggtgcttggatttagccaggctcctccgagcacctcatgcatgtcccagcccctgggccctagccctttcctgccctgcagtctgcagtgccagcacgcaaatcccttcaccacagggtttcgttttgctggcttgaagacaaatggtcttagaattcattgagacccatagcttcatatggctgctccagccccacttcttagcattcttactcctcttctggggctaatgtcagcatctatagacaatagactattaaaaaatcaccttttaaacaagaaacggaaggcatttgatgcagaatttttgcatgacaacatagaaataatttaaaaatagtgtttgttctgaatgttggtagacccttcatagctttgttacaatgaaaccttgaactgaaaatatttaataaaataacctttaaacagtccattgtgttactgctgttggaggtttacggccagaggcgtagattttagcagcctgggttaccaggttggagagagtacctcctcctactccctttgggtacttttgagaataaaacttcctcatgcctgtaatcccagtactttgggaggccgacgcgggcgaatcacgaggtcaggagttcgagaccagcctggctaatatggtgaaaccccgtctctactaaaaaatacaaaaaatttagctgggcatagtggcgggcgcctgtaatcccagctgctcggaaggctgaggcaggagaatcgcttgaacctgggagggggaggttgcagtgagccgaggtcgcgccactgcactccagcccaggcgacagagtgagactccgtctcaaaaaaaaaaaaaaaaaaaaaaaaaaaaaaaaaacttctcataaacagcctccaaacagcgctcggtgctgcgcaggcgacgcggggcggggagggagggtgagtgccctgggagccggctgagggcctcgccccgcccctggtcccgcctccggttaggccgctccgcctcttaccctcccctcccccgagtgggccggcccggctccccctccgcggggctgagtggatgagcccaggcctgagcccgcccctgctccgaagtcgtggtccccgacgctcggccggcagtgccatcgcgcggagaggagggggtgcgcttccgcgggcggggcgcggagcccgccgtctcggaggccgcggctcggcccggcactgcggagggccgcttgatttcccggaacccaggtcgcgcggctgctagggccggagccggtggatccgagcgggtgccaccagcggcggcgcgccgcctcccccggtgggagcggtggttgggccaggctgcggcagagcgttcgctcggagatggcggagcagccgcgacgcggcccgtggccccgaaagcagggaagccgggcagccccgggacgcggcggagcccggggacagcggggacgccgcccagtcctccgggtgagccgcccctgaggagacccccccgcccacggtcgcgctcaggcccccccaacagactcccttggatgttgccaccatcaccacccgcagggtcgtcccgggcggcccagcgtgcgccgcgccccgggtcctttccgccggcctccctcagaaccgcctcgctcccctccggaccgggcgggctcccttcttcccgcagggctctcccagcccagaggctgtctcgatgtcaccccggagtcgccgccgcgcgcctgtggccccttcccctttggtgtcccacatccggtgcgctcttcgcatccacctgtgcccccgtctcctctcggcggggcccctccacccgccagccccgggccccctcggcgcccgcagcctccgcgccgctgctccggccgtcccggcctccccaagcccgggcccggccccggcccccgtctggcttcgccgtcctcagagatctcccgcacacacccaccccgcccagccctgctggccctcagtgttcactggcccggcctgcggcgctcccggcgccccttccctaaaccttgctgcttcttccaggtatgaagctaaaatgcagcggctaagaacgcggctctggagcttgacaggcctgacgtcgaatcccagccctcccaccaactgagctgtgtgatcctgggcaaggttctaagcttctctgagttactcatatgtgaaatggggataatggagcatgtaccttttccctacctcttagggctggtgtgaagattaaatatatgtgaagctcttagaagaatggctggcaagttgtaatttctcaaatacgggatgatacaccctgagtatcaacttcccgtcagtgacctcctcactacaatgttttctctaaagttgcatcacattcttagcattcaccccttcccgtcaccattttgatcctctcccccagctgtcttctcgtgtcgttttacctaggccaaagctgaactgttttatttttatttttatttttatttttttttgagctggagtctagctctgtcacccaggctggagtacagtggcacaatctcagctcactgcaatttccgcctcccacgttcaagtgattmtcctgcctcagcctcctgagtagctgggactacaggcgcccaccaccatgcccatctaatttttgtatttttagtagagacggggcttcaccatgttggccaggctggtctcgaactcctgacctcaagtgatcacccgcttcggcctttcacagtgctggaattacaggcgtgaggcaccacgcctgtcctgaactgtttttaaatcatctctgtcaattctgaaggacctcagctctgccttatcacccctgagatgtgtgtttgggggtgggtggtagagagggattgccagccttacaaggaggctgagtggggatagtgacaataaagcttacagaagcagtcgatttaagaaaaagaacagactcaggaggctgaggccggaggattgtctgtctgaccccaggagttcaagaccagcctgggcaacgtaacaagacccccatctctaaaaaaaattaaaaattagtagggtgtggtggtgcaaagctgtagtcccagctacatgggaggctgaggtgggaggatcacttgagcccaggagtttgaagctgcagtaggctatgatcacactagcacactgtatcctgggtgacagagcaagactccatctaaaaataataaaagagatccccaaaattagacctccttaaaactgttttctgatcacactgtcctttttccttctgtcattggttggatgtgacttaagctcctgttgctctctgtcatccagtccttactcaagttgttctgtttgtgtaactggactcaatacctcatgtctctccagactagctcagggactcttctgagctgtttaggaatagggttgtagaactacttaggctaagttaggaaggagaagtagagtggactcagctgtatggcttttctcagcacccagtgtgtggcctgctcaggggttacatttttatctcctgactggcaaagttgaggtgaaggtcaggggcaggtaatgtttcacaagcaacgggtaagggagtccctaatttctgggtttggaaactggtagaatgattacctatcatgaggattgctctttccttttgaactcccccaccatagtgtccacctgactgcaagttcgttaaagctgttggctgtgatattgggtttgattgatgagaagattaacagactcatgagttccttatctgatattttgttggagcatgggacttctgaagacttccggggctttccgtcccttcctcacagaaagatcagagctgttgctggctgccagctgctcrgtcatgggctaggaactcctttcagagcaggcctgtttttagccttctaggatatttagcctcttgttgatgggagatttgttcctatcatttgcatatactgctccatctctgagctttgcttagagaggagaatttggacattcatttgggtattctaagaaagggaaagggaacaagctgtgaagctaaggtataggactcagcttgtagattctcctagaggaaacttttttttttttttttttgagaacagattatccagtaagcaggaggtaagagagatgggatggggaggagaatggattaatgacaatttcagagggaggagtaacccactgatttctctgtcttacaggtagaggggaagagattgaactttgctgacctttgatgtgaggcgctcagccagggccaaggggagagcctggcaagatttgcagcctgaagccatgggccagggggccatggtgacctgagacaagtggactctgtatagttgccccctgcttccccttctacctcccctaccctatgctaaggggactcgtctccacctcgtaaaggaaactccccaagggaatccctgtcccctattttyctatccttctacycttccaagacagtcctagcctatagaactcctacctcccatcccctgaggtggtccccattcctccctcccttcctccccccgccatgctccagttgtggaaggtggtacgcccagctcggcagctggaactgcaccgcctcatactgctgctgatcgctttcagcctgggctccatgggcttcctggcttattatgtgtccaccagccctaaggccaaggaacccttgcccctgcccttgggagactgcagcagcggtggggcagctggtcctggccctgcacggcctccagttccacctcggccccccaggcctccagagacagctcgaactgaacccgtggtccttgtgtttgtggagagtgcatactcacagctggggcaggaaattgtggccatcctggagtctagtcgttttcgttatagcactgagttggcacctggccgaggggacatgcccacattgactgataatacccatggccgctatgtcttggtcatttatgagaacctgctcaagtatgtcaacctggatgcctggagtcgggaactgctagaccggtactgcgtggagtatggtgtgggcatcattggctttttccgagcccacgagcacagcctactgagcgcccagctcaagggctttcccctttttttacactcaaacttggggctccgggactaccaagtgaatccttctgccccgctactgcatctcacacgccccagccgcctagaaccagggccactgcctggtgatgactggaccatcttccaatccaatcatagtacatatgaaccagtgcttcttgccagccttcggccagctgagcccgcagtgccaggaccagttcttcgtcgggcccggcttcccactgtggtacaggacctggggcttcatgatggcatccagcgggtgctctttggacatggcctttccttctggctccacaaacttatcttcgttgatgctgttgcatacctcactggcaagcgcctctgcctggaccttgaccgctacatcttggtagacatcgatgacatctttgtgggcaaggaagggacccgcatgaaggtggctgatgttgaggtcagtcttgttacttaaatttttttcttagaagctattcacactctggcctgtcagactcccttccttgattctgagcttgtcataggtacactccctgcctttccaggcaggaagaatgctacttctcatgtatttcctgttcagtctgctctcctgatttctcttgtccctgctactcttcccaggctctgttgaccacccagaacaaactcaggaccttagttcccaacttcaccttcaacttgggcttctcgggcaagttctatcatactggtgagcttatacccctactcctttggcatatcatagyttgacctgtcccttcactgtccacctccctgggcagacaagttgaagaaaagggtcaaggtttggggtcagactgctgtgaggagctagtggtgggcatgaatttaggttcgcatgggtggctggatggcaagttggcagtggggcaaatagaaagtcttaggcaaggatcagggatggaaggtggtcagtgttgttacaaaataaaggagggaacaggggctgactggctgtggtcagtggtcagcgtgtggtcatagggacagaggaggaggatgcaggggacgacatgctgctgaagcaccgcaaagagttctggtggttyccccacatgtggagccacatgcagccacacctgttccacaatcgctccgtgctggctgaccagatgaggctcaacaaacagtttgctctggtgagacccttggatctcttccccataatttctcccagccatgcttccttttctaccttcccctaatgggctacccttttcctatcctttgcgtttttctttatttggaggcktccccaccctctttaccctctactccccaaacctcaccaggtcctggtgagagtctatgccattcccaggagcatgggattcccacggacctggggtatgctgtggccccccaccactcgggtgtgtaccccatccacacgcagctctatgaggcctggaaatccgtgtggggcatccaggtgaccagcactgaggagtatccccatctccgccctgcccgctaccgccgtggcttcattcacaatggcattatggtgagggactcccaatacaggcttgaatcaaactctaacatttagacagctttcaacatgcattgacctatgttctctatcaactgccagtccaagtatgggggtacataaytgggggtagaaaggtgaaaaaattttaacaccctcagtaagagctttattgctataacttcagactcagtcctctataaatcccagtgtcctccatctacttctcattctatctttcaaatctcatctgttttttcttttccctccaggtgctgccccggcagacatgtggcctcttcactcacacaatcttctataatgagtatcctggaggctctcgtgaactagaccggagcatccgaggtggagagctctttctgacagtgctgcttaatccggtaaggtgctgagaggaacgrctagaagattggagagccaaggtgtttgcaggctgggacctttattcaccaaggctaattcagaggtggggtaggctctccaaatctgacatgcaggtaccccttacagatcagcatctttatgacccatctgtccaattatggaaatgaccggctgggcctatacacctttgagagcttggtgcgcttcctccagtgttggacacggctgcgcctacagacccttcctcctgtcccacttgcacagaagtactttgaacttttccctcaggagcgaagccccctttggcaggtaaaggtggagctcagtctgatgagagacatgataggggtggggtgttttttgttgttgttgttgttgttttgagacagaatctcgctctgtcacccaggctagagtacaatggcacaatctctgctcattgcaacctccacctcccaggttcaagcgattctcctgcctcagcctccctagtagctgggattacacgcacccgccaccacgcccggctaattttttgtatttttagtagagacggggtttcaccatgttggtcaggctggtctcgaactcctgactgcaggtgatccgcccgcctcagcctcccaaagtgctgggattacatatgtaagccactgcgcccagccggggtgggggtttaagagaagactaggccaggccgggcacggtggctcatgcctgtaatcccagcactttgggaggccgaggcaggcagatcacctgaggtcaggagtctgagactaacctgaccaacttggagaaaccctgtctctactaaaaacacaaaattagccggacatggtggcacattgcctataatcccagctactcagaaggctgaggcaagagaattgcttgaacccaggaggcggaggttgcagtgagccgagatcatgcattgcactccagcctgggcaacaagaacgaaactccgtctcaaaaaaaaaaaaaaaataggccttatctgattattggccctggcttcagaatccctgtgatgacaagaggcacaaagatatctggtccaaggagaaaacctgtgatcgtctcccgaagttcctcattgtgggaccccagaaaacaggtgaagtatccttagctaacttctcttgccctgccttaaacccaaaggatccttttgtcaaggaactctcttctctctccaggtaatcacaggagtgaaaaaagtatttttaattttaataatttttttttttttgagataagagtctcacttctttgcccaggctggagcgcagtggcacgatctcagctcactrcaacctccacctcccaggttcaggcaattctgctcagcttccctagtagctgggattacaggcaggtgccaccacacctggctaatttttgtatttttagtagagacggggtttcaccatgttggccaggctggtctcgaactcttgacctcaagtgatccgcctgccttggcctcccaaagtgctgggattacaggcatgagccaccgcrcccggccttaatttgaatttttaagagagaaaaaaaggaactccttttatacccacccctcattgatccagtctcttgaggcagtgattcctaaccctggttgtatatcagaatcatctgtggygtttttacaagatcacaagtcattctggtgcacagttaaagcagagaaccactgttttagcccttccctgggcctctctcagacttgcctcctatcattgtagtttggccataggggattttcctacccagagtggttattttttcacttccttcaagcttatgctgttgagctggcttccctcccacaatggctgcctgaagctggtctttctctcccatttagggactacagctattcacttcttcctgagcctgcacccagctgtaactagcagcttccctagccccagcacatttgaggagattcagttcttcaacagccctaattaccacaagggtattgactggtgagactgggccccatttgaatgtttctcagaggaacactcccttccccsaaaataccccattccagcttccctcagcacagacttctggccacttcactctgcatatttttctgcttctctctcttctgtgctacttcctaggtacatggatttcttccctgttccttccaatgccagcactgatttcctatttgaaaaaagtgccacctactttgactctgaagttgtaccacggcggggggctgccctcctgccacgagccaagatcatcacagtgctcaccaaccctgctgacagggcctactcctggtaccaggtctgcctgaagctagggacacacaggctaaaggttggggggaggggggaggggacagtgactgctagagagggagaaaggagtgaggtttgagaaacttaactagtgccttggggacgggtacccgtgctgtgctgtctgtctccagaccaagcgtaagggcagaatactgtcaaatcaccagtccttcaccttccttctctttgtccttcagcatcagcgagcccatggagacccagttgctctgaactataccttctatcaggtgatttcagcctcctcccagacccctctggcactacgctccctgcagaaccgctgtcttgtccctggctactattctacccatctacaacgctggctgacttactacccctctggacaggtataatccccacaagagccctcagtggggttccccttcccctcttcttcccttcagcccagaggcttcttaggaatatagagggaaccacatccctgtccttttagttgctgattgtggatgggcaagagctgcgtaccaacccagcagcctcaatggagagcatccagaagttcctgggtatcacaccctttctgaactacacacggaccctcaggtgggagagcatgacccaggggaggagtactgtatgggaaatggggaagcaggttgaccatgtctgttagagacatagatttactctgtctcacaaggagagacatgtccctgtgggcagggaagggcattgtgcatttatggaacttgagtttctcttttccctgccacctcatggcctcttcctgttgagcaggtttgatgatgataagggattttggtgccagggacttgaaggtggtaagactcgctgtctaggccggagcaaaggccggaggtatccagatatggacactgaggtaagtaaagccaggggcwggggaatccctctccacttccaggatctgattctgtgtcccacttcttaccatttctgccttcattttctcctgtcagtcccgtcttttccttacggattttttccggaaccataatttggagttgtcgaagctgctgagccggcttggacagccagtgccctcgtggcttcgggaagaactgcagcattccagtctgggctgatgtcccagcctcccataccagcaaaatgccccctgcttccctaagggkcaggtccagagcagggcccacaagggggattagagtggcctggcccctccccytctacctcagtagcccccaggcctgagatggctgagaagggaagggtatccttttcccacagttctgggacaaataaaggggcttcctttggtaccccacataatagtgctaggtacctttgacccatcatcttgggaggtggggaggaatgagagggtccaggcagggtgtaggggaatgtattagtccartgagatttccctcttcatccgcagcagtgtatctattctatacctggctatgggagagaccccttgcatgggagggaccccttgctatggcccctttagccaggcagtgggatctacctgtggcccggcctccctaatgtcattcacattgaatggggatgaggtcggacagtggctcatagagccgagtatgagccctagctgtgggctagaaatgtccttaataaacatccttatttttctgttttgtctgcctccctggagtgggaaaaacctagactaaagcaagtgtcagaagtttcctccccagttgaaggttcatctgcacatggaatttggaaagaagggaaaggcccaggtcgactagagtaaaaaaggagtttatatatttataaatgccaaataaataccagaggccacccaacrccccctcccagacagggctgtctcccccagccctaggcttctagggtgtgagacatcttggccccaagctatagcccaagagcagctgtcagtctgtgctaccagggaactgagtgaggatgatctgtccagccaagtttcactccccctgtgtgaggggcccccatagccacaggcctgggtccctgtataggaccctwagggtgaaagactcagggggagaaggtggccatctcgagtgagacccgctgccacagctccttggtctgtttkctgcgcttgaggttctgtaggatgtcgttgaactgcatcatgcccatgggcgtcaggcagaaggcgctgcgggcactccggatcgcattcacaaagtcgtcgtagtccgcaggagtcaggtgaatcaagcggtggtggatgtactggaggaggatgtgtgcaggatgagccttagtacaaagcacagaaacaggccctgcctccctctggtccaagaccacccaggaagtgctccaccctgctccataattctaggttgtcacctgcatgtatgcctgctggcagcgctgcaccakttggtggaaggccggggcacgcaggtggttgtgggcatgagcgggactcagccgctgcagcgtctccatgacgatctcctgcagcacaaacgggctcagcacccccttggctgcccccacacagaactggtgcacgtagttcactcctggggggcagggggaggggcatgagacgggggtggccacctctgccctagggacccaacttacagatctcagctctggcctggcagagagcctccctccaccccaggagctgaggtaaccctccgccccccgcgcacgcacacatacccgaccaaggcctcaactctgagcaagagctaggaaggaggtctgggataaggaaggtggggagagcaggtggggggggggcaatggtcctagggaggggaggtgttacccagctttgctgccagccccagcaaccatttgacatcatcagtgtaggggggggagcgggagaagttgttggggtgatcgttgtgtgcccggcgacccagcatctccagtgccagcattcctgggagatagataagggtgggcacatggtacggtgtatcctcttcaccctttaccccaacctgtcacctgaccccacagtaaacaaatgaagagctagaggaagggtcctctgaagagccactggcacaactgcaggtaggagcacagaaagggatgtcctctcaccgacacggtaggcagcatgcaggtggtgcaggctgtggggattgactggctgactgtgtgtctcctcctcgggcggtggaaaacctccgctcaccagagggctgggctgtgtggtcagggcaggcagtgaggcaccttggatggctggaaacgtggatgctggatggacactgctcactaagtggggtgagagccatgtgaggaactcagagcccaaagagagacaaagaacattccctccccacctcccctgcccagtgtgcctcccctccattcacctgttccctggccccacaactcacaggccacactggtgggcagtggaagccctggctctgtgtggtagggatgtactgtgatgggtgccatggaaggaacggggaaagacacagcagtggcagcaagtgagggaggagtcactgaataagggtactgagcccctaggaatgcaggatgcacaccctaggggcagggagaagaaaggggaagatgccaaacttgattaggatgttgctgtcgtgcttcacccccacaagctgctatcctgacatgttttttttgagatagatagagtctcgctctgtcctccaggctggagtgcagtggcacgatatcggctcactgcaacctctgcctcccaggttcaagtgattcccatctcagcctcccaagaagctgggattacaggcgtgcactcagctaatttttagtagagacggggtttccccatgttggccaggctggtctcgaactcctgacctcaagtgatccacccacatcggcctctcaaagtgctgggattacaggcatgagccaccatgcccggccgtcatttcttattttagttgggctgggtcccccagactcccaccacctcaccaggactctccgactgaccaattatactcccagagtacccactccaaccccctatgaattcccagtattttcccatgccttaccccccagcagaacactggtctcacctgtgggtatgcagagctgggcacagggaagacggcaggccggggcatgtgaggcatggggtgggcagggtgagctgggtgagtgagatactgagggctacagggcaggtggggctgtagagcagtgtaggggtgcaggccaggggagtggccatgccccagtcctggaccygggtataaactagaccccaccgatatgacgggcaccactgtggctgctgctgtcactgctgccgctgccactgtaaccggctcagtccctgggccccctctaccctcaggcataccccgcccagcttycccacctgccctgatcccactggcactacagcttgtagccccttcacgggctgtggatgagccacctgcagtttgctcatayagccagaaccactggtgagcaacctcaaacaacacttcagggtacacgcccccacccttagctgcctcttccactgccatgcaggccttctccaacatcaggttgtcctggaagagaggggcacagagtgttaagggggaaaggcctttaccacatggaaggtgttagatgagattccaatgtctccctcagagctgtctcattcccagggaatcatcagaggtcagtgtcaatgcttagagtccattatcagagcagtgagtgcttcacacactgagtaaatactgaccaaaatgagtcaagacccaggttatagtcccagttccaaactaatttaacagccccctcccattcaagtcttagatgtatgaggccttccmtaagttttctatcctgagtgatcatcttggtccmtaaaccgtaggcctccatttccttatctgtaaaatagaaataaacctaacctttgagttgtaaggtaaaggaaagatgggtgtgaaagcacattaatgggtaaaatgttgccatgagaggaccaacaatcatctgtaaactccaggatacgggaatcaagagctgggcccttagctttcccatgcccaacctccctgcccagatgccccagaagaggttcccagattgcccgtagaaatacctgttccttgcactgcaccagggcccgctggatctcattagggttcaatgcatgggcgtgaggcaggcagctcagggccagctctgctgccgccctcaccatattggagtctcttgcccgtgatgccctgtcagccagggatgcaacctcagggggtgtcaggtgcccatcccagcattctaccagtatagtcagggctgcgctgcctatctccatggcctggccttaggggaaaggagagaagggcagagttgggttagtgtgggcaccactggggtgtgagaataatgtctttttatcagatcagtaaccccacaaagataagggtcttatccccaccaattaatccccctcccatacccaagtcaggtcaaatgatttacctgtaatccaggaaacgtgggaagaataagtacgtgagagccagttgggagaaacaaagttgtgcaggccaagggcataaagcccaatctcgaaggcgcaaaggtgcaggttgcggtgaggaccctggtggccccctgaggaagatggatgtgtgaaaatggaagtgctgctgttgccccctgccttgatcagcactgtcttcgccagctcgaagtagaagtgtgcagctgcctctgatggctgattgggtacatgaggggcatgactctcggggcggcggcccttgtacctgaaggggcaatggggtagggacgggggttggggtttctttgaaatgggcatccgggtaggttgggaaggaccagggaaagtgaggatgctgggagacaatggttggattgcactaggggtgtggctctgagggtgggccagatcagggaagatggggagttcttcccactgacctgccaacttcaacagtcttcgcccgggctcctccactggcactggcccggcgacttccactggaggatgaggagcccagggagtccgaagaagagctgctaatgctgtcactgtcctgacctcgaccccaggaggtgggggcccagccccctcgaagtggtctccggcttaaggtgggggaactatccgatgttgtttcaggggcactgctgtcaatgctggccatgcctaacccccaagagaagtcagtctcagaagtcaggagtcccagatgttaagactccaaccttcaggattatccttccctctatgctagcccacaggctatcctacctgtgtgcttcttcttaggccgtcctggggacccccatccccgtccattatagcctccacgactgccaagtgccaagcggctaggaaccttcccttctggccttggggtcaaagctgcctcagatggaagaccctcacagggggaatgtggggaactctctaggtgaggaaaacaggacgctgggatgagcccaggaaaggggacctcaacataggtccacaccattcatcccccctgcccagtgcccccacctcaccaggcacattcttctctgtgaagccctcagtggggcctggcccagcccctgccacactccctggttgagcaggccctgcagagcctgaggtcagtggttgcagggcccctggggcagatgggcccccgtgctttgaaggagacctctggctggctgtggttgggcggctagatgagtagaaagaactcagcgtctgtggcttatgtgtctggctctctcggtccaagagtttgtctaagatctggaagacagaagcagtgacctccagagaagcagtgacaggatgccctttagctcctgacttctattaccttcctttctccttgaaacagccaattgctacatcctcagggagccttccccacttacaaccacaggatgacctcctggtttacatgtctttttgtaacttatttaaccccaacatatcttggtatcctccattaacaccacagggcagaatatactgatagtcaataaatactgaaataagtgaatgaatgactttatgccctctgcttctcttcttccaccccatgcccaagcactcctataagaaccattggtcttctcttattctttatgagatgtccccaagattccctacttacctcctatgggcagaagagcacttttctttttttcttcttcttcttttttttttaagagacagggtctcgctctgttgcccaggctggagtgcagtggtatgattatagctcactgtagcctcaaactcctgggctcaagcaattctcccacctcagcctcccgagtagctgggactacaggcgcgcgccaccatgcccggctaattttctaattttttgtagagacagggtctcactatgttggccaggttggtctcaaacgatcctcccgcctctgcttcccaaagtgctgagattacaggcatgagccactgcacccagcctaaaatagcacttttctcattgtactggaaactccctgagaaaggtagtaaaatgtgctctctttctctgcctgtcaaaggccccagtaccttgccttttttttttttttttttttttgaaacagggtcttgctctgtcacccaggctggagtgcagtggcgtgaacccagctcattgcaacctctgcctactgggttcaagcaatcctcccacctcagcctcccgagtagctgggactacaggcatgtgccaccacacccagctgctaattttttgtattttttggtagagacggggtttcgccatgttgcccaggcttgtctcaaactcctgggctcaagccatctgcccgcctctgcctcccaaactgctgggattacaggcatgagccaccgcacccagccccagtctcttaccttcttaagcttggcctggtcgtccttgtaagtgatcattagtgctaatgccaggtcacccttctcccgacgtgtgccttcacataagaggggatgttctgcctcgctcactgttgtcttcatgcctgcgagaaagaggaccttatggggattgagagtagtcataattcccaagacagcaaaggtaagaggccagggttcccaagccatcagcatatgaagtaaggggttcccttggtccaacccacatcacctatagaagtcttcgttgactattatatccagcctaagctctggtgtgcttttcaaaaccttcataaccaggtccaatctgcttacccagcatgtacttatcattttagggaagctggcctcctcattctcatgaaaacttgattgcgttgtgtatttactcatggtgttcgctggtttaggacctactgatcttttaacccacattccatattctaccacttcccttaggcctttctctagatttttgttttgctgcccttacaatacccaatacccatagcacacaattttttttttctttgtttgagacaaggtttcactctgttgcccaggctagagggcagtggtgcaatcacagttcactgcagcctcaatctccaggctaaagcaattctcccacttcagcctctggagtagctggcagcacaaggcatgtgccaccacacctggctaatttttttttttttttttttttttttttaagtagagatgaggtcttgctaggttgcccaggctggtcatgaactcctgagctcaaacaatcctcctgcttcagcctcccaaagcgctgcgattacaagcatgggccaccacgcccagccatatagcacacatttttgccctcaattcctgtcttacaggcactagttggctcacacatgtcatcctgaccttcccattaccatacagcccttcacaacaaggcacaggtctcatgtccttcaagacctgaaccaggcttagctcgttgatatgctcaagactcacccaaggcagcaactgctgcttcaaatccaagctcctcatccccaggtgtctcgctgttccagttgcgacttgggggccgggaacctgtgggagaaaccactgtataaaagttggggtaagtcaggcagacagaagtatcatgcatgggaaaaaatacaggggaacccaaaatcctcatcatcacagacctacccatgaagctgcctgatgggtcctaaaggtgattcagaaacttggggctcttggtctttcttagagaaagctacccctaccccagttccccacttactgtagggtcaggcatcatacctggagcacagagaacgtcaaagatgaaactggccagcatgagaggcaacacaggccgatagtcacagagtgtcccctcccgaagttcctctgcccggcaccgcatggtactcatctcacttggacccagagggatcttcttgagcagggcagccacctcagactcctggtatgccagcttcacctgagggcacaggaaggagctcagacctctggtgtgtcaatagagatcaaggtgcaaggctctaaagagactgaaatacaaggctgagatggagcctctgacctccaaggccttggtagaagctggaggcctctgtagctccaaggcaaacatgccaactcggaaggccaggttgtggtgctctggacgctcacttagcactgtcaacaggaaggccgccttgctcagggtgttggtagccacccaggtctgacggctcgtggataccttgttcttcttgccctagaaagggaagaaacacaggagacaggcagatgattctgacttaccttggtggaggtagaaggatgctctcacttggggtggggcatgggagcaggttgggggtaagtgggggaggggaaggtagaggaagggggtctctcaccttggcagggggcggctctaccttgaggtcgggtgggttggctagcagatcctgggcaagctccacagtgagacgggaggcctcactgctatagccatgcgcatgcagggcctcagcacaggcaaacagtacctggaaggaggacatgggaccagacaggttaaagtcccaacttccaggagcaggacatcatgctcactcatgcagccaacattccttgaacacttgctacatgccaggccctgtgccgctccataggagctctggttagaaagacagacacataaacacacatgccaccgtgatgccagctattacagggaaaggtcaaggggaagcaggtgggatatcttggggcacagggacagtatcagagagactccctagaggaagtgatctttaagatccctgagacctgaaggagaaacacgggctaatggggaagagcattccaggcagaaaggtcaatctgtccaaaatcctggaggcaagagagagagcatggcagatacatgagtgattcagctgactggagtgcaaaggacagagcagccaagtgaggctggcaaagcaggcaaagaccagatcaagtggaccctcacaggtcatgccaaccactttcattttatcataagggcaacaggaacccattgaagggttttaagcagcagagtgacaccatcacatttcaggaaaatctcgtggaagcagaaaagtgagtagactgaaagcagggagaccagttcggcgcctgcaacagggttctcacaatcctgctgatggtcctgacactcccaactagagctagatagcccctcccagttgtggctaaggagcacccagccctccctccttccatcccctcacctccatgcgactctcctgttccagtggcttcagcccagcaaacaggtcgtgctcctccccagccccgccctcggccttctcttcctcgcccccagccccatcctgggcattcagatagtacgcctggtagtcatcatcctcctctccaactgcaggggctgcctctttggttttgggaagcccattgccactctcatctgtagaagggaggtcgtcctgggtacagacatccccaggcagtaggccaggggggccaacagaggctgtgggaggctcaggcccttccgagaagtacacaccaccatcttcttcataagtatctgggggctcaggaaggaaagtggaagggcctcgggagccaccgtggagaggacagggtggagggctctcagggaatcccccgaaggtgctggcctctgcgcccagggccaggctgctgtcatccaggctcatctcggccaggtctggctccagggagctgtcttcgctgctcagccgtcgcttgcttccgccacctgctgagcccttgctcccactgccagccccacccagtgccttggctttgcccccacctggacccatcttatgtagagctttatctcccccttcagctgagaggcggcggggaccccgctgtgatgaggggaccccctcacccaagccctttcgcttggtcccaggctccttgggccgcacagctggctcagtaggaaggggtcggggccggtcccgggattcctccaggcccccagagcgggaggcacctggccgagagggcagggcccgggcccagcacagtgccagcttcctgtcagtgccgctgtaggtgacaccaggaagtgggtaggcctcttcccagttgaagtagcaggcctccaccgctggccggaagccggggaagagccgctccagcgtcttcttgtgttggccccgcttgacgttctcaatcaccttcagttgccactgccgcagctgcgtacacagttcccggcgcctgtgggaacaaggggcaggaggctgctgaggggctactgggaaaggatgggcatggagtaggtgtacaccccaaagagaggcatggggaaaggatacaggaaagtacttcttgacccagccccataagcatcactgaaacactggagaattttgaaaagtgggtgttatttaggggaaggaaggatgaaagcctctcagaaaaaggactcgtaaatcactgctaacaccagtgctcagcacctcccgtttcccgaggactaaaatcatggtatgtctctgcaaacaaggagatgaaggctcagtctgtcctgagctggcccaggctcagttctgtggtgagcctcaggggagactcaccgctgggggctgagtgcagggtccagcacggccagcctccacagtgtgaccatctcgtcacacatgctggcacaggcatgggctgccacctctgactgcccgttgctacggcccgtgtgcccactggcactgctgtgtgaggctgaggtacgtacgctataccaccaacctgttatctggagacaaagaaggctgtgagctgcacctgagagctcagagaaaggcagag

SEQ ID NO: 94718 - DNA, 26305 bp, Homo sapiens
gaattagcgtggatgtgtccaacctgcatcactcagaaaggcatccgcttctgtctttctgtcctcccagccacgagttgacttaagtttcagcagctcagagctcatgttgccatgccaactcctctgcagcatgcatccaggcagaaatggcccggcctgagctcagtgccacaggcggatgcaggcaccttgggtaattggattggagcaatccacgtggcttttcctgcggaaaccaggggcttggcatagctcctgtttagacatgagcttgtggacacggcagggactcagaggaggcctctctgctctgggactcccagccctgctgccgggaagagcagtgtcagcaagcacatgagccagaggaaagggcagtggaggggagacaggcctcatcctagcgccaaagtggggcaactcccaaacctactcaattttccagaagctcccccgggctcagagatccctagaaaatgctgtaggcttcctcacaggggccagggcttgccttaccagcagaactggtctggcttgttcactttcccaccaccagagaaattcaaattcaaagccaggatccacctaggaccctttgcaccactgtgcaagcagagccagtgtgccattacacctgcatgtctattgccagggagttgggaaatgggatgactgtcttggtgctggtggtatttgacgtccagtagcagaggtcctggccaccatggcttgtccagacaggaccagcctggctaggccttattcctgggatcaccctccgctggtgatggcagatcagctgccccctgagccctcaggccagtgtctagggaggggggctctggctcagtgcaggcctctgagcagccatagtctcccactgtccgtgccgtgatgcctcaggtcatatgtcagcaacaggggtctcatggctgcagattgactacaaattatcagtcactcgcaggagcagccgcagtctggggctgccggctgtcaatgccacacacccaccaggagcggctggggctgtggccacctgggtcctgcccaggacttgttcacttcttcccctcatcccctcacagctggacttggggttttctgggctcccaaagtcccagggcaagttctcctcctgcttgggtcaacctgcaaaccatggagctctctgctccctgcagcccagtccccactgcagggaacagccacaagctagtgaagtccagcagctccagcctaggcagtgtggctgatgtctctgaggctcctgaaggcgctctgggacagtcaggatcctgggacttctgtgggtgggctccagtgacccccagaaccgtgcccaggacaccaggctggggagagcaaacagggcacacaagggctgaccctcaggggaggagtggtcgggaggtcctaccaggagcgggtagggaaggaagcagggcctggccaggtctctagcctggttcctttctgtccttatgatcatcctgggaggtagaaagtcctgactagtgcagggttgcactcaggtcaccctgagtcccaagcccaagctaagcagtggccggtgaagccgagggccaggggcaggtctaaagtctccttttctaggtcggggctgactcccaggagcccagccttggggtactgtgtggcctcccacactgaccccagggctcaggagtgaccatggggcctgccaggacctatgacgacctggagacaacgggactccaactcaggtctggagagcatggtgttgggggatgtcattctgggcaacctcagaagctacataccaggattcgcaaaggggacaaatccatggataactgtggacttcaaaataaggagccctgggggaacaatgcagtctgaggttgagctgcaaaaactcagccctcaaggcctttgggggtcctgccagtcccctcagaggggcccacagtggactctacttggcaaacttgccagtccagggacatggaagcagagagcgggggcatggagtcccccacctggagacagactctggcctgggcccactcaatggcccaactaggccaaaggagcgcaggcaacaggaaggggacaggcaccagtgcggctgagcaccaccacgcagcaggcccgggccagggagcatgtcctgccttggccacctctctgaggacttgggggtttctctgaaaagttaccagcctctaatgtttaactgtagttctcctctttcatgggaaagtgtagatcagactaattaatgtgttgttgcttatttaccctcctttcatttccctgagacaagataattaaccacagagccttagaaactagctccatggtttctccatgggtggcaatcccttttgtgtctcctgcgccagcggcttctatgcagaggcaggggccgcacacaggagcagggcagggggcagcagctgggaagctggcgaggggctatggacgggggacctggagtcactaggaggggcctggaagggcagcgggaagggctggcatgcttggctctgccacttcctagaggagtgatcttgggccactcctgcccaccagctgccagtcacctcaaatcccatcaattcctgaataaggaccaaagacagtcctctggccagcccaggagaagtgtaaagatcaggactggccactcactaccattgctggcagggccatgggaagctggcccacagggtttctgggatcacagcaggagaaaggggggcccagggcagctgaggagagagtctctctcctctacaccctccatagccccatctcagccaatagcagatcccagccctgatgggccagtgtcagggatgcgccacacgggagagcagttttgcagaattcccttaggaaccctttgatgaagtgagtctccaccctcctctgacccatgagggagctgtggccacactgtggaatagcagccagttctgccaggacggcagcatggtgcagacaggatagaccttctcctcccgaatccttctgccaaagtgtcctcacgccagggctcagcctgcacagcccttcctgctggtggagcccagggtgggggtggatgagggaaaagctggtggaggcagaagcacaaagggcccctagatacagactgggagactggactttgtcccccaagacagtgagaccaccaaagggagagagagaatcggctgtgtctgggaggacccgctgcacactggtggtgggcttggggctgtggctgaggctgagggcaacagggcagtgccggggtgaggcaggagctcaggtgaggatggtgctggccaggctgggctggtgacctcaggccacagagatgagggtgactcaggaatgggcctgcttcatgacattggggtgacgtccaggtggccccaagaatctggcctggacctttaacctgaggccttagtgccaactgcagggactactggtggctggagagccttgagagacccccatcccgcccccattgtccccacagggacaggacctgcaagctctccctctggccccagctggtccaccagagacaggtgcctgtgggtgactctgtgtcccctcctgtggatgtcagtccagccagtgtgaagacagccggctccacacaatgagggctgcaggtttgctgggggggaaccctccagcctgggagggagagtgagtgggctgtcgctccctctgcaggtttgattcatcttgcagcaattgctgggattttagagaaagaatgagggagtacgtcctggagtctcccaagccagatggcaggcgggggtggacctggacacccaccagtcccgctgagcactgagccacgagcactggccgcagagtgagatgcccatgtcccagatttcactgaggcccagcacagagctgctttcccatggctccaggttgccccgctgtggtctgcacagatacacatgctgctccaaactgcacccgtccagtgttggcttcaaaggcatttcccctgaggagagtgacagccttgtgaagctgcttatcagaaccagatacagccccagctcaagttcacctttagacgctaagccctggagatggtgactgcagacttgccctggggcctctgacatgccccacagaaaccccctccgcacacctcgggttggtgggaaaagagctgccccctctctggctggaggcatccaggtgaacctcccctcatcccccatgtcctgcatacctgctggtgcaagcctgggactctagggcgcccctgtgcagcctattctttcctgaagcttgcggtctgctgggcaggtggccatatcccagagcatttgtgatacagaactgcagagaccaggccacacgtggcggggatgagagccaccggtggagacacctaagccaccggggcaaggggtccaaaagtcttctaaggagggaatttctaagttgagtcttagaaagggtgagcgaggcgaggggcagaggatggggaatggcaggcagggacgggacacaagtgagaggcgggcgtccaggggagggggctgcagagacccgcaggcctgacagaggggctgagctccccactaagggctgagggagttccagtaggtgtgaggcagctgtgacacagcggactacatagagagcatccctgcagcccttgtggaggctgataaagttggggaaccgtgatgcagtcccaggccggtgcagggggtccagcaggagtggcagggactgatggggactgaggaaaggcagagtccagtgacacctaggtccctggcttgggtgaccagggattcaggaggaggagagggtgtggggccaggatggatggcaccgtgggctcagaccccccaaagtgccagggcaggagctgggctgagtcagcaagacagtgggtgggaaaagagtggcccaactgctccagtcatggaaagtctgggttacgcttctataggctccccgacggggtgatcacacgtgggtccccggagactgggcaaacactccagaagcttgtctttattgattttacattcagcacaatagatgcacctggcagccttgcctaggtggagctctgagtctgctctgagacccacttgtggctcccacaggggacccagggtgggcttattcagatggctgtgggtctcgactgggctgcatcttggagtacatgagggacagcggttaaagcttgggccagacccacacagccccagggagcttctccaaaagtcacagggactgtcaggggaactctgatggttctggaagttggtaagacgcaggctgcgcttggatcctcattgctggggggtttctcccgcggtcagtggagtggaagcaccaggcttggtgtgatcctgcaggctggggccacagtgacagcccggttgtgcatggagggggaccgccctcccctgcggccctgctggccacactgccctctgctccaggagtctctggcccctttgctctgctgttttttcctgctctgtccttagctggcaggcactccatgacaagtggccatgtttgtggctcctctgacccagggtcacctgccctctcattctaaaaactgccctggctcctgatgggcttccggcggcccccggtcagggtgggcccaggcatcctctaggatgccctgcctgctccctttgcacccacaaatctgtaagtctctgaaaaccaggaccatttttcaagcaattgggttacaaggtcaagatggttagttaggggcagtcatatcaccaagctattcgctccaagagaacagcatacatggaggaagcggtgtgcgggggctgtctcccagccacctgctgagcctgccagctccagcctggttctcagaactgtcccactcacaccaggggaagcaggagtgggatgagctggggcaaaggccccatatctgacccactcccctgaagatcactaaaaacagtccccctacttttgtctctgcagggtctgcagtaggcctccgcatggcccaccgaggtgaaccatgaccggctggccaacattcgccattgaccagccggagttgcatctcgccaggaggtgacccctcctccagctgcccccaactcgcccaccctcgcccaggaaagtgcccgcagctgccacggacaccatgtagtagggccggctgcggcgcccagtgagctgcgatggttttgtacacgaccccctttcctaacagctgtctgtccgccctgcactgtgtgtcctgggcccttatctttccatgctactggctggtggaccggctcgctgcctccttcatacccaccacctacgagaagcgccagcgggcasacgacccgtgctgcctgcagctgctctgcactgccctcttcacgcccatctacctggccctcctggtggcctcgctgccctttgcgtttctcggctttctcttctggtccccactgcagtcrgcccgccggccctacatctattcacggctggaagacaagggcctggccggtggggcagccctgctcagtgaatggaagggcacggggcctggcaaaagcttctgctttgccactgccaacstctgcctcctgcccgactcactcgccagggtcaacaacctttttaacacccaagcgcgggccaaggagatcgggcagagaatccgcaatggggccgcccggccccagatcaaaatttacatcgactcccccaccaatacctccatcagcgccgctagcttcagcagcctggtgtcaccacagggcggcgatggggtggcccgggccgtccccgggagcattaagaggacagcctctgtggagtacaagggtgacggtgggcggcaccccggtgacgaggctgccaacggcccagcctctggggaccctgtcgacagcagcagcccggaggatgcctgcatcgtgcgcatcggtggcgaggagggcggccggccacctgaagctgacgaccctgtgcctgggggccaggccaggaacggagctggcgggggcccaaggggccagacgcccaaccataatcagcaggacggggattcagggagcctgggcagcccctcggcctcccgggagtccctggtgaaggggcgagctgggccagacaccagtgccagcggggagccaggtgccaacagcaagctcctgtacaaggcctcggtggtgaagaaggcggctgcacgcaggaggcggcaccccgacgaggccttcgaccatgaggtctccgccttcttccccgccaacctggacttcctgtgcctgcaggaggtgtttgacaagcgagcagccaccaaattgaaagagcagctgcacggctacttcgagtacatcctgtacgacgtcggggtctacggctgccagggctgctgcagcttcaagtgtctcaacagcggcctcctctttgccagccgctaccccatcatggacgtggcctatcactgttaccccaacaagtgtaacgacgatgccctggcctctaagggagctctgtttctcaaggtaggagacctcggcccagcctgaggaccacgtgccagctggtcctagagccatgtaggcaggggggctgcagcggggagtcctcatcgtcatgggggctggagtgggaggttggagtgggaggcagacgcggtctttcctggagccaaacagcagggccctggctcggggacagggtcaagaccaatgcagggatgagcaccgaggctctgggctcagacagacccatctgggtgatcttgggcccgttcctcagatctctgagccaccatttccccaactgtaaagtggagagagggtgggagtggaacagagcagtaaggcctgggaagggttcygagctggcgcaagagtggcggtggtagccgtggagatggtggcagtgataaagtgaggaagaacaggaggtaggggccctgtcggttcataacgaggcagagagaccagcccagaccaagcgcatcaggcaagcagacgggaccctcaggtctccaggccgtgacaccgcctggctcactgaggccactagcttccctggcctggacacccctccctcctggctgtcgtgcagctgccctgccaggctgtctgcccaccagccatggtttcgcttccatagtcactaattaaagtgaatcataattatttctgctaatttggattcgattggaggagtttttaggctgtggtaatttggtcattacacattatcttctactgcgcctgagatgctcagagtgtcgacttttgttctctatccaaaagccgctcatggtgcttccacggttttctgaagygtcatttggccagtggatgcrgcacagggctttctgccctgagaggcagcagctgtttcagatgtgggttctgtccctttagggtgagacatgaaaaagtggtggctttgcagggagggctgcggttcagaggcctgcctagggcaggtttcctcacttcccagttcgccttcagaagcaaccacactccgcctgcccagggaaacactggtgcgcaacctggcgcctgccatgagtggcagagcttgtcttcaagccctatgggagccagggcaggcagcaagggccctggcccccacttctggttcgtcsatggctcttgtgtggctctgccaggcccagagtttgggtcctctgctcttcattcacagcaagggatgctgaaattgaagcaactcctgacagatagatccaaccttcccattttggcatatggtccgttggtgttctgttccctggatatatttttgtctcgacagctagagtgactttctggggaggaaggggatgtgttgccaggtccagggtgggaggatgtgccccttactcccacccctcactcccaccctactacaggtggctcagaggccgggccctcccccgccccctaccccagcccacttctgcacagatcaatccacacatcctgtccccacctccctcctctgtggggcaccctcactgttcccactgagctcaacagtgtctgcctgggacagcccctcctcccaggttctgtcctgaaagttcttttcatcttcctctacctcctgggtctcaaactgtaacctgatctatgacattcaaaaattttttgtattgaccaattttttttttttttttttgagacggagtttcactcttgttgtccaggctggagtgcagtggcacgatctcggctcaccacaacctctgcctcccgggttcaagcaattctcctgccatggcctcccaagtagctgggattacagacatgcaccaccacgcctggctaattttttatttttagtagagacggagtttcaccgtgttggtcagggtgatctcaaactcccgacctcaggtgatctgcccacctcggcctcccaaagtgctggaattacaggcgtgagccaccatacccagccttgaccaatatgttaaaatcaagatatttcacagaaaacccggtttgcaggttctctcagcagccccaggcctgccacattccgtaccccacgcggctgcagtgagctggagccgtggttggctgccccgcagtggggtttcccagcaaccatcatgacacctgcctgggagtgagactctgcagcttccatttctgccctttctgaggcccctctgctttgtcctggcccagacctctccccccagccctacatctggctgcctccaggacacatccccattcactcgcaaaccagactcagcctctgccccgggctgctcctcttctgtgttctgccatcctgaagccagaaggaccaccttggctgctctgtcctgtgcccgacccatccattccaggcccctagctcactttccagatggccctgggtgcaccccacatctccagctcccttggcccaggccccctcctmtgcatcagccctgctgtggtttcagccaccctcctcgtctgaggccaggtgtgactcctcttatgccctccactgcctcaggaagtctgaacgtcaccttgtaccacctcccgcccccctgcccccgccacccttagctccagctctgccccagccacaaccccgatgaggggctcctgtacccctggcccctgcttgtcttggtcccacactgggtgtggccacaccacctcatggagctccctcagcggccagccacacaatcctctcttcccttcatgggctcctctgccctcgtgcccagggtcttgtctgtccatcagacagagcaccaggacagcagagctgtggtgtgcccagcacacgcggatcccagcgcggagaagtgaagtacgtggggctgccttggggacaggcccagccggagaggggccgggacgctggagggactcgctgcagaaatcagcggtcccctccttcccggaaggccctcatggtttcccgtatgggacttcagagccttcagggaaatgtggctctgtgaaggaagggactggaatccctttttcctcacctacaatagagccttattctggacacctcttccgttgacagtctttgcccrccaggactcaaaggcacagcctttcgtgtgattgcttgtttttgcaagagaaacacaaggctctgcggctcccaaggccacgagccaggaatcaatgaggcccagcaaataatcaagtggatcttggtgagatcacayggcagatgaggagggagaagcggggcgggagggagcaggacctcgtcactcctccggccagtgggttcttgtcgtgcagggcccagtctgaggcctccctgcgagtgtccaaccctgtccgggacacagcgcggggcaggtgacaccaagtgttggatgagtgagaggctgacgccttaagaccaacaaacaggcggccggggagaaaccgcaaagacaccagctcctcagaaagcagcgcagagcagcgcacgacaaacagatccgactggaagctgcctcttagaccatgtgagcctgtgaccccggcccacaactcaacttctggcctcagtgtgttcaacggtaaaagcagcatcactttatcatgtgcctgagccgttgtaaggacccagaaaagtaatgtccatgcgtcgccaccccaccccagcacgagcccactgggcctgagatgatcctcatggaggaggagcagttgttgcctgaagacggcgcccccgtgtggtcttttatttattttgagacagtctcattctgtcgcccaggccagagtggtgcaatggggcgatcttggctcactgcaacctccgccccccaggtccaagggattctcctgcctcagcctcctgaatagctgggrttacaggcatgcacacccagctaatttttttttttttttttgagacagagtctcactctgttgcctaggctggagtgcagtggcatgatcttggctcactgtgacctccgcctccaaggttcaagcgattctcctgcctcaccctcctgaatagctgggattacaggcacataccaccacgcccggctaatttttgtatttttagtagagacagcgtttcaccatgttggtcaggctggtctcaaactcctgaccttgtgatctgcctgcctcaacctcccaaaatgctgggattacaggtgtgagccactgtgcccarcacacccggctaatttttgtattcttagtcgagatggggtttcatcatgttggccaggctggtctcgaactcctgaactcaggtgatccacttgcctcggcctcccaaagtactgggattacaggcgtgagccaccgtgctcagcctcatgtggccttttgagcatggcggcttcatcagtgttttgtttttgcagcagaaccatcaatgctgcgtgatctcacagagccattcggggggcggggatgctgttaggctaaggtttgggtctgtctgtgggcaagaagtgaatggtgaacctgtggggctgaacagccagacgttcgtacccccaggtgctggggaaggaaggctgtgcattagggctgggaaggggatgaagagctgtagaaagccaggggcacctgctgctgaggacgtccagatggaggagataataccagcctgaccgactgcagcagtgaaggaaggacggagcctgccgaggctgttggagcagatgggctgtgacgtttgggctgctgtgagctccacagatgtggggcacccaccctgcggccctctgccctcagccaacaactgggagaggcagtgtgtcctgcccagccacctccctggagtgctttttgggtctggggtctcctcatcttgggaaactcagtctggaatggatttgcatggcttggggagggtacagaggcacaggagggaaggaatcccaggggcaggggatgaggagctggtaagcggcctctctgtgcagggcatctctgtggccatccctcacctctcctgggctgagcactgacaagggctccatcttgcccccacctggggtagggcagttatgaattgcctgcagggtacagtggagatgctaatttgtattaagccagcctttgggatcctgccagggtcacctgctccgtcttgggtaaaggaggtaagcaggaggtcggggcagaggggagacctgaagaggatgctgccacagtgggctcaggatggagccaggggtgtgcagrggccagcctaggacacasgtcagggagctctcatccaagacgggtgacaacgggaccacggcctataaagcagatgactcaccatgcagccagaaggcgacgaggccaggaggggcagggtctgggcctcttgctgtgtggggtgggctctgaggccacgccatggcacaggggcaaccccctgagatttcagggggagaaagcaccagggtgtgaccaggtctagggtgtaactgagggagggaggaaagagccacagacaggactggacaaggaactgagagccgtggccacgctggtcactgggagatggcagggcctgggcctccggggagccttgctgcggttcggcacttcccccatgctttgcacagatggccgccagcactccccacgccacaggccaatagtttctttcagcacccgcctctggcccagatccgtaagtccctagaagcaggacacatcctgtccctactcggaccccagaatccagccaggagccmggcttgtgagggtctgacctcatgggtgggtgggcactgccagtgtcctgtgctctcagggccacagtgactggcaggtggcagcactgaccccctcctcccccaggtgcaggtgggaagcacacctcaggaccaaagaatcgtcgggtacatcgcctgcacacacctgcatgccccrcaaggtagggttgccgcccacctgtgttttttctaggcatgggatcagtgcctggggcctarctggggtctggggcgaacttcatcatccagtctctgtacttctgccctgcagaggacagcgccatccggtgtgggcagctggacctgcttcaggactggctggctgatttccgaaaatctacctcctcgtccagcgcagccaaccccgaggagctggtggcatttgacgtcgtctgtggagatttcaactttgataactgctcctctggtgaggccgggctcctccccactcaggtctccagctctggggaggctgtgggctcagtcacagctagacagacttcgttaggcagctcaaagaattcctgctcctcgagagcatgtgggcggggtatttagcaagactgatttctctgccccctagaaatcctagaacaggaagagcccacgctctgcctagaaagctggagacagagatgccctaaaaacraacctctgacaaggaaggctgggggcctctgaagcagacaaaggacgagtccactagtaacacccatcaacggggcgccgcgctcttgcttcgagccagctgccattctatcgctgtttcacttaagtgtcttaacaacccygagagggaagcattgcatgtctccacgtggtgtggtggaggaagctgagactcagagaggctggagaaccagcccaaggtcacatagccaggcagtgattgcactgggatctgaaccctgggaattgcaccttaaaccattagggtgaaagactacaagctcgtcatcagtgaaacagcaaacacttgctgtaaataactgatctgtggatccgatgaccacatggaccttgtggggaccttccttcctctgtccgaggaccgtggtcactgtcactgtcctcagagggaatgctgaagatcagggcgtgtgctgggggaggtgttctcaaggacacagaaaagcagcgacaaatgaagcacggggcacctgamtgggacygagatcccacccaggggcagtggcctaagggatgggggcctggcagcacatggggagtaactgatgggaagcaggggcacaggccgtgtgggacagcaaagccccctggtgcctcagcgtttcctccctcccyrcacagacgacaagctggagcagcaacactccctgttcacccactacagggacccctgccgcctggggcctggtgaggagaagccgtgggccatcggtgagctggggctgggggaggaggatgggagctgggctccccacagacttccctcaaagatcaccaggacctaccccacaagaccccactgctggggaagggccccattcagctgcccctggctagcagaagcccgtgtccacccacagmggccaccccctagaggctgcctgggccctgcctgcagcgaccactgtcaycccctcgtcccccccaggtactctgctggacacgaacggcctgtacgatgaggatgtgtgcacccccgacaacctgcagaagtaagcactgcgctcccaggccagggacgaggcacaccctgactaaggtggagacagggactgggcaggacccacatgggagagctcagctcgggctcatgagggcttttatttggcagaaacctgtccctcatctcacctttgagagcttttgagagctgggagctgggccaggcaggtagacctcacgccctcacgcccaggggtactggccttgctaaatctctaggggtatttcccaaacctgttttcaggagctagccctgccccgagcccctgcctgctgggtacasgaaagggcctggaatttccccgggccaggccacaggtcgacccccatgaaagagctgctgggtacggcgcctgctgaaggcagcctggcagcttgcagcaccaatcaggcaaatacagacaccagctgcaataacacagccgaccattttcaaagtagagacagttcyatcccagccaaaattcattcttgagcccagtaagatgtccayaaagaacacatctgagaggccaacagcagaaccaatttataattcacagcccgagactgcagtcacagcgatggttccttgcagctaatttgagccaattaattagattatagactaaatttgaaacatcatcctatgctgagaaaattctttttatgagatgatgatttaaaaatgactaccagtagctctcagatcattgatgctggaattaattatcaagggcaaaggacagtgatggattccatttctgagctgtaacaatgtcctgaatgtcattagtgtatttatcttaaggctgatgaaaaccttgtggaagcccatgtttgcaggccctgcctcgccgggtgccccttttgcatccgtccaggcactcacwgacctggcggcctttgcagggtctctcaccactgcacttgccatcccaggccctggccccagcctgccctctgcaatgggggctcccaggagggggtcctaagcctctggcccagtggtgctgaggccccaggggacargctggcaggaagcagacgggcatactgcttgtctcagggcaacagtgccagaaagggattccagatgtcacatccccctgctccagcgccctgccctccctgtggatccmctagcaccatcatgggtttcctcactcagaagcgggatgacagcctgttccctgaagcgtcttggggcccacagcaaccattcttgtttcagaggaggaaacagaggcttggaggcttggtaacataagcagagtcacacagccacgyagggacagccccatttgagactcctcrgaggtgctctcctggctccctcagctcctgtcaacctgggaacagtcacaagggtccycgagactcatggcaaagaccaagctccycaaaacaggcccctrttggctcagggcagaagcccattctggggaacgggtggratcagttctgtccgagttcagaaagggaaagtgagtgctggccaggctggggcggacagaacacttcgacgggctccggagcccagattcagccaggaacccacaggcaactcggcctacccccagctgaggccctttttggacccgcaggggagagatcttaaacccagcgctttggtcccacccacccgctcccacactgggaggagaccatggctccacacacagcccctgccaggcccacaggggcgggcatgggggcccacctgcctcctgyatgtgtggacagggtcctggagagtgaggagggccgcagggagtacctggcgtttcccaccagcaagagctcgggccagaaggggcggaaggagctgctgaagggcaacggccggcgcatcgactacatgctgcatgcagaggaggggctgtgcccagactggaaggccgtgagtcaggagggcccagcagccagggccatgcaaagagagagcagggcccgggccctgcagctctcgacagccgctccctgaaaccccacgccccaggccactcttacaatgatacccatcactccctcagacccttagggccccaggtcctccaggccccatccctctgactgcaggaaggtcccagccyaccccagccccggggcctcactttggggatccccaggccgctccctgcaagatgcccttggaatctgaccaggctgtttctcccctctcccactcaccccaggaggtggaagaattcagttttatcacccagctgtccggcctgacggaccacctgccagtagccatgcgactgatggtgtcttcgggggaggaggaggcatagaccgtccggagcagyggggcctctgccagcccttgcagctgcagcccrtccctgggccatgtcccctccatcgagtgcccggtgcttgggggaggagggcagggacagggagggagccacagtcagtgcccgggaacctggaagctgcgctgctctgcgcctctgggcctcactgtggacagaggagtcaggcccgccccaggagcctccagctgcctaaccagtgccattctttcacaacacgattttctacaaatctacagcacaaccgagtttgtaacccgtgggttagtatgaggaccgggttcgtgtrctctctgtatctcctcttaagcttcgtccaggrttctttatttttgtctgctgccaatgtcgtctcgcatgcctgcaccctcgcatgcacrctgcccgcatgccacgtgccacgctgtagccacagaccccttgctcgggcctcacccaaggccaaactccaaacacaatcagaaccagccaaagaagcacttcctgggcacggccaccagctctcccgcctccagtgtgggccggctcctgcagggtccgagggctgcatctctaccagccagcccagggctcttcccagggtctcgcattcaagggcaattacattttaaaaagaaaaacagaaaaaggttaatcacaaaaccaaccctcayttcacagggtctgtaagtcactcatagaactttgctcttcccgagacagggtcccttccccagctcaggcacaacagagtctggcaggctctggcaccctgggcctcctccgggagcctcccatytgggcagtggagccataaacggggatccgagaagagagtatccactttttttttacaggaagaagggactcacagcataaacgggggtgggggggatcctgattttgaaaataatctatttgtagcttctcttctatcaaaaccaacacatcctcttctttctgccaatcctctcccccacgggacacctctctggttcgggaccaatccctccctggggacgtgccccacctgcgtgccggctgagctcaggaacccctgcctgccccccgggtggggctgcggctctggcctcccaggcccatcctcaacagctaccccagccaacaccaaggccacaaggggaccccggcctaggaggcaggaagccaaggtrcagagagcagcctggccctcaccagtgcgcaagctggggcagcaaggctgacagttgctgcatgcccagggcagggtgtggtactggcacccaagttcagcatggcagagctggccaacagcttgtggtccccgatctgcctccagccccaagatgcctacagcccccaggccccttcggcagcactgcctctgcccacctgcctttaagagactccagggctgctcctgtcatgcagcgaaggttttgtctgtttcaaagttcgagactcaacttgagggactgtttttgacaatccccgctgacctccgctcctcgtggcgccctggccctacacccagcctggcccagggccggctttgcctggtgaggctggagggagcaccaggacctgctgtctgctgtcagcccctcctggtgctggtgccctgatgctgtgccttgtcacccattgagctgcaagagggaccaagagggggccacgcagccagccagatgcctggccctgtgctggggcagacaacrctgcagagcccagggagcctggcgctaggacgtgcgtccttgtgacactggcctgtctgaactcacctggcctgggaagcaccgtctgcccgggcccaagccctgcccctccagagtccagagccaggaaggggctgctgagggcgagcatcctgctgggctctctgcccggcccacccctccaaggggctggcctgtgagccttgactgggattcatgatgtggaggcccccaacttccagaagcagctggtactctgctcacacaagcgactgggccggccggccctggacccctagaccccgagccgcctgccgactgcctgcacagggagagcagttgaggcccgggcagggcccccacaccagaccccaacatagcttccccacccaggcaccccctcccggggcagcaggcgtgggagtcagggctgcatgctcctcccctcccacctcacaggcggccttaggcaagtcattttctgtcatcacaaggtcgcctctgcctagtcaggtcctggcgtccagagtaaggatgtgcggcccccaggcccccgcacacctccctcagcaccaagaccgggacccccccacccacgtgtctcattgtggctgcctatggactcccgggccttgtgtgcaggccaggcccttccactgattttttaaagtgaaccattgctggatctcagattctgtggcatctaaggcctagcaggggtgggcacacgggtcacccgaggcccataccaagactctgttcctgccctaggcccagtctcaaaggaagccacaaggcgcgggggccactgaggaaggaaatgttcattttcatttgtccaaaaccaccttaagttttaagtatattaatcttgatgctttttaactattgctttttaacttgctgagatttagaaatactgttataaaaacttttttaatttctgtatttttttctgtattgtatcttcatgggacattaggggttttctatggtaagcacacctatggttttggtaaaaacattatcaaatatatatccagacggttcttccctagaagaaaaacaagtctttacacctgataaaatattttgcgaagagaggtgttctttttccttactggtgctgaaaggaaggatggataacgaggagaaaataaaactgtgaggctcaaggctggtgttctccacttatttcagcgacaagctggggccaggcctcaggggcacgcctgggggcaggggagggagttcctgcccccaactgcaggacaggcactgcccaagtctgccctgaatccgaggacaccggaactctgctcatacaggcggctcggctggcctggcacaagcctcaccttctaagctgcgagccagaggccactgggttctctcacgtggtgtctgctgttacctctgagagctgggacataaccaaaggggggttagtgtgtgagagaagcaaggccacggcacctactgaccttcctggtgaagcggcgctgggcaggggctgctccctgccataccccacctgcaggaggggctttccaatctgagggaggtgcagggaacagggctgcctcccagctcccctgacagccactttcctgggcctgcatctcaggaactgctctgggacagctgccttgtgtccagtctcaggtcctggcaggccaccagctggtgcagcactgaggccagacacctatggatgtggcttgaagttacctgtcaggtgaaagggccagaacccaggcctctcagcccgggcccagccagggtcttcaagccccagagacccagccactcagcatctccacccactagagggccagaaatctccaccctcctagcagaagccagaagagcagggacccggagatcctcgagagtgagacagacaggacaggctcccgccacggggactgctcgccaagggcggcgtggacaaccccaccggccagccccacaagctccctgtgcttccactcccttcccagctggggagagatgtctctgtgttggagcattctcagcacctcagaagcacaagcaggggggtcttcccagcccctccagggctccaaattcagtcaccctctcatgcttcctgccacagctggagccagaggccagcagtgcaaagatgcaacaagatgcaacacggcgcagtctttcccatccctgaggccgagcagctcccagagaggagaggagggccttcagccttcccccctagaaagccatgagccactcagaaccccagccctcaggccactttattgctcaagagtggtcagtctggggtatctgcatgcctgaactccatgatgatgtcgcctgtgtcggggtgaaactccactgcatagctgacagtccgtgggccacccagcagtgctctgggatctggggcagggctgaagaagtagacggcctgcttgcagtgggggttccagcagcagcccccctgtaggaagaagagcaggaagatggtgagggctccctggcacctgagcctccttcctagccagcctccagcccaggcagctcgcagcagagagaagctgctcaggggccagatggcccaggaccactgaggggtcatcatctggcccgaagaacttgtgacagaaacacccagagcatgggggcagggaggcctccccaggcggcgcctgctctcagggtctgcacgcacactgggcccggtgcgcaggcactacctcggggtctgcaggctccaggaggccagtgctgagcgtgcactccggggtcaggtggtactccatccatagcaccgctgcgtggctctgcccgggcctgtcaaggagaggggggcccagcagaagtagtcacacaagaggcagcgggggaacagctgcagctcctgcggctttccagaaacctgtggtcttccccacttccttcctgccctgccgggagttcctagtgctgcagttacataaacgttcctcagaaaaaccccagccagaagagccgcagccaagcccccacctgagccaacccgagccctgcagccgggccacacatggggcagggccggtgtggctgcagggtctgggggagcttgaggcacagcctggcactgaaggccggaaggcccctctgatgccccagacagcaaccctgggagctcaggtgatggcgcccgccctgcctggctgcctgccccgagttgggaggtgcttccaggagaagtcactcctcgggcgagggtggggtgagggccggagcaggacagggctgcccgtccctggacgcaagcagcacttgctgaccctgacctgctycagctcccaggagggttcaggaaaatggtgcatcggtgaccacaggaagtaagctcccatcttcctgagctgtgatccaacaagggagcctcagctgtagagggggagcagagcccttcctggctcctccaccagtggcacacacaggaccgtgggaaccaccacacgcgcagggccactctgacagggaagggcaaggttgtggggaggacgaataccccctccacgtgtcagcgtctcccaggccagctgtgctcaccacgggggtgagaactccaagggcaagcagcagcccctccctgccccccagccctctctgcacccaccttctgagctccacrgtgccctcggcacacaggggctgcaggggcaccggctgctggaagtcaaaggtcaggatctgccagggctcggagaggytgcggcatgggtactcccacagcgggtggggctcagcttccctgctctccctgaagtccagggcacgctgcgaacagaagggggcctgggggctgcagagacaggccggcagctagacagaggtaccgctccccggcttggctcccactgactgcagtcacaaggggtgtgcgttctcccataaagatgccgagcgcccagcagaccagcggcgccccctctctgccacttctctctcatcagtggctccccaggcaccgctggctctgagcctcgctctccggatttttaagatggggtggtgctgcctgtctcaagccttctgaggaccacatatctacatcactggtgagaacacccagcacctagaaacttggtgaccaccacagctgtgtggccccgacaggtgggccccgggccacagggagggataaatgcgtgacagtacagccccggtgcctggcggcaggctgggggcacctgcatccaggagggatgcagaaagctacctggaggaggggaggtgacggtcaaatgggagccggcaggagaagggccagagggggccttgaggatagagctaagtcaggagagcaggccagggcacccaggccagccgggccactctgcaggtgtggtgtggggagccagctagggcattcctgcagtggggatgtggccagactcagatctacaagttcatgtgggctccgtgtggaggacggccagagcaggaggggctcaaaccaggacggcagcagtcaggggacagcctgggtcggaggctcaccaggagcacgaagaccaatggcaggggatgggaggacttgccagggaggatgcccggggccctgggcctggctggtcgtgtgaagtggcgccaggtctaagacagggcactggaagggccasgctaagggtggggaagggcaggtggatttggaaagcatagaagtaaaaatgcctggcaccccactgtgggatacccaccactctcggccatctgccttagcacacgagagacagacactggcccaggaccagagtagcagaaccgtatcagcaagaggggacagggacagccagggtgggcaggccatgagcaggggcccagaggaggcgtagagcgcatgggtccagagcacgcagggctcagcacgaaggagatttctaaaagcatcgaacagtcaatggtctgctgtgaggggcagataagatacaaactgaaaatatccacaaggtttaatttacttaaaaaagtgttcacacacaggcaatccatgttcactatgggaaaatgagagcagaaaggtgagcagaagcagaaaagccccacctcccgatgcatagctgctgctgcggggccaccgctgcttcccgctcctctggtgtccatgagatttctttttttgagacaaggtcttgctctgtcacccagcctggaggcagtggcacaaacgcagctcactgcagcctcgacctcccaggctaaagccatcctcccacctcagcctcctgagtagctgggaatacaggtgtgcactaccatgcctggctaattttttgttattttttgttgagacagggtcttgctatattgcccaagctggtctcaaacgtctgggctcaagcaatccaccagcctcaggttcccagagtgctgggatgacaagcaggagccacgtgcatttccttaatacacagcacggcccatgctcctcaccctgcccctctcatgtggatggaacacgactctcagcttcagtcctcatgaatccaaggaccactggcgctgtcaggacagcccatggttctggagaacgtaggcccagttgctaacccctaccatgtaaataacctgtgggaatctcctcaggtacccctcccgggaatggagcccccaccatggaaatggctgcctaagaaggttcccagatggcctctggaaagtcagccccactagaaaagaagctgtgggcactggcaggggcagttgcaatgacaggacgtgcaggcccagtggagattctgacacagggtgacagcacggagccaagaacagggctggtaccaagcaatgctcatgttgaaccacacaaaatggcagcacctgacctcactgcccccaacagaagagcctgtgctgcccaagctgggaccctgtgagaggcctgcgatacaggagcaggtcggggggactatgcagagtgtggccctgcctaccttaatcatgtcrtccatgatgtgcacgtcgaagccttcgcagtcaccacaggggctccggatccgccacaggtcctgtgaggaaggagcagccccgtccacacccgcccgccaggacacagggaagcgtggcagcaagaacaagaggcacatcttgctgttccctgcacacctgaaagagacccccaagtatgaaggggctcagagagaacaaagatccacaacggtttctgtaacagactgggctgggcgggaacctgcaagctctgacgtgacacctgagtcctctcctataagggacagtcggccagagctcctaggctgggggctgcacactcctatccgggccatcctgaacatcatttctttgggaagaaatctgtaagccaattctctccccagcatcatctccagttcatgaggatgctggggagagaaaaaggccctgccaagaggaacccagaggacactcaggccacacagccttccctcccttcctcctggtcacacgcacgcatggatcgtgacatcccctctttggccatgaaaaccagaattcatgtggaaatctgattaggtaaacaagtaacacaggagaaatgcccagactttcagtgatggagccactaagctaggagagaaaaccactctcatcaaatgagatacactctccatccagggtaaagcttttcaaatccttttaataaaaatgcccytcccaaaatgactttgtgactatggttctgctttgatgagaaaattaaaaggaagcttttccattttttcttgcacaaagcagctgactctcccatctcaaaatgcctttaacaatcgaagcctcggctattaatgagagcagagcaggccacacggcatggcttctgaaacrcttaatttatatttttaaattattctgataagccacaattgtaaaatgacaacactcagccatttccatttcgtatgtcaaattatcgcattttttaaaaggcaagcatcttctattcaaccccacagtgtgctgacacagaaagaaaacacaagctcaaatcatcaaggcctgagccgctctacaggcacccaaggttcctgcaagaaaacaaggttccccacccgcctcctctgcttttttctccaacatcccctgggtggcctaccctgaactccacaaccacagcgtgcagcgaggctgcctggggcatcaccatggcacctggccccaggtgctggtccacagcrgtccgcacgtaccagaagtagaggttgtgccacggcagcaggctggtagtgaagaacggctcgcccaggaggagagagacctggtgaatgggcgagaagcagggcccaggtgtcagtagggctcggtccaggagtgttaacaggaacacggaagcaacaggccactcagtcactcaagtcactccctcactccctccctctccctccctcactcagtca

SEQ ID NO: 94719 - DNA, 75729 bp, Homo sapiens
  misc_feature (1)...(75729): n = A,T,C or G
aggccagagaggttgagcaacttgtccatttcagcacttggttaaggagggatttgaacccggggctgaccttctgtctccagggccagtggcagcccgtcttctatggacacctcctgcccacgatcactgcctctgctcatgcccttacctccccacccatcccgttccaccttcctttggaaatttccctcaatgacccccctattctgacaaaagctaagatttagctcgataatgcctggcccagctccaaggacatcacaaaaatgaacaggctttccaggcataaacacctttctgaaatcacttttccagaactccctccatgctgtagaggttactagcaaagctttccacatcatttctccccagagccccgtgaggggagtgtgtctgggtgggaggctgtcttcgtctcacagatgagaaaatgaggaagagaagggttaagaaacttgcatgggtacagtggctcacatctctaatcccagcactttgggaggccgaggcaggcagatcacctgaggacaggagttcgagaccagcccagccaacatggtgaaaccccatctgtactaaaaacacaaaaattatccaggtgtggtggcgggtgcctgtaatcccagctactcaggaggctgaggcaggaaaatcacttgaacccgggaggcagaggttgcggcgagccgataattgcaccactgcactccagcctaggcaagagagcgaggctccatctcaaaaaacagaaaacaggccgggcgcagtggctcacacctgtaatcccagcactttgggaggccgaggcgggtggatcacgaggtcaggagatcgagaccatcctggctaacacggtgaaaccccgtctctactaaaaatacaaaaaattagccgggcgtggtggtgggcacctgtagtcccagctactcgggaggctgaggcaggagaatggcgtgaacctggaaggcggagcttgcagtgagccgagattgcgccattgcactccagcctgggcgacagagcgagactctgtctcaaaaaagaagaaaaaaaaaaagctgacatcttgcaaggccttaagggacgtgattctgatctcatctcttccttctgtgtgtcagcacactggcctccttgctgctcttggaacatccagacccggtcctgcctcagggcctttgcacttgctgtttcctctgcctggaatgctcttctaccagataccctcatgcctcactttcttgcctcctttggtctttgcctgaatgtcaccttctcagaggactggctgaccaccctgtttcaaatggcggcatcccttactcgacttcttttgttttttttgagacagagtttcactcttgttgcccaggctggagtgcagtggcgcaatcttggctcaccgcaacctccgcccccccaggttcaagtgattctcctgcctcagcctcctgagtagctgggactacaggcgcgcgccaccacgcccggctaattttgtacttttagtagagacagcatttcaccatgttggccaggatggtctcgatctcttgacctcgtgatctgcccgcctcggcctcccaaagtgctgggattatgggtgtgagccaccgcccccggcaacccaacttctttgtagtctctttcctctctccctacttcatttttgtgtggagaacttttcaccttcttacccactgtgttcctggttcattttgtctgtgtctcctccgttagaatgcaagcttcacaggctgggcacggtggcacatgcctgtaatcccagcactttgggaggctgaggcggattgatcacttgaggttgggagttcgagaccaacctggccaacatggtgaaagcacgtctctactgaaaatatgaaaattagccgggggtggtggtgtacacctgtaatcccagcttcttgggaggctgagacaagaaaattgcttgaaccccggaggtggaggttgcagtcagccgagatcacaccatgtcaccaacatgataaaaccccatttctactaaaaaaaaaaaaattagccagagttggtggtgcacacctgtaatcccagcttcttgggagaccaaggcaagagagtcacttgaacctgggaggtggaggttgcagtgaaccgagatgatcgtgccactgcactccagcctgggtgacagagcgagactccatcttaaaaaaaaaaaaagcggccgggtgtggtggctcacgcctgtaatcccagcactttgggaggccgaggcgtgtggatcacgaggtcaggagattgagaccatcctggctaacatggtgaaaccccgtctctactaaaaatacaaaacaattaaccaggcttggtggtgggtgcctgtagtcccacctactccggaggctgaggcaggagaatggcgtgaacccgggaggtggagattgcagtgagccaagattgctccactgcactccagcctgggtgacagagcaagactccatctcaaaaaaaaaaaaaaaaaaaatgcaagcttcacaagggcaaagatttttgtgtgatcagtcctccacttaatctgcagcacacagaattgggtctagcacatagaaagtgttggagagatacttgttgagtaaacgagcttttggcatttggtgcattcatgtgcattactgctttgttgcttcattcaagatatgttgcctccacggtctatgctgagtgagcctggaaatcagagaaggcacatttttgccttcgattgatggggatgaaggaacagagagaaagagatatagtgtggtctgatggcagagagcctcgggcaggtgtgggtctgaatcctggctttgccacttgataattttggagatacttattgtgtgcttatatcttctcagtacatcataaatgtgtgtgtgtgtgtgtgtgtgtgtgtatgcataatcctcaccacatcctatggaatgggtcctattatccccattttttttcttaattgagacaaggtctagttctgtggcccaggctagaatgcagtgtcataatcacagctcactgcagtctcgacctactggggtgatcctcccatctcagactatatataaatatatatacacatatatatagtagagtctccttatgttgcccaggctggtctccaactcctgggctcatgtgatactcctgccttatcctcccgaagtgctgggatgacaggcatgagccacccaccacacccagcttattgggaggataaagtcaggttatagagagttgtcaatacagtacctggcaaagaggaaacgcaaggctggtgttagcaatggcgaggacgatggcctttcttcccatgcgtgctgcaagggaggacacgaggggctctgccaaggccaggagaggctgctgagggtcaggacaggctgcctggaggaggaggacaggctgcctggaggaggagggcaggcyaggaatcaccttgaaggatgagtttgacagccagtgtcaatcctagaagataggggtgttctgggccctgcaactgcctgagtgaaggatgggggctgcaggggtggccagcggggctagactgtgagctcctggctacccagcaggtggtcctggtgcgtgtagcagcgggtgggggaggtaggggtggaaggagggcccttacgcttctctttctttggcttctgcaattctgtgttctcatcacattcatgccacaagtattttctgtgcttgacbgtacctgagttggggtttgagggaaggagcagaccccttgccccattgacaggagaaaacagaggctcagagagggaagtcagtagcctaaggttacagtggccctgggctgtgacacagatgcagatctgactgggcctgggctcatttcttcatgaacaaggggagaaaactatctcatagaagcatttggtatgggtccgaggcctttgggtctgagggaggaggggctggggtcyggactcttgggtctgagggaggaggggctgggggcctggactcctgggtctgagggaggaggggctatctcattgctttgggggtggcgcargcggccctccaggccatggtctggagcagcaggtgagaccgaaacccgagcctccacccaagtcccaagtcccagggcccagggcctctttcctccttctctggccgcaaaggaggcccctccctctctgtaacccacagcaaatgcctcccaaataccagtcaaagtgtccacccctgcacagtctgactcagccagtccagggcggaggcagtaaagccctgtcttggcaagtcaccagggaaatccatcaccgaagcacctctctcccccctcggcctggctattctgtcattggcacctgttcttgggtgagtgacagggctctgtggtcagggtttgcctctgtcccagtctgggatagctgtcttggggggctggcctttcttccctctcacctgggatgtcccaggaacggaacagaattctcccctggggcttgaagagctcaccccccatctcctccgttatccccacccccacaccacccaacacacatcctctagtctgtaggatttgctgacaaattcctatgacagccggatgtggtgcctcacacctgttacccagcattttgggaggccatcacttgagatcaggagttcgagaccagcttagccaacatggtgaaaccccatctctacaaaagtagctgggtgtggtggcgtgcgcttgtagtcccagctactagggagactgaggcaggagaatcacttgaacccgggaggcagaggttgcagcgagycattgcgccatgcactccaggctgggtgactgactgagattctgactcaaaaaaaaaaaaaatcctatgacaaggagaaaggtcagattccctggcaatgggagctgaggcatgttcttgagaaggagggaggttataaattagatggggctgggtctcagagagatatagctacttacatattaaataatgaggctgagtgtggcgtctcacacctatagtcccagtactttgggaagcagaggcaggaggatcccttgagcctaggagtttgaaaccagcctgggcaacatagggagattccatccctaccaaaaaaaaaattaaaaattagccaggcatagtggcctgcatctgtggtcctagctgcttgggaggctgaggtgggaggattgcttgaacctgggaggtcaaggtacagtgagccacgattgcaccactgcactccagcctgggtgacagagcaagaccttgtctcaaaaaaagtaattaatttatttattcaatacgtagctcctgagacaaaatgtgtgccgtactctagaccctgctggtgtgcacaattcatgggggatatgtgcgctaatggaagtgtggcacagggcaagggtgtccccagagaaagccctaatccagctttatgggtggttgtatgaggcacagaagcctttcctggttaagggataaatggatggggtttcaaaggatgaataggagtttgccaaggacaatgaagcaaagattgacattctaagcattgggagtgtcctatgcaaaatcccaaagtgatgtagtagcaaatacttaagcacctacagtgtgccaagcatgtttcatgtgctggagatacagaggaggaggagacagatgaaaccccagcccttgtgatattgtcatcctagtaggtgtggtggggagataaacaagtagacacctgcatgaataagactttcagattgtggtaaaccctgtggaggaaacgaaacaggtgaaggaacggcgtgactaggagcaggcaggtgcggctgcttcaggtagggtggtcagggaaggaggcggcatctgagctttgacctcaatttcgagaatgagccaggaatgcagagaggatttcaggcagaggaaaccttagggaggctggcgggttaaatctgcaggggtgtggctggccggaggaagtgaggtgtgagacagtcacgttgatggtgacagcagcagtgaccgtagcagcctagaggtggccgaatgcttactctaatgggctggcccatccctgagtgtctagagttcccagcccgcttaaggaaggaaggaaaacacaggcagctctaagtgtacgacgagggaggtctcatcggcggtgaggaagcccaggcgggtccccttcccagctgaaaggggttcgggtaggtttttcctgggcgttcctctgagaacagccagccctggtgagagtgcggggagaggcgcttatgacacagggagggtgggtctgggaaccagcctggcaggaggaggagggagactsccggtggccgggagctgtttgttctctgggagggatcgtggcggggtggtttgtgcagccctttcctgaaaccggaggagcctggctccttcccaggtctctgggggatgggtcggggcggggggtggtgacggggataggaccccagacagacttgagtttggatcctgggttggagccggtgacttcactctcagctccctgaacatcagggcctgcctttcttccctcccttcccctcccctcccctcccctcccctcccctccccctgccctcccctcccgtccccctgccctcccctcccctcccctcacctccacctctcctcccctcacctccccctccccttccccctcccctcccttccctcccttcccttctccttccttccttcctttccttcccttcccttcccctcccctcccctcccctcccctccccttccttccttccttccttccttccttccttccttccttccttccttcccttcctttcccttccctccctccctttattcttttctttttttcttttcttttctttctttcttgacagagtcttgctctgtcgcccaggctggagtgcagtggcgcgatctcggctcactgcaagctccgcctcccgggttcacgccattctcctgcctcagcctcccgagtagctgggactacaggcacccgccaccgtgcctggctaatttttttgtatttttaatagagacggggtttcactgtgttagccaggatggtctcgatctcctgacctcgtgatctgcatgcctcggcctcccaaagtgctgggattacaggcctgagccacagtgcccggcctcctctttctttttttgagacagaatctcactctgtcacccaggctggagtgcagaggtgtggtctcggctcactgcaacttccgcctcccaggctcaagcgattctcctgcctcagccttccgagtagctgggactacaggcgcgtgccaccatgcccagctaattttttggtacttgtagtagagacagggtttcaccatgttggccaggctggtttcaaacccctaatctccagtgatctgcctgccttggcctctcaaagtgctgggattaaaggcgtgagctaccgtgccaggccgtggagtagctaaacttatcttacactgctgaggtctctcaagatgtgtgtagggagagagagttggggggagagagagagmcaaaggaaaagaggaagagagagacagggagaaagagaggaagaaagagaaagagagaaacaggaagagtgagaggagaaagagaggaagggggagagaaagagagatgggggagaaagagagagagagaaggagacacaggagggggagagaaagagggagagagcaatgagagagatatgagacagagaagagagagagaggagacacrgaggagggggacagaaagagggagacagagagatgagagagagaaaagacacagatgagggggagagaaagagggagagagagatgagagagagattgatagcacccagctaatcaatcagtggctttagtgccatgagctggaagggaggaatggatactggggaacagttggttgactttccctggtgggacagcccctctttctagaactacctttcctatgtcccctgtgcttctctccagtccatactctacatctcagccagaaaagaagaaattctaaaacatgtatctgcccgtgacatgaccctccttggctcaacactcttcagcggtacccagcgccctctgagtcaacgccaagcttcctaccatggcattggagccgcgctctgggtccttttactgatggctcccgcctcagcccttccacccctcccataccctgcatgccagcccaggcagccctccctcctcccacaatatctctcatatgcattcctgtcccatgccttctgcttaagctgttcccacagcccggagtctcctccctggctgagggaaatcttgccggctcacatggccgtgatccccatcatttcctgcagaaagcttgcccagctytccgacacggggaccttctgcccctcctgagccctgagtcccctccatcttaactgggaggtcacctgtttgcgtggtgtctgctcagcttgcagrcaaggccaccaacaccctcctttcctgtctttccttcctaccatcctctcctgtccaccctctgcctctccctcccttcttctcttctttccttctagttactgagccatgcatgtgttgcatgcagcaaggatgaataaaataaaataaacctacagcaatcattccrgttactatggccatataacaaattattctaaaactcagtggcttcagacaaggatcrtatctattttactcaaaaacctaccatctgcacaggccttggtggaggcagcttatctgtgtgccctttggtgatggctggggctgtcaagaagctggggcagtgcttgggctgcaaagactcaaatggctggagtctgggaccactggagctccttgcccccctttgcttatctctacacagcmacagggtcgctaaacttaccttacactgctgaggcctcttaagatgtgtrtagggaragagagttggggggagagggagagagagaacagagagagagagacacacacaagaagagagagaggaagaaagraggagagagaggaagaggaagggagaggaagagagagagaaagagaaagagggagagagagaggagagaaagagacaagaagagaggaagaaaaaagaggaagagagggatagaggaagacagaaggagggagagggagagagaggaagagagaggaaagagaaaggaagggaaagagagatgtgagagggagagagagagagaaaagaggacagaggaagagagagaggaagagagagggagagaagacagagagggagagaggaagagaaaaggagacagagagaggagagatagagaagaacgagaaaggagagacagaatgtgaatgagaattgggtgccataaaccctctgatggggaaagcaaagggcattgtgggagaatcctctcagcacctgggacagcacccagtgctgatcaggaacatgttaacaaccaggaaaatggtaaaggcgtggacagcccacctggagtccaaacagatgttctaactcccttgggtgtgtctgggaatcaggtaggagatcctcagaggaggaatatgcatgcattgttctctttataataaccatattaacagccagcaatgttctggcacttactatggattaagtccttgttatraatgacttcatgccatccttccaaattcaatgacaggtagctgggcgcagtggctcacgctttgtaatcccagcactttgggaggctgaggcaggtggatcacctgaagcctggagttcaaaaccagcctggccaacatggtgaaaccccgtctctactaaaaatacaaaaatcagccaggtgtggcggcgagcgcctgtaatcccagctactcatgaggctgaggcaggagaatcgcttgaacccaggaggcagaggttgcagtgagctgagattgcatcactgcgctccagcctgggcatcggagagagactctcaaacaggagctggcgaactgtggcgcactgcttatttttataaataaagwtttatgggaacacagctgtgctcacttgttttcacatcatctgtggctgcttcccagctcctctggcagaggaggtgcaacagccactgtgtggatcacaaagctgaaattatttactatctggctgtttgtagaaaaagtttgctgatctctgtcctggaagtcaatgatattaggatttcagtttacagaaaaggagaaaaagacagggaaaaacagtgttgtttttttttcaaggttgagaaaatgaacatctgaaccaattgcccatgttattaaatgtaaacatttattattattatttttgagatggggtcttgctctgtcacccagcctggggtgcagtggcacaatcacagctcatcatagccttgacctcctgggctcaagcagacctcccacctcagcctcccaagtagctgagggtgcagatgcgtgccaccaaacctgctaatttttgtattttttgtagagataaggttttgccgtgttgtccaggccgctctcaaactcctgggctcatactattctccactttggcctcccaaagtgctgggattacaggcatgagccaccatgcccagtctaaaatttttctttatttttagtttggtaaactatgcataaagtaaaatgtaccatcttaaccattttaagtgtacaattcagtgatgttaagtatattcacattgttgtgcaaccatcaccaccgtccaccttcaggtcttttttttattttgcaaaacaaactctgtatctattaaaaaacagcttcccggccgggcgcagtggctcatgcctgtaatcccagcactttgggtggccgaggcaggtggatcacctgaggtcaggagtttgagaccaacctggccaacatggtgaaaccccgtctctactaaaaatacaaaaattagccgggtgtggtgacacgtgcctgtagccccagctactcgggaggctgaggcaggagaatcgcttgaacctaggaggcagaggttgcagtgagctgagatcgcccactgctctccagcctgggtgacacagtgagactgtctctcaaaaaacaaaacaaaacaaacaaacaaacaaaaacaaatcctgtgacttcccaatctcatctccagccccctgcagccaccactctgttttctgtctctatgaatttgactcctccaagtgcctcttatacagcatttggcattgtgtaactggtttaatacgtttgagatggtgagagcttaaggtctacaggcctaaggtttttttttttttgacagaatttcactctgtcgccaggctggaatgcagtagggcaatctcggctcactgcaacctccacctcccgagttcaagtgatgctcctgcttcrgcctcctgagtagctgggactacaggtgagtgccaccacatccagctaatttttgtatttttagtagagacagggtttcaccatgttggccaggctggtatcaatctcctgacctcgtgatccatctgtctcggcctcccaaagtgctgggattacaggcgtgagccaccgtgcccggccattgactaaggtcttaaaatagctcttcctgcctgtataatctccattatggcagggctcatataagaagatgacagttcatctgatgaggaagaaaacttactcctagttagattgggttgaattcttccctgtttccagcggtgtctgctcctggcacctcaggcacagtcaggggtaggaggtggtgatcagatacactcgctgtgagcagtgcaaggggaagcaggtgcccagaggtgcatcccggtttggtgggggtgacaaacatggacaggtaagtgcaggagtgtgtgcaatactcaatctaagaaaggtagttcaggcagagttcagggaagatatctctgtgcagggccagacatggggatgagattctgataatttgggaatgaatcaggcccccagcccctcctccctcagactcagcagtccaggcacccggccctcctccctcggacccagaagtccatgctcccagcccctcctcccttggacccaggagtccaggcccccagcccctcctccctcagacccaggagtccaggcccccagccgccttctcctgcaggaccccaggagcttgggtacccacaggctaytagatccttgtttctgtgcatggaaattctcaaattatctccaaaagtctatgaagaaggtaaacacacatttccagatgaggraataggctgatatagttgaaagacacacagagggtcacagtctggaattgacagtggtgggattcgaacctatttcactccagaactgcgtagcgccttatacgctgcggcaagtgtgacgtcattcgaacaaaccataggccccgcccccggactagccacgcccacaggctcctgaaaccaccaatcccagctgtgacagcgctcaggaccgatgctcataggtcccgtccctaggatccccgccccctccgcccgcgccccgcccctcgcagcccagttccggacgcgggcccagccgcgcctgcgcytccgctcgcctgtggctgcgtcgcgcgctcttcctcggagctayccaggcggctggtgtgcagcaagctccgcgccgacccckgacgcctgacgcctgacgcctgctmcccggcccsgcatgagccgctacctgctgccgctgtcggcgctgggcacggtagcaggcgccgccgtgctgctcaagtgagtacattctagccccgcgtgcgcggtcaaggcgggcccccagcgcaggggccgggaaggcggcggagacccccgcccctcgcacccgggtccaggccccgtagctcccgacccgcagtgcccgcccggagtggggcaaacctgcgctctggccggccaggtcaccggcccaaggtcactcggagggaagggcgagcctgggcccttgtaaatgttgctttccttccagacttttaaactctttattttgttgttttgtattatttatttgttcgtttatttttaaaggcagaatctggctctgtcgcccaggctggagtgcagtggcgcgatcttggctcactgcagccttgacctcctgggctcaggtgatcctcccaccttggcgtccccaggagctgagatcacacgtgcgccaccacgcccggctaatttttgtatttttcgyagagacggggttttgccatgttggccaggctggtctcaaacacctgccctcaggtgatccgcctgcctcggcctccaaagtgctgggattacagacgtgagccacctcgcccagcctacttaatttaaactttcttaaaaattagcctctgtggctggtggccactgtattgcatggtgcccttctctcctgtgggtgcagtgctgtttacctgctcagcctcctgttgctggacactatcttgttgccagygttagcctctgtgggacatgggtgtggtgggcagagtcgtgactcmgtagaggggtccacgtcctaatcctcggaaggtgtgacgacattacctcacgtgtcagaggttctcgctgatgtgttaagtgaagcatcttttttttttttgagacagagtttcgctgttgttgcccaggctggagtgcaatggcacgacctcggctcaccacaacctccacctcccgggttcaagcgattgtccggcctcagcctcctgagtagctgggattacaggcatgtgccaccacgcctgtctaattttgtatttttagtagagacgaggtttctccatgttggtcaggctggtcttgagctcccgaccaaaggggatctggccaccttggcctcccaaagtgctggggttacaggcgtgagccaccgtgcccggccaagtgaaggatcttatgattatcatgtagtctttttttttttttggagacagggtctctctgtcacccaggctggagtgcagtcatgctgtcacagctcactgcagcctcaccctccctgggctcaggtggtcctcccacttcagcctcccgagtagctgactctacaggcgtgcaccaccaagccctgctaatttttgtatttttagtagagatggggtgtcagcatgttggccatggctggtcttgaactcctgacctcaagtgatcctcctgtcttggcctcccaaagtgctgggattacaggtgtgaggcactgtgccggtcctgccttgtagtcttatagggtccttataagagggagcaggaggctcagtcagaggggagatggaagatagaaggagaggttgttgggtgtggtggctcacgcctgtaatcgcagcactttgggaggccaaggcaggcggatcacaaggtcaggagttcgagaccagcctgaccaacgtggtaaaactctgtctctactaaaaatacaaaagaaattagccaggtgtggtggcatgtgcctgtaatcccagccactcaggaggctaaggcaggagaatcgcttgaacctgtgaggcgaaggttacagtgagctgagattgcgccactgcactccagcctgggcgacagagcgagactctgtctcaaaaataaataagtaaataaataaataaataaaggagaggttccagtgaggatgcaggttgaagatggaggcggggccaagagtggaggaatgtggcggtctgtaggagctggaagtggattcttccctagagcctccagaaggaacctgactctaccaataccttgatttattccagtgagacatgttttggactcttgacctgccgaactggaggaggatgcacttaygtggttttaagccactaagtctgtggtaatgcgtacagcagccwtgggaatctcgtgcagcgggcattttaaatttaaatttaaatttttttgagacagagtctcgctctgttgcccaggctggcaccatttcgactcactgcaacctccgccttccaggttcaagcaattctcgtgcctcagccccctgagtagctgagattacaggtgtgcaccaccacgcctgtgaaggggtggcctgcccctccacacctgtgggtatttctagttgggtgggacgagagactgagaaaagaaataagacacaaagtatagagaaacaacagtgggcccaggggaccggcgctcagcataccaaggacctgcaccggcaccggcctctgagttccctcagtttttactgattattatcttcattatttcagcaaaaaggaatgtagtaggagagcagggtgataatgaggtcagcaaaaaccatgtgagcaaaagaatctatgacataattaagttcaagggaaggtactatgcctggacgtgcacgtaggccagattgatgtttctctccacccaaacatctcagcggagtaaagaataacaaggcagcattgctgtaaacatgtctcgcctcccgccatagggcggcttttctcctgtctcagaattgaacaaatgtacaatcgggttttataccragacattyagttcccaggggcaggcaggagacagtggccttcctctagctcaactgcaagaggctttcctcttttacyaatccacctcagcacagaccctttacgggtgttgggctgggggacggtcaggtctttctcatcccacgaggccatatttcagactatcccacggggagaaaccttggacaatactctgtgttcaagggcagaggtccctgcagctttctgcagtgcatcgtgcccctggtttattgagactagagactggcgatgacttttaccaagtatactgcttggaaacattgtgttaacaaggcacttcctgcacagccctagatcccttaaaccttgatttcatacaacacaggtttttgtgagctccagrttgggtcaaagtggctgggtcaaagctacaaattaacaacatctcagcaaagcaattgttcaaagtacaggtctttttcaaaatggagtctcttatgtctttcctttctatatagacacagtaacagtctaatctctcttttccctacacacctggctaatttttgtattttaagtagagacggggtctcgccatgtttgccaggctggactcgaactyctgacctcaagtgatccgcccccgcccccccccacccccaaaactttggcctcccaaagtgctgggattacaggygcaagccccctcacctggccgggaatctcatgcagtgagcatttataaaataatgactgtcacttgctgaaggcgttccacacgccagacactgggtggagccacttatggagaacatgacagaggtcccktggtgtgatgtgatgatgtctgtgtttcagttggggtatgtgagtgagctcagacaaggttgcctgagatcattcagtcaggggcacgtggggtgagagtgggcccacaggactgaccgtgccgcttctcaccctcagggactatgtcaccggtggggcttgccccagcaaggccaccatccctgggaagacggtcatcgtgacgggygccaacacaggcatcgggaagcagaccgccttggaactggccaggagaggtaaaatctcccctgctttggctctcagagagatatctgtacatccatgctcactgcagcattattcacagtccggaggtggaaggaacccaggcacccatccacagatgaacagggaaacagaatgtggcttctatagacaggggcatatgattcagccttaaaaaggaagggcattctggccgggcgcggtggygcacgcctgtaatcagtactttgggaggccaaagctggcggatcacgaggtcaggagttcgagaccagcctaaccaacatggtgaaaccccctctctactaaaaatacaaaaattagccaggagttgtggtgggcacctgtagtcccagctgcttgggaggctgaagcaggagaatcgcttgaacctgagaggcaggggttgcagtgagcagagatggcgccacggcactccagcctgggtgacagagtgagactcaaaaacaaaacaaaacaaagcaaaacaaaaaaaagggcattgaaacagatgaaccttgaggacattccatgaagtgaaataagccagtcgacagaagagcaaatacggtatgattccacttacaggagctacctacagttaaattcatagagaagttkgaatggtgcttgccaggggtcaggaggggaggggagaatggggagttactgtttaatggaaacggaagtttagtttggcaagatgaaacaatttgagagatggatggttgtaatggttgcacaacattaggaattattattattgtttttttttttttgagatggagttttgctcttgtcgcccaggctggagtgcagtggcatgatcttggctcactgcaaccttcgcctcccgggttcaagcaattctcctgcctcagccacccgagtagctgggattacaggcatgcaacaccacacccagctaagtttgtaatgtgttggccaggctggtcttgaactcctgacctcaggtgatccacctgccttggtctcccaaagtgctgggattacaggtgtgagccaccatgcccggcccagccataaatgtttttaataccaatgaactggacacttaaaaatggctaagagggcgggtctcggtggctcacatctataattccagcacttttggaggctgaggcaggaggatcacttgaggccaggggttccagaccagcctggacaccatagcaacacccccatctctaccagagttagccaggcatgctggcacaggtggtacctatagtcccaggtcacttgagcctaggagttcaaggctgaatgagctgtgatggcgccagcactccagccgcggcagcagagtgagactgactcaaaaaaaaaaaaaataataataaacaaaaagaaaagggggttaagatgataaattttaagtgatttgtattttaccacaacaaaaaaaattggaggctgggcattgtggcttatttgtaatcccagtactttgggaggcygcggggtggatcacctgaggtcagaarttcaagactagcttggctaacatggtgaaaccgctgwctctactaaaaataaaaaaataaaaaattagctagttgtggtaggtgcctgtaatcccagctactcgggaggctgaggcaggagaattgcttgaacccaggaggtggaggttgcagtgagccgagattgcgccaccgcactccagcctgggtgacagagtgagactccatctaaaaaaaaaaaaaaaaaggagaggatggggaatcctcttgccttggcctcccaaagtgctggaattacaggtgtgagccaccgtgcccgaccaattcagtgatgtttagtatagtcacagaatgatgcaaccatctttaaaatcaatcttagaacatctgttaccctagaaagaaacctgctcactgtaactatcaagctgtaattccctctccccaccccctgccctagaaaaccaagaatctattttctttctctatggatttgcctattctgggcgtttcataggtgtgaaatcatatacatagaattcatgtaaatgggattgtacgctgtgtggtctttcgtgtctggtttctttccccgagcacagtgtttctgacggtcatccttgctgtagcatgagccagtgcttcactccttttcacggccgtctaatattccatctctatggatggaccacattttgttgtcccttcatccacagatgggcatttggttgtttctaccttttggcttttgtgaagaatgccgcagtgaacattggtggatgtgtttttgtgtagacgtatgttttcatgtctctggggtcagtacccaggagtggattattaatttaaatctttttccatcctgggttttcaggaggcaacatcatcctggcctgccgagacatggagaagtgtgaggcggcagcaaaggacatccgcggggagaccctcaatcaccatgtcaamrcccggcacctggacttggcttccctcaagtctatccgagagtttgcagcaaagatcattgaaggtaggagaacgctggccatgtgggatgaggactgggataggyggctcccagggccaggctctgagaagtgaatgaagcaagcaaactttagagcagagttttggcaaactatgagttaggggccaagtccagttgctgcctttttttgtacagcctgcaagcaacgactttatttatttatttattactactrttattttgagagggagtctcactctgtcggccaggctgagtgcaatggcgmgatctcggctcactgtaacctctgcctcctgggttcaagcgcggacctcagcctcctgagtagctgggattaagatgcctgctaccataccctgctaatttttgtatttttagtagagacggggtttcaccacgttggccaggctggtctggaactcctgacctcaggtgattcwcctgcctcagcctcccaragtgctgggattacaggcgtgggccactgcgcccggctgactttgttttgtttgtttgttttgagacagatggggtctcgctctgttgcccaggctggagtgcagtggtgtgatcttgcctcactgcaacctccgtctcccgatttcaaatgattctcctgcttcagcctcctgagtagctgggattacaggcacccgccaccgtgcctggctaattttttgtgttttaggtagagacagggtttcaccatgttggtcaggctggtctcgaactcctgacctcargtgatctgcttcccttggcctcccaaagtgctgggattacaggtgtgagccaccgtgccctacctgaataattagtttgtttgagacaggatccatctctgtcacccaggctagagtgcagtggtgcagtcatggctcactgcagtctcaacctgctgggctcaagggatcctcccacttcagcctcccaagtagctgggagtacaggcatacgccaccacacacagctaattattgttttattgttttgttttgtttttagagctggggtttcaccatgttgctcaggctggtctccaactcctgggctcaagtgatccacccaggtcagcttcccacagtgctgggattacaggcgtgagccaccgcacctgaccttattaagcatttattgatcaagtgccttccccaccatggttaaagaaatatgtgtttgttatgggacatttataaaatactgcaatgtaaagaagacagaactggctgggcacagtggctcacgcctgttaatcccagcactttgggaggctgaggcaggtggatcccttgaggtcaggagttcgagaccagcctggccaacatggtgaaaccctgtctctactaaaaatacaaaaattagccaggcgtggtggtgcacacctgtaatctcagctactcagggtgctgaggcaggagaattgcttgaacccaggaggcggaggttgcagtgagctgagattgtgccagtgcactccagcctgggtgacagagtgagactctgtctcaataaaaaagaagacagaactaaacaactttgatctgcaccagccccaggagaatcacttttatggatctttctagtcttgtttmtaataggtttgtgtgtgtatttatatatttttatgtaaaactgggaccatcctctagcttttctattcttgttcatctttaaatagactcaagaatacactaaaattatttattgtttagttgacatgtatacttgtatatattatgtacagcatgatgtacattgtatacattgtagaatggctaaatcaagctaattaacatatgcattacctcaaatacttacctgtttttgtggtgaccacatttaaaatctcttctcttaggattgcttgagctcaggagttagagaccagcctaggaagcatagtgagaccttgtgtgtaccaaagattaaaaaaaaaaaaaaaattagccgggcatcctggcatgtgcctacagtcccagctactcaggaggctgaggcaagaggatcacttgagcccgagagttcaaggctgcagtgagccgtatttgtgccactgcactctaacctggatgacagagcaagaccttttttttgagatggagtcttgctctgtcacccaggctggagtgcaatgatgcgatcttggctcactgcagcctccgcctcctgggttcaagcgattctcctgcctcagcctcccaagactataggcgggtgccaccatgcccggctaatttttgtatttttagtagagacggggtttcactatgttggccaggctggtctcgaattcctgaccttgtgatccgcctgcctcagcctcccaaagtgctgggattacaggcatgagccaccatgcccagctgctttgtttcttttctagtctggcactgaaagggccaaagctttcttsttcagagtcaatgtgccccgctcagtaaacgggtactcaggaaatgaacaaggaatgggggagttgtgggacctcatttatttagcagacgtgatctcagacctgaccaggtgctggaggtgtgagatgaaccagagctgtccttgtgccactcacagccctagggaggcaggtgcaggtgcacattcgttggttcattcattcattcatactgagcccctgctgtgcccttggggatcaagaaagagccggcactgttgtcgggtaggtgagaggcactayggtgagatcacaaagaacagtgagagggcaatgcctcagagwctcagaggtggatgaacatttattaagcacctgctgtgtaccaggtacagcactgtcaccttcatgcacactgtcccaggcaatcccacccagggcgcctctgatcctgtctctggcttgtggacacaggtgtccrgagcactgaggtccctgagacagtgaggaccccggctggacacacctgggcaggtgatgcctcctctcttagccacacgttcctcttccgggaaatggaataattccttctattttctgggattctctagagggktttttttttttttctgagacggtatcttgctttgtcgcccaggctggaggacagtggcacatctcggctcactccaagctccgcctcccrggttcatgccattctcctgcctcagcctcccgagtggcgggggactacaggcgcctgccaccacgcccggctaattttttatattttttactagagacggggtttcaccgtgttagccaggatggtctcgatctcctgacctcatgatccagccacctcggcctcccaaagtgctgggattacaggcatgagccaccacgcccagcctctctagaggattaagtaaagctgtgtctgtgacttttttagcaaatcaagtaccagcttcttggtgttttcctaagatcaacagccaggaataaagacagcagtggatttaaaaatagtgaagatsgtccattttatgtggtgtgtattctaccacactggggcaggccaggtgcagcggttcacgcctgtcatcccggcactttgggagacagaagttttgggaagatcagtttgtgagatgacactctgacaaagctggaagctgtggctcttcccagctccmgactagaaagaacacaaagcaaagagccccaggaagcaggtacccacagccttgtttatcagggagtttgagatcagcctgggcaacatagcaagacctcatctctacaaaaaatacaaaacaatcaggcaggcgtgcaggctcacgcctgtaatcccagcactttgggaggctgaggcgggcggatcacaaggtcaggagatcgagaccatcctggccaacacggtgaaaccccgtgtctactaagaaacacaaaaaaattagccgggcgtggtggcgggcacctgtaacccagctacttgggaggctgaggcaggagaatggcgtgaacccgggaggtggagcttgcagtgagccgagatggcgccactgcactccagcctgggtgacagagtgagactccatctcaaaaaaaaaatamaaaacaatgaggcaggcgtgatggtgtgcacttgtagtcccaactacttgggaggtggaggtgggaggattgcttgagcctgggaggttgaggctgcagtgagggattttttttttttttttttaagacggagttttgctcttgttgcccaggctggtgcaatgacgggatcttggctcacggcatcctccacctcctgggttcaagtgattctcctgcctcagcctcccgagtagctgggattacaggcatgcgccaccacgcccggctaattttgtatttttagtagagacggggtttcttcctgttggtcaggctgcaacctccatctcctggtttcaaataattctcctgcctcagcctcctgagtagctgggattacaggcacctgccaccatgcccggctacttttttgttttaggtagagacagggtttcaccatgttggtcaggctggttgacctcaggtgatctgcccgcctcggcctcccaaagtgctgggattacagatgtgagccaccacgcccggcctgcagtgagctttgattgtaccactgcactcggggtgagaccctgtgtccaaaaaaaaaaaagttgaggcagttcccagataaacaaaacaacaggccaggcactgtggcccacgcctgcaatcccagcactttgggaggccgaggtgggcgaattgcctaagctcagaaattcgagaccagcctaagcaacatagccaaaccccatttctacaaaaaattttaaaagtagctgcttgtggtgtcgggcgcctgtggttcagctatgtggaaggctgaggtgggaggatcgtttgagccctggcggcggaggttgctgtgagctgagatcgcgccactgcactccagcctgggccactgagtgagcttccctctcataaaaagaaaaaaaaaaaaacaggctgggcgcggtggctcacacctgtaatccctgcactttgggaggcagaggcgggtggatcacgaggtgaagaattcaagaccagcctgaccaagatggtgaaaccccgtctctactaaaaatgcaaaaattagcagggtgcggtggcgggcacctgtaatcccagtactcgggaggctgaggcagcagaatcgcctgaacccaggcggtagaggttgcagtgggccatgggccaagatcacaccactgcactccagcctgggtggcagagtgagacttcatctcaaaaaaaaaaagaaaaaaaaccaaaacaaaacaccagaagctggcggcactcctgggcgcccagctgtgagtggagtctccctgtcccgcctttgggccttacccgtgctgcgcctgctgcctgcatyccccttccctgggtctccgcacgtgggccctgcctcattttcccggtcccagtttctgcgtcacctcctgagaggggcctcctgtcagcttccacgcagctctgtcacgggtagattctctcacgagtggaagtggctctcagctgcactggaatgtccggtccacacggacgggrcctcggctgtgctgtccaccctgtatttccagtgcccagtaataggtgcttagaaaatacttacygaatgagtaagtatacagttgtaccaggcaggtgatgtyattatcctttttttttttttttttttamaaggagtaaactgagtcacagagaagtgatgtgacttggccaggatcatgcagctggtcggggtggagccaggctttgaacctgtctgtcctgctccagagctggtattcatgacgggtgtgctgcaaccccctccttctcacacagagaaccagatggtgtctgtgtgttacgcgctggacacctaattcacgatccccgccgaaaaccacttcgggagcattatgaattccattgtgtcctccacccccaaggataggttgggatcctgaacccccatccctcagcatgtgacttcatttagaggtgggtgtttacagaggtcctgaagtgaaaatgaggtcattagggtgggccctaatccagtgactggtgtccttatgaaaaggggagatttgcgcacagaaacagacgtgctagctgggcatggtggcgcatgcctgtggccccagctacttgggaggctgagcaagaagactgcttgagcctgggaggttgaggctgcagtgagcagtgattgcrccactgtactccagcccaggtgtcagagggagaccctgtctcaaagaaatataaaaaataggccaagtagactgagtgtggtggctcacgcctgcagtcccagcactttgggaggctgaggtaggtggatcacgaggtcaggagtgtgagactagcctggccaacatggtgaagccccgtctctactaaagatacaaaaaattaacccggtgtggtggtggatgcctgtagtccagctacttgggaggctgaggcaggagaattgtttgaacctgggaggcrgaggttgcagtgagccaagatcgcaccattgcactccagcctgggtgacaagagtgaaactccatctccccccccaaaaaaaaaaaaataggctgggggcagtgaaattgcagcactctgggaggccaaagcaggaggattgcttgagttcaagagtttgagaccagcctgggcaacatagtgagaccatgtctgaaaaatctaaaattaaaaaaggaaaaatgaaaaaaaaaaaagagacagctccaaagggaagagggagagaggagatggtcacctgtgagccaaggagagagaccagagcggatcctccctgagggccctgagagggaaccagccctgcccacaccttgatctgggacttccagcctctgggactgtgattttttttttttttttttgagatggagttttgcttttattgcccaggatggagtgtaatgatgcgatctcggctcactgcaccctctgcctcctggtttcaagcgattttcccgcctcagcctcctgagtagctgggattacaggtgcatgccaccacgcctggctaattttgtatttttagtaaagacgcggtttctccatgttggccaggctggtctcaaactcctgacctcaggtgatctgcccacctcggcctcccaaagtgctgggattacaggcgtgagccactgtgcccggccaggtctgtgaggttttaaaccacctgtctgtggcactttgttacggaacccgagctgagtggtacagggaggaaggccctgtggttcagcgcattttacagctgaggaaactgaggctgcagtctccatctgtgtgtcctttggttgcttgtatgagtgaggtggcaggtttgggaatgaaaccacgcctgcggtgccggggctcccaccggtaacctcccgtttttggcctcggggctccggcaggaagsagtcccaaggcttagatggaggtgyggagggcgtgtgagtgtcctggagctgctgtaacaatgtactgcaaacccagtggcttacaccctcagacgtgcattccctcacggttccggaagccggcagtctgaatcgcggtgtccctgtggctgtgacytgtgagacgggccataatcctcccagcctcttccacttccagcgggggcggcccaccctcaccttggagctgtgcctctccggtctttgcctctgtccacacatggccttctccccatgtgtctctgtctctgttttcccttcctataaggacaccagtcattggattagggctcaccctaatgaccgcatcctgacatggccacttcggcacagaccctgtttccggcacaggccacattcacaggttgtgggagcacaggagtgtttctgctggtgcatcaggctggggtctgtcctcacsgggatgtytcctcctccacccctctcttccagaggaggagcgagtggacattctaatcaacaacgcgggtgtgatgcggtgcccccactggaccaccgaggacggcttcgagatgcagtttggcgttaaccacctgggtgaggcctgggcaggggctgcaccatgggttcaagcgatcctcccccgtcgtcctcccaaagtgctgggattttaggtgtgagtcaaaagtgaccttttcatcatccttaatccaggtcactttctcttgacaaacttgctgctggacaagctgaaagcctcagccccttcgcggatcatcaacctctcgtccctggcccatgttgctgggcacatagactttgacgacttgaactggcagacgaggaagtataacaccaaagccgcctactgccagagcaagctygccatcgtcctcttcaccaaggagytgagccggcggctgcaaggtacgggggygctaggctcggcctccctcttgctttactctgagcctagagcggcctttccatgatcctaggctgatgggaggccaaacggtggatccagaacagagtcagcaaaagtagagcatgtggaccacgctgcccgcttctggtgyctgaagcagacatcactaatcgatcgttcttctgaggattgtctgttcatcccaggtggtctagtctgcctggatcagatgtccttccctgctgctgttgggcaggcagctcagccttttggctccagccagtgagtctcaaccaggggcagttttgacccgcagttgtcaatgcctggaaacacagtgatcacagctggcttggggagagattgctctgggcatctggagggtaaaggcccagatgctctcaatgtcctacagcgcacgggatggcccctcactcctcccaacccacagcatccacagtgctgagattgagaaatctgtgctaggcctttgcttctgaaagacggtctgtggaccagcggtgccagccccactgggagctggtcagagttacagtatcttaggtcccaccgccacgcaccgatgcaggctcccggggtaagctcagcgttctgggtttatgaagccctccaggaaagctcggctcccagcagccatgtggcagagccgctccgcaagataagaccacttcactaagattccagagcaagagggacgatggggtttgagtgcaggaagcagcctggtgcccggaagccccacagctgggtgtrggctgccacagcctcccaggtgaggctggacccctccctcagtcttctctttctttcttccccaggctctggtgtgactgtcaacgccctgcaccccggcgtggccaggacagagctgggcagacacacgggcatccatggctccaccttctccagcaccacactcggtgagtcccctcccagcctggggtctccacgtggagccctccacccctgctttctcagcccagggcccaggaccctccctcagagaccgtccctgaggcctcatgcctgctcctcgcctacgtcttctgaggcacagagcacaggtccctttcctcygttgacctggcctgccagcctctaacagcyccgggaagcaggcagagccctgctggcggatgagaaaaccgtgtctcagaggaagaggccgtggagctgacgcctggagtcaggctgtactcagggtaactccagcttcaccccaaaccagctgcacctcctggggaagagctgttacccctctgagcctgtttcttcatctgcagagtgcaggccttaataggactcacctcacagtcactgggggggttatacgagaccttccttgaaagggccagcacaggaccccgcccagagaataggtggaacaaacagttggagctttacttacttatttttgagatgaagtcttgctctgtcgcccrggctggagtacaatggcatgatctccactcactgcaacttccacctcccaggttcaagcgattctcctgtctccaagtagctgggattacaggtgcacaccaccacacccagctagaggtggggtttcaccatattggtcaggctagtctcaaactcctgacctcaggtgatccaactgcctcccaaagtgctgggattacaggtgtgagccaccacccccaggcagttcatgctttatgactagtgtttataatcctgaaaaacatggagtgggtgattggttggcatcaagaatcttaacttggcgaggctaatagccacgcctgtaatcccagcactttgggaggctgtggtgggcggattacctcaggtcaggagttcgagaccagcctggccaccatggtgaaaccccgtctctactaaaaatacaaaaattagccaggtgtggtggtgtgcacctgtagtcccagctactcaggaggctgaggcaggagaatcgcttgaacccgggaggcagaggttgcagtgagctgagatcacaccactgcactccagcctgggtgacagagcaagacaccaggtctcaataaataaataaataaatgtctttttttttttgagacggagttttgctcgtcacccaggctggagtgcagtggcacaatcttggctcactccaacctctgcctcctcggttcaagtgattctcctgtctcagcctcccaaagtagctgagattgcaggcgcccaccaccacacccagctaagtttttatttttagttgagacagggtttcacacgttggccaggctggtcttgaactcctgacctcaggtgatccacctgcctcagcctcccaaagtgctgggattacaggcgtgagtcaccacgcccagccctttttttttttttttttgagacgaagtcttgctattgtcacccaggctggagtgcaatggtgtgatcttagctcactgcaacctccgcctcccaggttcaagggattctcctgccccagcctcccgagcagctgggattacaggcacccgccaccacacccagttaatttttgtatttttagtagaaatggggtttcaccatgttggccaggctggtctggaactcccgaccccaggtaatccgcccgcctcggcctcccaaagtgctgggattacaggcctgagccacctcgcctggccaaaaaaaaatccttaacctgaggctggtgccaggtgcatttaataagatgttattaaaggagaaatggggtagggtgaggactggggctgaccaagaggaagagagcttccattttcctggacaaagccaggaaggctccttgggggaggcagcttttggtctgatccctggtctggtgggatttgcctgggcagtgccagggaagggaactgcagatggaggcagccaaggggaaagggctagaggagggctctgtgggactccagggacccggagctccctgaccggggagcggggcttccttccttctctctgagcgagtgtggactaaatgccctgtgggctgattgcagggcccatcttctggctgctggtcaagagccccgagctggccgcccagcccagcacatacctggccgtggcggaggaactggcggatgtttccggaaagtacttcgatggactcaaacagaaggccccggcccccgaggctgaggatgaggaggtggcccggaggctttgggctgaaagtgcccgcctggtgggcttagaggctccctctgtgagggagcagccmctccccagataacctctggagcagatttgaaagccaggatggcgcctccagaccgaggacagctgtccgccatgcccgcagcttcctggcactacctgagccgggagacccaggactggcggccgccatgcccgcagtaggttctagggggcggtgctggccgcagtggactggcctgcaggtgagcactgcccygggctctggctggttccgtctgctctgctgccagcaggggagaggggccatctgatgcttcccctgggaatctaaactgggaatggccgaggaggaaggggctcygtgcacttgcaggccacgtcaggagagccagcggtgcctgtcggggagggttccaaggtgctccgtgaagagcatgggcaagttgtctgacacttggtggattcttgggtccctgtgggaccttgtgcatgcatggtcctctctgagccttggtttcttcagcagygagatgctcagaataactgctgtctcccatgatggtgtggtacagcgagctgttgtctggctatggcatggctgtgccgggggtgtttgctgagggcttcctgtgccagagcccagccagagagcaggtgcaggtgtcatccygagttcaggctctgcacggcatggagtgggaaccccaccagctgctgctacaggacctgggattgcctgggactcccaccttcctatcaattctcatggtagtccaaactgcagactctcaaacttgctcatttaaaagaaaaaaaaaagaagaaaatgtacccgagtcgtagattttatttttcctctgtgcatgggtgaatgcccatgagctgaacaaaggcaactcatggctttattccttttaggaaacaaggcatcagtttatcaccagggcaacaggccatgcaaaagttcagacttggccgggcgcggtggatcacgaggtcaggagatcgagaccatcctggctaacacaatgaaaccctgtttctactaaaaaaatacaaaaaattagctgggcatggtggtgggcgcctgtagtcccagctactcgggaggctgaggcaggagaatggtgtgaascygggaggcggagcttgcagtgagccgagatcatgccactgccctccagcctgggtgacagagcaagattccgtctcaaaaaaaaaaaaaaagttccgactttttagagatgaaagcccctttcacctgtttcacaggaaataaccgtttaagtccgggcatcttacaagactgctgtgttagaaactggatagagatcagggtgagatgaaggggctcttagcttaggtgcagaaccgaaggaggcaccgaaaagctcagtaatcgagatagaaaacatgttttcatatttgagatactggggaggccagggatgctactcaatatcccacagtacacagaacagccacctagtctcgctctgttgcccaggctggagtgcaatggcatgatctcagctcactgcaacctgtgtctcccatgttcaagcgattctcatgcctcagcctcccgagtagctgggattacaggcgcccaccaccacacctggctaattaaagacagggtatcaccatgttggccaggcttatcttgaactcctgacctcaggtgatccacccgtcttggcctcccaaagtgctgggattataggtgtgagccagtgcacccagccctttttgcttttttagagacgaggtcttactgtgttgccaaggctggagtgcagtgccrtcacagctcactacaacctcgacctgtgattctcctgcctcagcctcctgagtatctgggactacaggtgcatgccaccacacttggctaattatttgtagaggtggcaacataacatttgctatgttgcccaggctggtctcaaactcctgggctcaagkgacccttccgccatggcctcccaaattgttgggattacaggcatgagccaccgtacctggccttagttttctttccgatgccacaccaaatggctagagggtgtgtttgggatgacctgagtctggtaggcaacttccagtggaccccacrgtgcgaccacctccctttgagtgtgggggagatgtagcgactggcttctagcagtaggatagggcagaagtgacagtaggttagtcttgtggttaggttacaaaactgacctctgtgatggtagcgtccctcgtcagccctcttgtcttgccctctcgctggctggyggtgatggagccggctgccatggtgagcggccctgtggagaagccagggaggaatggagacaatctggagaaacagaatcacaccaacaaccaygtgcgtgagcttgctgtgtgctcttgcttgggagcaagttacaggttcagcccaagaggagyggaccactccagggtgtaaataccaggagggggaattggaagactaccctaagcatgccgaccggagactgtgtgtgtgtagtaggtatttcttactgggagatcacggaaaagcaagtttgagaaacactcccatcagatgggtgggccgaggataacctcaaagcctttggttctccgwataggtgcgtaggactcacccaggcactctttccttttttaaattgtggtaaaaactacataacagtggccaggcgtgatggtgcacgcctgtaatcccagctattagggaggctgaggcagaagaactgcttgaaccaagggggcaccgctcctggctgtaacatgttttcaatatcccccctcttcggtggcacaggggctggccccatatacatgtgcgatggcaactgacagggtccctgatamaccggagtgctccagaaacaccccattgcgtgggacggaggatgttaggtggccctcctagcrtttgagtttgataaatgagcaaaggaagtggtttttactagaaagccagctttcctttttttttttttttttttccagccagcaaaccccaaacaggaacctatggttggtgatggatgtgcgttcagaaagcagggagggagggggagtcagaggtgagggggtcatcagccatagctgtccgctgcatcaccccctcgctatctccaggaagcgttctgggcttttcctgttgtgcagtgtggaagtgctctatcttcattcatatcaaggaaagtcaaaggacaaactaaagccggcagcgtctttctggcttcctagtcaggctgttcggtagcggagtgtcaccctgatttccagccccgcagcacacacastgagabcctgcctggcgtgattcagaggcaacgtatttcccaaggtggctgtgaaggaaccagggggataaacacagcccgtgaaccgcacgccagaggacaggtccggctgcctgccgcggagtcgtcacggcgtgtcgcgtctgagcgcttctccaaagcacccaagtggcacccggggtgacakttacatcatcttgagtacagttctctcaaggaaaaagcaagcccagcatcttctgccatggcaaccctggcttggagcctccataagagagaaggccctaagaatwccattttcttgctctaagttgctcttacgggaaagaagtgataatattcttcctaaacgccatcattcgtgcatccttcccacctayatgtgtcaccggatcattctccgcctgggcggggccgtcctgtgcactgcagaatgctgagcagtgtccttggcttcgaccgaccacatgccaggagcaccccaatttctgccatcgggtgattgacttcactgttgcatttgattttttatgtatcttttaaaaggacccaatagggccaggcacagtggctcacacttgtaatcccagcactttgggaggctgaggtcggtggattgcttgagcccaggaggagttcaagaccagcctgggcaacatagtgaaaccccaactctacaaaaaacaaatgttttatttttatttattttagatggagtttcactcttgttgcccaggctggagtgcagtggcgcaatctcggctcattgcaacttctgcctcccgggttcaagcgattctcctgcctcagcctcctgagtatctgggattacaggcatgcgccaccacacccagctaattttgtatttttagtagagatggcgtttctccatgttggtcaggctggtctcaaactcccgacctcaggtgatctgcctgcctcggcctcccagagtgttgggattacaggcgtgagccaccacgcctagccgggtttatagttttataacccttatgacaaatctcatagtattctgcagggataagcatgaaaccactygttcaataagtgcaaacaaaaacgccaacaattcttaagacatttctaatcttattttaccaataattttaaagccagcttatgtattaaagatttataactacttttattaacacgtttaaaattctatgcagcttaaagcatttataatggataaaactgccaatactgagtgcctgacataatatttgaaaggtggcaggcattcaaccatggtcactgaatgagagatgtagggaagatgatggcagggaggtttttagatatcaacaccctgatagktctcattttaaccacctgtaagtgcacatacaagtcaacggcactggccgggmgcggtggstcaygcctgtattcccagcactttgggaggccaaatcacaaggtcaggagatcgagaccatcctggctaacacggtgaaaccccgtctctactaaaaatacaaaaaatcaactaggcrtggtggcrsgcacctgtagtyccagctactcaggaggctraggcaggagaatcgcttgaaccygggaggcggaggttgcggtgagccaagatcgcgccactgcactccagcctcgkcgacagagtgagactcygtctcaaaaaaccaaaaaacaaaaaacagtcaatggcattaaatataaatacatttacagtgttgtgtaaccatcaccactatggatcccccagactttgtcatcatcttcaacctaagcgctccctattaaatagtaactccccacttttcccaggccttggcaaccaccattctaatccctgtctctatgaatttgactcctctcgatacctcagataagcggcacaatgcagtatttatctgtcaagtccggaatatttcctttagcataatgtcttcaaggtccatcacgttgtagcatgtatctgaatttattcttttataatattttttattttttggagacagaatctcgctctgtcacccaggctggagtgcartggcgygatctcggctcaccgcaacttccgcgtcccgggttcaagccattctcctgtctcagcctccggagtagctgggactacaggtgcstgccgccatgcccggctattttttttttgtattttttgggggttttactgtgttgcccaggctggtcttgaactsctgagctcaggcaatctgcctgcctcagcctcctaaagtactaggattacaggcatgggccaccacgcccggccttatttttatttttgagacagtctcactctgccgcccaggctggagtgcagtggtgcgatctcggcttaccgcaatctctgcctcccaggttcaagcgattctcatgcctccgtctcccaagtagctgggattacaggcacctgccaccatgcccggctaatttaacgcccagctaatttttgtatttttagtagagatggggtttcaccatgttaaccaggctggtctcggactcctgacctcaggtgatccgcccgcctcggcctcccaaagtgctgggattacaggcgtgagccactgtgcctggctgatttttattcttttagttaaggctggttgatattaccttgtgtgtatataccacatgttgtttatccattgttgttgatggacatgtgggtggtttcaccttttggctattgtgaataaagctgctatgaacactgtgtacaaatatgttagagaccctgttttcagttcttttaggtgtgtaccccgaagtggaattgctggattttatggcaatcccacgtttaacttctggaggagctgctggaactgttttccacagcaggggcgccatgttacgtccctgccagcaatgcacgcgcagtycaatttctctgcatactcaccaatatctgctrttttccattaaaaaaaattatagccggtcgggtgcagtggctcatgcctgtaatcccagcactttgggagaccgaggcaggtggatcaactgaggtcaggagttcaagaccagcctggccaacacagtgaaaccccatctctactaaaaatacaaaaattagcctggtgtggtacatacctataatcccagccacttgggaggctgaggcaggagaatcgcttgaacctgggaggtggaggttgtagtgggccgagatggcgccactgcactccaacctgggcaaaaagaacgagactttgtctcaaaagaaaaaaaaaaaatacagccattccagaaggtgtgaagtcatatctcactgtggttttgatgcgtattttcctagtgacatcagggagtttatgggagcacgggaacacagaccaggccccagcaggcggacaaacggtgcaacgccaggctggccagaggagataagcgcggctccttggagcttgtgtgcaagtcactgtactgaggagcyggctacggctcgatgagtctcaattaggaaaggcyggggctggtggaggaagggaggagagcattcttcatcctcatcacatcctgagcctgtgccccaggctcccaccacttccctccctggycacagagctcaggacagggctgaggaaccatgtctccatccccgaccgccctcttctgtcttggtgagtcctgagggtcagatctgggaaatgctgaaggacaggcatggactgccagacaaaggatttttaagaawtttgcattggtgatgaatttcaggacaaaaaggaacctgtaagagccccttcatttgttgggtggggaaacggggggccagcgagctggcattttgcatgagttattccagtgtattcatggctgggtcaggaaatgaacagagtatcctagcattggtcacaactttgttctactacactgcagttgccccttttttaaaaaatgtgggccaggcacagtggctcacgcctgtaatctcaaccttgggaggccgaggtgggtggatcacctgaggtcaggagttcaagaccagcctggtcaacatggtgaaaccccatctctacaaaaattagccgggcgtgatggcgggtgcttstaatcccagctacgtgggaggctgaggtgggagaattgcttgaaactgggaggcagaagttgcagtgagctgaggtcaggcattgcactccagcctgggcaacagagagagcctccatctcaaaaaaaaaaaaaaaaaaaaaaaaaaaggctgagtgccatggcttacacactttgggaggccgaggcgggtgggccatctgaggtcgggagtttgagaccagcctgaccaacatggagaaaccccatctctactaaaaatacaaaattagccgggtgtggtggcacatgcctgtaatcccagctactctggaggctaaggcaggagaatcgcttgaacctgggaggtggaggttgcggtgagccaagatcacaccattgcactctggcctgggcaacaagagcgaaactccgtctcaaaaaaaaaaaaaaaattgtggaattgatatctggactaggtatggatttaatttgtcagtatcccctacagtagtggagtaaatagtctcctgatggatgggtggcaggtcgaatgcatttctgctgcctgatcttcacttgtgctgggcatgtcgaatgmattatttcctgatttcttcagaatttgaccactaaagggacagcatctccaaaaggctaagcaggaagaagatggttgcattactggagatgagagggttaactgtgaatataaacaacctctcattcattatccatccatggatgtattctttttttctttttgtttgttttttgagatggagtctcgctcagtcggtcgctcaggctggaatgcaatggcatgatctcagctcactgcaaactctgcctcccgggtccaagkgattctcctgcctcagcctcccgagtagttgggattacaggcatctgccaccaggtctggctaattattgtatttttagtaggggcggggtttcaccatgttggccaggctggtctcaagctccttacttcaggttccacccgcctcggcctcccaaagtgctgggattacaggcgtgagccaccgcacccagcctgttttaacttttatttatttaattttatttgagatagggcctcacttctgtcacccaggctggagggcagtggcatgatcatggctcactgcagcctcaacctcccaggctcaaccagtgcctccccatcagcctcctgagtatctggaactacagttgtacaccatcatgcctggcttgtttttgtaatttttttagttacgggggtccgctatgttgcccaggctggtcttgaactcctgggctcaagcgatccacccacctcggcctcccaaagtgttggggttacaggtgtggcctgtacaggttactgcatctggcttgttgcttcagtagcttttgggatacaagtggttcttggttacatggatgaattatattctggtgaattctgagattttagtgcacctgtcacctgactagtgtaccttgtacctaatgtgtagtttttcatccctgccccacttctgcccttcccttctgagtctctgaagtccattacatcactctgcatgcctttgcatacccacagcttagctctcacttataagtgagaatatacagatttttgttttccactcctgtattactttacttagaataatgccttccagctccatccaagttgctgcaaaagactttttttttttttttttaaagacggaatytcgctctctcaccaaggctggagtgcagtggtgtgatctcggcttactgcaaactccacctcccgggtttaagtgattctcctgcctcagcctcccgagtagctgggactacaggcacccgccaccatgcccggctaatttttgtatttttagtagagatggggtttcaccatgttgggcaggatggtcttgatctcttgacctcgtgatccacccacctcggcctcccagagtgctggcattacagatgtgagccactgtgcctggccaaaagacattatttcactccttttaatggctgagtagtattccacgctcatttatttttatttatttttattttttgacatggagtctcactctgttgcccagactggagcgcagtggcatgacgttggctcactgcaacctccacctcccaggttcaagcgattctcctgcctcagcctcccaagtagctgggattacaggctcctgccactacgccccgctaatttttgtatttttagtagagacagggtttcaccatgttggtcaggctgctctcgaactcctgacttcaggtgatccgcccaccttggcctcccaaaatgggattacaggtgtgagccagcgcgcccggccggtgagaacatttaaaatctactatcggtgatatgcaagtgtacaatatgttgttattaactacagtcaccatgatgtgcagtagatctccaagacatactcctcttgtccaactgaaactgtcctcctctgaccaacatctccccaaaccttaccccaccgccccggtaaccaccactgtgctctctactcctgtaagttcccaagtccacactctttaccactaattggtgctgctagggtttgaatctactcctgccagctgtaggactgtggataagatactgtctcactagcctgatgtataagaggggactgataatggtgggtaacccgtacgattatggcgacttggagtccatgcacagaaggcgctcagcacggcgcctggaagactcccagccatggtacagcgtcgcatggaaacctacaaagaggctgaggtgggctgtgatgcggcaggaggagggggacagagaagcggccggagcttgsgttggggtgcagagggagcctggggtggacaaagggtggtggctatgggggcgctggtgacaagttgtcactctctgagctcagagtcaagacatgakctgggttcacccacttcttgctatgtgagctacacaaggttgcttggcctctgcccagtttccttatgtttacagtgggaatgacaactatcccgcctttgtgtgtgtgtgtgtgtgtgtgtgtgtgtgtgtaagaatgagggttaccagataaaacactggatgcctggttaaattggaatttcagataattagtactttttttttcctcctcctcttcgttttctgagacagggtcttgctctgttgtcagtctggagtgcaatggggcaatatcatttttttttttcctcgagatggagtcttgctctgttgcccaggctggagtgtagtggcgtgatcttggctcactgcaacctccgcctcccgggttcaagtgattctcctgactcagcctccccagtagctaggattacaggcacgtgccaccatgcccagctaatttctggtatttttagtagagatggtgtttcaccatgttgaccaggctggtcttgaactcctgaccttgtgatccgcccaccctggcctcccaaagtgctgggattataggcatgagccaccgtgcccggccagtggtgcaatcttacctcacagcagacttgacctcctgggctcaagcaattccaggaggggatcgcttatgcacatgtatttgtatacatatgtatatatatacacacacacacatgcatacatatatacgtatacatacatatacacatatgtgtatgtacacacgtatatgtacatacacatgtatgtatagatgtaggtttacatatatgtactatatgtgtatatacatatagtaatcagatcagggtaagtagcacacccatcttctcaaacatgcatcctttctgtgttgggaactttccccatcctccttcaggctatttgaaacgattattatatatattacatcctatcatgtaatcatggaatactgattcaaccaaatgttgtaaataccgggaaacccatggccagcacatgctgagacgtcctgacttacacgctgaggctccatcctgctccatccttggagcccaatgcatcccattagtgtggggttttatcgcatatattacatagacaataaaatacaataatatacaatatgcaatagtatttacaatacttgtctacacaattgcatactattgtaatgtacttggatattatttaatattgggagactgaagggaggaaacgaaggaacagcaatgtctcaggtcccattcctcacatccactgaggaagtcaatgggcaatgtctaacacgaacgagcccaccgtgtctaacacaacacaaacgagtccacygtgtctaacacaacacgaacgagccgtgtctaacacaacacgaacaagcccaccgcgtctaacacgaacgagcccaccgcgtctaacacgaacgagcccaccgtgtctaacacaacacaaacgagtccaccgtgtctaacacaacacgaacgagtccaccgtgtctaacacaacacgaacgagtccaccgtgtctaacacaacacgaaggagyccaccgcgtctaacacgaacgaacccaccgtgtctaacacgaacgaacccaccgtgtctaacacgaacgagtccaccgtgtctaacacgaacgagtccaccgtgtctaacacaacacgaacgagtccaccgcgtctaacacgaacgagtccaccgtgtctaacacaacacgaacgagtccaccgcgtctaacacgaacgagcccaccgcgtctaacacgaacgagcccaccgcgtctaacacgaacgagcccaccgcgtctaacacgaacgagcccaccgcgtctaacaccaacgagcccaccgcgtctaacacgaacgaaccctccgcgtctaacacgaacgagcccaccgcgtctaacacgaacgagcccaccgcgtctaacacgaacgagccctccgtgtctaacacgaacgagccctccgtgtctaacacgaacgaacccaccgtgtctaacacgaacgaacccaccgtgtctaacacgaacgagtccaccgtgtctaacacgaacgagccctccgtgtctaacacgaacgaacccaccgcgtctaacacgaacgagtccaccgtgtctaacacgaacgagcccactgtgtctaacacgaacgagccctccgtgtctaacacgaacgaacccaccgcgtctaacacgaacgagtccaccgtgtctaacacgaacgagcccaccgtgtctaacacgaacaagtccacagatagcagtacgccaccatgccttgccctcctctcccaccacccccagccatggatctgctttcttctccatctcctatagatttacctattctggatatttcatgtaaatgacctcataaactatgtggctttttctgaccggtttctctcacttaaattacattcctgtgtgtcttttgaagaaatwattaggacagagtaaagcatatgcatgcaaaygtcttatcaccgcgcccagcaggcaggaatgtccataaaagcgagtcctggcatctggtccctttcttctttcctcagggctgtgtctggggcgtgtgccagcgcagagtggtgagtccttccccagaccccttccctcctgcgggatcyrccagcgcgggrgcagcggggtccaggcggggtctgcggggaggctgacccagccctgctcctcttccaggaccgctccccaagccctccctccaggctctgcccagctccctggtgcccctggagaagccagtgaccctccggtgccagggacctccgggcgtggacctgtaccgcctggagaagctgagttccagcaggtaccaggatcaggcagtcctcttcatcccggccatgaagagaagtctggctggacgctaccgctgctcctaccagaacggaagcctctggtccctgcccagcgaccagctggagctcgttgccacgggtaaaggaagggggatcrragcctgggactgcgtggtcctccgttcaggacacaaatacgggggacattgagggcagggattagggtgaggcaaacgaggcamtggcctagcgggtggtggtgccacgacatttatggatcaatgtgaataatattttgttttttggacacagggtcttgctgcgtcacccagggtggagagcagtggcgcgatcttggctcactgcagcctccacctccagggctcaagcgattctcccgcctcagccctccaagtagctaggattacaggtgtgcaccaccacgcccagctcattttttatgtttttatagagatggggtctcttgacagttttcacaaaaggcattaaaatacaaaagagagagagatagggtctcgctatgttgctcaggctggtctcgaactcctgtgggctcaagctatccttccaccttggcttcccaaagtgttgggatttcaggcgtgagccactgcatctggctgtgaataacattttcatgcaatttttwaaaaaatcaaaataaattgcaaaaacatccacaatgaaaaaaaccagaatttcaaataaaggcagaatcagccagtgcctgtgtcaagtcataccagagtctgtgccaaaaygaaaaacaggcamccctttatctgtgttttaatgcacttaaaaaaattagcgatggggtcttgctacactgcccaggcyggagtgcagtggctgttcataggagcagtcatagctcactgcagcctggagctccttgccttgagcaatcctcctgcctcagcctcatgagtagcagggactacrgtcaygggccaccgtgcttggctcgggattctttttaaaactttgttttggartaatttttagactgacagaaaagttccaaagataatattaatggaaatatttcacccaggatcccctcatgttaacatcttacatttgttacaaccaaaaaataaacgtagcactggtcccagtggtttacacctgtaatcccagcactttgggaggctgaggcgggaggattgcttgagctcaggagttcaagaccagcctgggcaacatagtgagacctcatctttaaacaaaattaaaaattagtggggcatggtggcatacacctatagtcccagctactcaggaggctgaggcaggaggatcgcttgagccagggaggccraggctgcagggagctgtgatcacgccactgcactccagcctgggtgacagagtgagaccctgtatcaaaaaacaaacaaaaaactaaccatagacacaactatrttatatcaagtaaactccaggctatttgaatttcaccagtctttccactaatatcctatttctgttcccagaccccgtccagggccccacagtgcatttagtatttatgtctccttagactcttgattggtgcaaatattctaatttcttttcttatttwtttwttttttttaagagaagaggttgggccgggcgcggcggctcacgcctgtaatcccagtactttgggaggctgaggtgggtggatcacttaaggtcaggagtttgagaccagcctggccaacatggtgaaaccccgtctctactaaaaaaaataataataattagctgggcgcggtggcgcactcctgtaatcccagctactccggaggctgaggcaggagaatcgcttaaacctgggaggcggtgagccgagattgcaccactgcagtccagcctgggcgacagagcaagactccrtcttgggaaaaaamaaaaaagagaagaggtcttactatgttgcccaggctttagtacactcgctgtattcacaggcatgatcatagctcactttagcctcaaatccctgggctcaagtggtcctccctagtagctgggactataggtgcacccagttagtgcacttttaaatggttattttctagaagtaggttttggaaatagcactgatgcgcttgcatccacaaaagcctagaatgtaaaattctaataaatctttcaggggaataaagtattcaaacagaataatgtgagttttaacgacctactcttcaaattttcaataattttttcaaataygttaattgtttgggaataattaaattttacatcccaggagagtgcctcactcacgccaccctaattcctggccagctgcactgtggtctattccgcgttataaatcctgcctccctcccctcttccctgcctcactcccctccacagcatcactggcctcctctctgctactagaatggaccagcctggctgcctcattacttctttcagggtcagactcaaatactctcttctcgctaagtatatcccccaccaccctagtcaaagtggccctcctcactatctggtatgtgaagtatacctttttttatcttggtggtggttgtctatttttaattcctggtcgggcacggtggctcacgcctgtaatgccagcactttgggaggccgaggtggacggatcacctgaggtcaggagttcgagatcagcctggctaacatggtgaaaccctgtctctactaaacatacaaaattaactgggcatggtggtgcatgcctgtagtcccagctactcgggaggctgaggcaggagaatcgcttgaacccaggaggtggaggttgcagtgagctgggatcatgccactgcactccagcctgggcaacagagtgagattctgtttcccaaaaaaaaaaaaaaaaaaaaaaaaaaaaaaaatatatatatatatatatatatatatatatatatatatatatatatatatatatatatatgccattgcactccagcctgggtgacagagcgagactccgtctcaaaacaaaacaaaacaaaacaaaacaaatgaaacaacaaaaaaagaatacagacagacacataatagttgcttaagtgaaaattaagagaaaatattgctgagtgaatgttacagttatcaggcagcttatatatttccttccttccttcctccctccctcccttccttcctctttctttctttttcttcttgttgagtgaatgccataattattaggcagcttatatttttatcttccttacttcctttcttttgctttctctctctgtctttttttgagacaaggtctcactctgtcacccaggctagtgtacagtgatcatagctcactgcagcctcgccttcctgggctcaagcgatcctcccaccttggcctcccaaagtgctgggatgaccggtgtgagccgccgcacccagcctcaacctttgtttttctgactcctgtgtgcaggcatgcatcaccacaccggtctatgacaacaacctcacatcagagtagtgtaggttcgtgtttaggagcggagaccctggaatcaaactctgtgagtgcagatttcaactctgccacttatgatcttggacaagttttttatttatttttaaattaaaatatgtccagctttgttgaggtataattgaaaaacaaaaatggaatatatccaaggtgtacaagttgatgttttgatatacgaatccactgtgagacagttactactagcaagctaattaacatacatcacctgacacagttaacttttttgtgtgtgagaayacttataatctaccctcttagcaaatttcagctrtacactgcagtattgttacctagagttggacaaattatttaatgccatgtgccttagtttcatttataaaatagggacattaagagtgaggactccataggtctctgaggattcactgaactgatayacatcataagtttggaaggcacccggaagctagcactgtcagccacatttacaacgtaacaattgtatgtggcaatacaagcttacagcacagtataagcttaagctatttacttactccagcgcttgctaggcaacaggcactctgcaaattactgtrtactgtctcattcagtcatccccattttaacagaacaaggcagtgaggctcagatacagagggagatttgtctccagggccaccaggcccctgaaggcagaactaggatttgcacccaagcactaggacgtgagcacagcctccttcctcaaccactgggtgactcgacctctctgtgagcttgggtgggggagtgcgctctctgggagggatacagccaaaaagctccccagctcttaggcaggtgtggggacctccccagtctcagctgagatgctggctcctgccttcaacatcagactttctttttctcccaggagtttttgccaaaccctcgctctcagcccagcccggcccggcggtgtcgtcaggaggggacgtaaccctacagtgtcagactcggtatggctttgaccaatttgctctgtacaaggaaggggaccctgcgccctacaagaatcccgagagatggtacmgggctagtttncccatcatcacrgtgaccgccgcccacagcggaacctaccgatgctacagcttctccagcagggacccatacctgtggtcrgcccccagcgaccccctggagcttgtggtcacaggtaggggtagtgcagaccaaacctttcttcctcagcctttataggtcctgatggccattccaagggaggggccataagtgggaaggaagtgggagggcaggaagccctgggctgcaggggcggggccgtaggtgggaaggaagtgggagggcaggaagccctgggctgcaggggcggggccgtaggtgggaaggaagtgggagggcaggaagccctgggctgcaggggcggggccgtaggtgggaaggaagtgggagggcaggaagccctgggctgcaggggcggggccgtaggtgggaaggaagtgggagggcaggaagccctgggctgcaggggcggggccgtaggtgggaaggaagtgggagggcaggaagccctgggctgcaggggcggggccgtaggtgggaaggaagtgggagggcaggaagccctgggctgcaggggcggggccgtaggtgggaargaagtgggagggcaggaagccctgggctgyaggggcgsmgccrtaggtgggaaggaagtgggagggcaggaagccctgggctgcaggggcggggccgtaggtgggaaggaagtgggagggcaggaagccctgggctgcaggggcggggccagaggtgggaaggaagtgggagggcaggaagccctgggctacaggcagctgggagaatggaggtttcttttttttttttttgacgaagtctcactctgtcacccaggctggagtgcagtggcgcgatctcagctcactgcaacttccgccttccgggttcaagcgattctgctgcctcagcctctcgagtagctggaattacaggtgcctgccacgatgcctggccaatttttgtatttttagtagagacggggtttcactatgttggtcaggctggtcttgaactgacctcatgatctgcccgcctcggcctcccaaagtgctgggattacaggcgtgagccaccgcgtcggacttgactaccattcttaaagggggtttctttcaaaaragagcagcatacctcataatgtggttatatacatgcaatggaatattatgcagccttaaaaaagaaggaaattctgacacatactacaacatggatataccttgaggacattatgctaagtcagtcagtcacaaaaggacaactactgtatgattctastcaaaggaggtatctaatgtcaacactgtagaaacacaaagtacaatggtggttgttaagggccagaaagaggagagagaaggaattagtgtttaatgggcacagaatttcagttttgcaagaaaaataagttctagaggtcaacatattgtaccacaatgtgaacatacccaacgccactgatcagtacatttaacaatgtcatattaaatcaaacaaaatacatcatttagtttttggtagaaaaatctgttttgcccccagggtcacagtgaggggtaggacacaggaatccagaagaaatagaactgaggttgaaaaaggyggacgggagctgcatgcatttccttgttaatagcccagaatgtgccaggtgtgctttacaaatgctgctgcttttttttttttttttttkkrgrgagtctcactttgtcacccaggctggagtgcagtggagtgatctcagttcactgcaacctccacctcctgggtttaagcgattctcctgcctcagcctcctgagtagatgggattacaggcacctgccatcatgcccagctaatttttgtatttttcgtagagacagggtttcaccatgttggccaggctggtcttgaactcttgacctcaggtgatctgcctgcctcggcctctcaaagtgctgggattacaggtgtgagccaccacgccyggctaagcctktttttttcagatggagtcttactgcgtcacccaggctggagtgcagtggtgcgatctcagatcactgcaacctctgcctcctaggttcaagtgattctcctgcctcagcctcccgagcagctgggattacaggtgcacaccaccacgcctggctaatttttgtatttttagtggagacggggtttcaccatactggycaggctgggcttgaactcctgacctcaagtgatctgccctcctcagcctcccaaagtgctgggattacaggcatgaggcactgcacccagctcaaatgcttattaacatccacaacagtccagtgatgtaagctactttaggctcatttttccggtgaggaaactcagtcacggagatgtttcgttatttgttcaggacccacagcgacagagcacagatttatctcattttctgatttcccaggaacctctgtgacccccagccggttaccaacagaaccaccttccycggtagcaggtaggttctgcagggtccattctggtgcacagcgtatgaggtacacggaccccttctctctctcctctctgcctagacttctcgatttaattcagttggttctttcacagatttgctttgttttaaaaatcctttatttctgcctgtaaacagggtgggtgtcctaagtagttagatgttaagatgctgcccccaatcctactctaggtggatggtttatcacatataacatgcagaagaataatcggagtggcttgctatactgtggagtccagctggttgaatatgggtgacaaaaacaaacaaactaaccaaccaaccaaccaaccaaccaaccaacaaacctgtagagtccgggactctgtttctgagtcactgawtgcattgatcagcggttctcaaacttccatgagcataagaatcacctggaggcttaaagaatagatttctgagcccccagggcttctgcttcagtaggtctggggtgaatccagtcattttcattcctagtaagttcccaggtgatgctgatgctatggctccagaatgctgctttgagaaccactgcggtaagttttgtgtgaggcgtgttatcccctccactttcacaaacrtctcagctgaatacggtgtaccagactacggcctgcactttaagaatatcatacgctaggctggaggctgggcgtgtctaacattccctgygtctcagagtgaagcaccaaggcaggagaaacatgctggaaagagccgaggttgataaggatgagatttgcggggttgagggcagagtgagggctattatgcctagtgggcagggacatggaagatggtcacatactgtgtgcgtgcatrtgygtgtgtgcgtgcatgtgcgtgtgtgcgtgcatatgtgtgtgtgcgtgcatatgtgtgtgcatgcgtgcatatgtgtgtgtgtgcatgcgtgcatatgtgtgcgtgtgcttctgactgaatttttgaactttctcttttgaaatggttctagagtcacaggaagtctacaatgatagaacagaagaatcccatgtgctctttttccagtttcctctaatggttacatcttacgtaattagagtacaacataaaaaccaggaatttgacattggcataaagtaggtgtctagttctatgccaatttgtcacagttgtagattcgcgtcaccatcaccgcagtcactgtacagaactcttccgtctcacaagggcctcccttgggctacccttttatattcacacctacacccttctccttcccttgccatccctaactcctggtatccattaatttgttctccatctctataatcttccatttctagaatctgatgtaaatgggatcatccagtatgcaaccgtttgagatatccttttgtcactcagtgcaatgcccctgaggcccatccaagctgctgtatgtatcaatgatgtgttccttttgattgctgagcartatttcatgctatattaggccgattttgtgctgctataaatayctgagactggatcattgataagaaaagaggtttaattggttcatggttctgaaggccgtataggaagcagaaggctggcttctgcttttggggaggcctcaggaagcttacagtcatggcagaaggcaaagagggggtagctgtctcatgtggtgggagcaggagcaagagagagagagagttgggactgggggacatgccacactttgcaatagccagatcttgtgagaattcacttactattgcaaggaaagcaccaagcaatgagggatccacccctatgatccaaacacctcccaccaggcccccacctccaacattggggatcataatccagtatgagatttggtgggaacacatattcaaactgtatcacatggcatgcaaataccacacgctgtgttgaaatcaaaatcaaaacaaggtgtattaaatagggaatcctttccccattgcttgtttttgtcaggtttgttgaagatcagatggttgtagatgtgtggtcttatttctgagatctctattctgttccattggtctatgtgtctgtttttgtaccagtaccatgctgttttggttactatcaccttgtaatatagtctgaagtctgagcctgaggcctccagctttgttctttttgcttagtattgtcttggctatatgggcccttttttggttccatatgaattttatagttttttctaattgtgtgaggaatgtcaatgatagttcaatgggaatagcaatgaatctataaattactttgggcagtatggccattttcacgatattgattcatcctatccatgagcatggaatgtttttccatttgtttgtgtccgctctgattttcttgagcagtgaattgtagttctccttgaagatgtccttcactttccttgttagctgtattcctaggtattttattctctttgtagcaattgtgaatgggagttccttcatgatttggctctctgcctgtctattgttggtgtataggaatgcttgtgatttttgcacattgattttgtatcctgagactttgctgaagttgcttatcagcttaagaaacttttgggctgagatgatggggttttctagatataggatcatgtcatctgcaaacagagatagtttgatttcctctcttcctatttgagtatcctttatttctttctcttgcctgattatcctggccagaacttccaatactatgttgaatasgagtggtgaaagagggcatccttgtcttgtgctggttttcaagggaaatgcccatttagtatgaaattggctgtgggttaataaatggtgctgggagaattggctagccatatgcagaaaatagaaactggacccgttccttacaccttgtacaaaaattaactcaagatggatgaaagacttggatgcaaaacccgaaaactataaaaaccctagaagaaaatctaggtaataccattcaggacacaggcatgggcaaagatttcatgacaaaaacgtcaaaagcaattgtaacaaaagcaaaaactgacaaatgggatctaactaaactaaagagcttctgctcagcaaaagaaagtatcatcrsagtgaacagacaacctacagaatgggagaaaatgtttgcaatctatcaattcacaaaagtctaatatccagaatctacaaggaagttaaacaaatttacaagaaaaaaaaaaccattaaaaagtgggtaaaggacatgaacagtcacttctcaaaagaagacgtttatgcagccagtaaacatacaaaaaaaagctcaacatcaccaatcattagagaaatgcaaatcaaaaccacatttagacaccatctcacaccagtcaaaatggcgattattaaaaagtcaagaaacgccgggcgcggtggctcacgccggtaatcccagcactttgggaggccgaggcaggcggatcacaaggtcaggagatcgagaccatcctggctaacacggtgaaaccccgtctctattaaaaatacaaaaaattagccgggcgtggtggcgggcgcctgtagtcccagctattcgggaggctgaggcaggagaatggcgtgaacccgggaggcggaggttgcagtgagccaagattgtgccactgcactccagcctgggcgacagagcgagactccatctcaaaaaaaaaaaaaaaaaaaccaacaaaagtcaagaaacaacaagtgctggcgaggctgtggagaaataggaatgcttttacactgttgggaatgtaaattagttcattgtggaagacagtgtggtgattcctcaaagacccagaaccagaaatcctttttcctttttttttttttgagatgtagtattgctcaatagcccatgctggagtgcagtggtgcgatctcggctcactgcaacctccacctcccaggttcaagcaattatcctgtctcagcctcctaagtaactgggactacaggcgcctgccaccatgcctggcttttttttttttttttcttttagtagagatggggttttaccttgttggtcatgctggtctcaaacttctgacctcaggtgatccacctgcctcggcctcccaaagtgctgggattacaggcgtgagccaccgcaccagggccaccttttttttttttttttttttttaaacagagtctcactctgtcacccaggctggattgcaggggcatgatctcggctcactgcagcctctgcctccagggttcaagtgattctcctgcctcagcctcccgagtagctgggactgcaggtgcatgccacaacgcctggctaatttttggatttttgctagagacgggagtttcaccatgttggccagggtggtcttgagctcctgacctcaggtgatctgcccacctcggcctcccaaagtgctgggattacatgtgtgagccactgcgcctggccagaaataccatttgacccagcaatcccattactggttatatacccaaaggaatataaatcattgtattataaagatacatgcacacatatgttcattgcagcactattcacaatagcaaagacaaggaatcaacccaaatgcccatcaatgatagaaaggataaagcaaatacagtacatatacaccatggaatactatgcagccataaaaaggaatgagatcatgtcctttgcagggacatggatggagctggaaaacattatcctcagcaaactaacacaggaactgaaaaccaaacactgcatgttctcacttgtaagtggcagctgaacaatgagatcacatggacacagggaggggaacaccacacactggggcctgtagggggaattgggggagggagaggatcaggataaatagctgatgcgtgtggggcttaatacctaggtgatgggttgatgggtgcagcaaaccaccatggcacacgtttacctatgtaacaaacctgcacgtcctgcacatggattctggaactgaaattttaattgaaaaaaaaaaaggtttattaatgcatctcacacgaagagaaataacaaagaccaaataatacccacactctcattatgccaccgagagctgagcataaactagttttttccaagctggttccaccataaaaagactcccaggatagtacccactgcaacaagagcttcgtatttatcagctgaggcagttcaggaatattttggtggcctcaggaggcccctggttaagaaaatggcctggccgggcgcggtggctcacgcctgtattcccagcactttgggaggctgaggcgggtggatcacaaggtcaggagatcgagaccatcctggctaacacggtgaaaccccatctctactgaaaatacaaaaaaattagccaggcgtggtggcgggtgcctgtagtcccagctactcgggaggctgaggcaggataatggtgtgaacccgggaggcagagcttgcagtgagccgagattgcaccactgcactccagcctggacgacagagtaagactctgtctcaaaaaaaaaaaaaaaaagaaaaaaagaaaatggcctaagttggaaggtggagatcccgtgttctgaggctaacacgagctcattcttcctctaggctcacgaagacatggatccacatcttattattcaaactgagatataattcacataccataaaattcaccatgccaactaggatgactatgatttttaaaacaaaacaaacggacaagaagtattggtgaggatttggaagaaccttcttatattgctggtgggaatataaaatggtgcagctgctttgaaaaacagtctgtggccaggcgcagcctgtaatcccagcactttgagaggccaaggagggtggatcacgaggtcaggagatcgagaccatcctggccaacatggtgaaacccygcctctactaaagtacaaaaaaaaaagttggccaggcgtgatggcaggtgcctgtaatcccagctactcgggaggctgagggaggagaatcgcttgaacccaggaggtggaggttgcagtgagctgagatcgcgccactgcactccagcctgggcaacagaatgagactctgtctcaaaaaaaaaaaaaaaagaaaaaaaagaaagaagtctggtagttcttcaaaaagtaaaacacagagttactgtatgacccagtgattccaccacccctgggtgtgtacccaagagaacagaaaacttatgttcacacaaaaacctgtacgtcaatgttcacagcagcaatattcataacagcaaaacgtggaaaaaaaaccaagtgtctatcaattgctgaacggatctgcttcttactaagccggtcatggaagataagtcttacacctttcgaatttgtctgtcttcagtgtctgtgcagtgtgtcagagaaaggggtttcagggagcctagatatctcaaaaggggaatggagatatctagaggatatagggaaccacggggaagacctaacattgttttgctttcttagaattctcagaagccaccgctgaactgaccgtctcattcacaaacraagtcttcacaactggtgagtaaccaggcatttcatgctcagcagaaaggagtgtgaggacggagctctctcttccattatctaagcctgtaggctttyaaycacttcaccgaactgtccgtctcttaccaagaaagtccttggtgtgaggctagagcatgggtgcagagtggagctctggggttcagaaggaggagcrttttgggtgatggggccatttcaaagatggcggagccaaggctgtggcgggacgaccgccatccctacgcactgctcccaggatgaagtcctaggctttggactcggctgtgatccaggtatttaatctcgctcctcactgtgtccaggtagagcccatgctcggacgcacacagactgtaggcacctggacayagcacatcttctaaccgctccaggcctctgcagatacgctttcctcagtctctttccccttgcctgtcctggaaaatctccatttccttccagactaaacaccttcacagattccctgataataggttagatacttccactgggcccacatgactctggctttcatgaggcacctgatcccacgtagttctatttttattttttatttttttgaggtggagtcttgctctgtcgcccaggctggagtgcagtggtgcgatctcggctcactgtaacctctgctgcccgggttcaagcgattctcctgcctcagcctcccgagtagctgggattataggtgcatgccaccacacctggctaatttttgtattttagtagagacggggtttcagcatcttgggaaggctggtcttgaactcctgacctcatgatccacctgtctcggcctcccaaagtgctgggattggaggcatgagccaccgcgcccggcatatcccagggagttctgtgatggaagccttccctatcttcagttcggaacctcccaatcaccctcagsatgcagttccaattcctcagcttgctattctgtgagcttagatatccagcccctgttgatccctccaattttgtctgcataccttccacgcattcccatgctgttctcagccacacacagtcacttgaagctctcctggaggcttcctaacctctcctgactctgcacccaacccactcactctgccttttcttccatttccccatggcatcaattcctcaagaaagccttgaccgtccaggctggatcgatggtttcctctgctctcgctcagtgtcttgtgggctgcctattacagcaatttttacagtatattaaaattatcgctttgtctgtaatcccagcactttgggaggccaaggtgagtggatcacctgaggtcaggagaccagcctggccaacatgctgaaaccccgtctctactgaaaatacaaaaattagccgggcgtggtggtgggcacctgtaattccagctacttgggaggctgaggcaggagaatcgcttgaactcacgagttggaggttgcagtgacctgagatcacaccacagcactccagcctgggcaacagagtgagactccgtattaaaaaaaaaaaaaaatcgctttactttttggtctcctgcaatagtctgggaaccgcagatggacaatgtcttatggtttttttgttttttgttgttgtttttgagacggmgtctcactctsctcactctgtgatctgtgatttcggctcactctgcgatctcagctcactgcaatctccggctcctgagtagctgggactacaggtgtgtgccaccatgcccagctattttttgtatttttagtaaagacggggtttcaccatgttggccaggatggtctcgatctcttgacctcasgtgatccgcccaccttggcctcccaaagtgctgggattacaggcattcagccagtgtcatgcctggcctgacaatgtcttattaatatttgggttcccatggcccagcacatggctgagtacctggcgagtctcaggagatacttgaggaataagagagctggaggccgggtgcagtggctcacgcctgtaatcccagcactttgggaggcctaggcgggcggatcacaaggtcaggagttcaaaaccaacctggccaatatggtgaaatcccatctctactaaaaatacaaaacttagctgggcgtggtggcggacgcctgtagtcccagctactcgggaggctgaggcaggagaatcgcttgagcccaggaggcggaggttgaagtgagccgacatcgggccactgcactccagcctgggagacagagccagactctgtctcaaaaaaaaaaaaaaaaagctggcacgtatgaggtgctcatatgtcaagcacggtgctttatatttctaccattattattatcttgactttcacatcaacctataagggatcttgttaattttattggacacatggggaactggctcacagatgctgagtcacttgccagataactgacatctaataggtgatagagttggggttcaaatctggaggacagcctgactctacagttcttgcttttttttttttggacagggtctcgctctgtttcccaggctagagtgcagtggtacaatcctggctcactgcagcctcaacctcccagggctcaggtgatcttcctgcctcagcctccactgagtagctgggattactggcacgtgccaccacgcctggctaatttttgtatttttttgtagagatagggtttttctatgttgctcaggttggtcttgaactcctggactcaagccagcctcctrcctcagcctcccaaagtgctgggattataggcatgaggcaccrtgcccggcccatgcttttcttaaatgctgtggaattgtgcctcmccatgtgtgtgtgtgttcggagtaggcacagtgacagggggcgggaatatggtttcatttcacacttagcctttgtttggttcccagagacttctaggagtatcaccrccagtccaaaggagtcagactctccagctggtgagtaagtcatcctctccagacccccttccttctcacccgtctcttcaccaaagccaactcctttgtctacgcaggggctgcagctctcagatcttgggttccagtgtgtagagtaaaggcagaatatcagcgtatggggttcagaattgggcattaagatcaggtgggaaggttgagattttaaaaagggtcagagaaagagagattccatctctyccccascccttataactgtcctctcttttgcaatgcatcagataacgaggcagcatctgtgtctggggaggagttgtctcagagccctgtgagagcacaggagggagaggtgctacttagagaattggggtcatctggccctgacccctactcgggaagggagggaccctccaggaaagtgagcggcatcccctagctagtagagaataataggatctctgagaagcccagatgtggcttggagggggtcctggaggtgggctctttcacctgctcctgcctctcctcattcctccaggtcctgcccgccagtactacaccaagggcaacctggtccggatatgcctcggrgctgtgatcctaataatcctggcggggtttctggcagaggactggcacagccggaggaagcgcctgcggcacaggggcagggctgtgcagaggccgcttccgcccctsccgcccctcccgcwgacccggaaatcahacgggggtcaggatggaggccgacaggatgttcacagccgcgggttatgttcatgaccgctgaaccccaggcacggtcgtatccaagggagggatcatggcatgggaggcgactcaaagactggcgtgtgtggagcgtggaagcaggagggcagaggctacagctgtggaaacgaggccatgctgcctcctcctggtgttccatcagggagccgttcggccagtgtctgtctgtctgtctgcctctctgtctgagggcaccctccatttgggatggaaggaatctgtggagaccccatcctcctccctgcacactgtggatgacatggtaccctggctggaccacatactggcctctttcttcaacctctctaatatgggctccagacggatctctaaggttcccagctctcagggttgactctgttccatcctctgtgcaaaatcctccygtgcttccctttggccctctgtgctcttgtctggttttccccagaaactctcaccctcactccatctcccactgcggtctaacaaatctcctttcgtctctcagaacgggtcttgcaggcagtttgggtatgtcattcattttccttagtgtaaaactagcacgttgcccgcttcccttcacattagaaaacaagatcagcctgtgcaacatggtgaaacctcatctctaccaacaaaacaaaaaaacacaaaaattagccaggtgtggtggtgcatccctatactcccagcaactcrgggggctgaggtgggagaatggcttgagcctgggaggcagaggttgcagtgagctgagatcacaccactgcactctagctcgggtgaygaagcctgacyttgtctcaaaaaatacagggatgaatatgtcaattaccctgatttgatcatagcacgttgtatacatgtactgcaatattgctgtccaccccataaatatgtacaattmtgtatacatttttaaaatcataaaaataagataatgcaccgtctccacccctctcatatttactttctgaaggaaatgttaggtcttctcaaggtaaagttctatatttattatagcgtttaggcatttcttgaccatctaatgagtgtaaaactgtaccactgggccaagtgcagtggatcatgtctgtaatcctagcactgtgggaggccaaggcaggaggatcgcttgagcccaggagttcaagaccagcctgggcaacatagtgagaccccatctctacttaaaataaagaagataaaaattgttttaaaaaaggaaaagaatggctggccacagtggctcaygcctgtaatcccggcactktgggaggttgaggkaggtgagtcacttgggaaaagacagaaggatggcaccaagaagttccaggacgacggctgtgaatcagggctagtgagcacacagcttgggtgaagggggaaygggaaagttgcttagagaagcctccaaatgtaagaatgggtcaattcctcgtcttaacatagtggaaaatcatactgagatgctatcagaaracagaggaaaaataattttagaggtcaagtaaactaagtagattttaaaaagaccagtatagcctaggcacagtggctcacacctgtaatcccagcactttgggaggctgaggcgggatcgcttgagcctaagagttcgagaccagcctgggcaacatggtgaaaccttgtctcatatacaaaaaatataaamaattagctgggtgtggtaccacatgcctactctcaggtactcaggaggctgaggttggggatcacctgagcccggggaggttgaggctgcagtgagccatgattgcaccactgctstcaaacctgggtgacagagtgagaccctgcctcaaaagaaaataaaaataaaaaacaaatrtaaactttaggggaacaataacaacaacaaaaataaaagaagcaagttatattacccgaaaattctcrgctgcgaatatctgtgggtataaacatgtgatactggccgggcgtggtggctcatgcctgtaatcccagcacttcgggaggctgaggtgggcagatcacgaggtcaggagatcgagaccagctcagccaacatggtgaaaccctgtctctactaaaaatacaaaaattagccagtcgtggtggcacacgcctgtagtcccagctactcaggagactgaggctgcagtgagctgagattgcgccactgcactccagcctgggtgacagagtgagactctgtctcaaaaaaaaaaaatgtgatactgaatgttgatatgcagacatagagataaacattggaagagaaaaaacagtaagaacaacgctgtagaataactaaggccccgcctattatgataggaatccagtaagtctaagctcattcacatggttacatgtttttagaaacctaatattaacaagttcctaaagaaaacagctaaaagtgggtgtctcttaggcggagcaatggaggagatggttagtcagccactgcattttgtacacacccttttagtgctattggaattttttaggtaggtgctgtcaggcctctgagcccaagctaagccatcatatcccctgtgacctgcacgtacacatccatatggctggttcctgccttaactgatgacattccaccacaaaagaagtgaaaatggcctgttactgccttaactgatgacattgtcttgtgaaattccttctcctggctcatcctggctcaaaagctcccctacagagcaccttgtgacccccactctgcccgccagagaacaaccccgctttgactgtaattttcctttacctacccaaatcctataaaacggccccaccccatcccccttcgctgactctcttgtcggactcagcccacctgcacccaggtgattaaaagctttattgctcacacaaagcctgtttggtggtctcttcacatggacgcacatgaaatttggtgccgtgacttggatcgggggacctcccttgggagatcaatcccctgtcttgctctttgctctgtgaaaaagatccacctacgacctcaggtcctcagacccaccagcccaaggaacatctcaccaagtttaaattgggtaagcgacctcttcttactctcttctccaacctctctcactgtccctcaaccactttctcctttccactcttcaatctctcccttctcttaatttcaattcctttcattttctagtagagacaaaggagacacgttttatctgtggacccaaaactccggcgccggtcacggactagggaaggcagccttcccttggcgtttaatcattgcagggacgcctctctgattatatacccacgtttcagaggtgtcagatcacgcagggacgcctgccttggtccttcacccttagtggcaagtcccacttttctggggaaggggcaagttccccaacccctcctctccatgtctctaccccttctccacctttctggggggcaagaaacccccaaccccttctccttcactcttagcggcaagtcccgcttttctagaggggcaagtaccccaacctcgtatctctgcaccctgatcccttatttccatgccccaacctcttatctctgcaccctgatcccttatttccatgccccaacctcttatctctgtgccccaaccccttatatccatgccccaacccctttcccgcttttctggaaggtaagaactcccgaaccccttccctccgtgtctctactctctcttttctctaggcttgcctccttcactatgggcaaccttccaccctccattcctcctcctctctcccttggcctgtgttctcaaaaacttaaaacctcttcaactcacacctgacctaaaacctaaatgccttattttcttctgcaatgccgcttgaccccaatacaaactggacagcagttccaaatagccagaaaacagcactttcaatttttccatcctgcaagatctaaataattcttgtcgtaaaatgggcaaacggtctgaggtgcctgacgtccaggcattcttttacacatcagtcccttcctagtctctgtgcccagtgcaactcgtcccaaatcttccttctttccctcctgcctgtcccctcagtctcaaccccaagcgtcgctgagtctttctaatcttccttttctacagacccgtctgacctctccctcctccccaggctgagctaggtcccaattcttcctcagcctccgctcctccaccgtattatctttttatcacctcccctccccacacctggtccagcttacagtttcgttcagtgactagccctcttccacctgcccagcaatttactcttagaaaggtggctggagctaaaggcatagtcaaggttaatgctcctttttctttatcccaaatcagatagtgtttaggctctttttcatcaaatataaaaatccagcccaattcatggctcgttcgccagcaaccctgagaagctttacagccctagacccttaaaagtcaaaaggccgtcttattcttaatacacattttattacccaatctgctcccgacattaaataaaactccaaaaattaaattccagccctcaaaccccacaacaggatttaattaacctcaccttcaaggtgtacaataatagaaaaaagttgcaattccttgcctccactgtgagacaaaccccagccacatctccagcacacaagaacttccaaacacctgaaccacggcggccaggcgttcctccagaacctcctcccccaggagcttgctacaagtgccagaaatctgaccaccgggccaaggaatgcctgcagcccaggattcctcctaagctgtgtcccatctgtgtaggaccccactggaaatcggactgttgaactcacctggcagccactcccagagcccctggaactctggcccaaggctctctgactccttctcagcttagcggctgaagactgatgctgcccgatcgcctcggaagctctgtagaccatcacggatgccgagcttcgggtaacactcacggtggaaggtaagtccgttgccttagtcaatacggaggctacccactccacattaccttcttttcaagggcctgtttctcttgcctccataactgttgtgggtattgacggccaggcttctaaacccctgaaaactcccccactctggtgccaacttggacaacactcttttatgcactcttttttagttatcctcacctgcccagttcccttattaggccgagatattttaaccaaattatctgcttccctgactattcctggactacagccgcatctcattgccacccttctcctcaacccaaagcctccttcgcgtcttcctctcctattcccccaccttaacccacaagtatgggacatctctactccttccctggcaaccgatcacatgcccattaccatcccattaaaacctaatcacccttaccctgctcaacgccagtatcccatcccacagcacgctttaaaaggattaaagcctgttatcactcgcctgctatagcatgggcttctaaaacctataaactctccttacaattcccccattttacctgtccaaaaaccggacaagtcttacagattagttcaggatctgcgccttatcaaccaaattgttttgcctatgcaccctgtggtgcccaacccctacactcttttgtcctcaataccttcctccacaactcactattcccatgcttgatcttaaagatgcttttttcactattcccctgcacccctcgtcccagcctctcttcgctttcacttggactgaccctgacacccattaggctcagcaaattacctgggctgtactgctgcaaggtttcacagacagcccccattactgcagtcaagcccaaagttcatcctcatctgttacctatcttggcataattctcataaaaacacacgtgctctccctgctgatcgtgtctgactgatctctcaagccccagcaccttctacaaaacaacaactcctttccttcctaggcatggttagcgcggtcagaactcttacacaagagccaggaccacaccctgtagcctttctgtccaaacaacttgaccttactgttttagcctagccctcatatctgcgtgctgtggctgccgctgctttaatacttttagaggccctcaaaatcacaaactatgctcaactcactctctacagctctcataatttccaaaatctattttcttactcacacctgatgcatatactttctgctccctggctccttcagctgtactcactctttgttaagtcccacaattaccattgttcctggcccggacttcaatctggcctcccacattattccagataccacacctgacccccatgactgcatctctctgatccacctgacgttcaccccatttccccacatttccttcttccctgtttctcaccctgatcacacttagtttattgatggcggttccaccaggcctaatcgccacacaccagcaaaggcaggctatgctatggtacaagccactagccagcctcttagaacctctcatttcctttccattgtggaaatctatcctcaaagaaatcacttctcagtgttgcatcagctattctactactcctcatggattattcaggccccctcccttccctacacatcaagctcaaggatttgcccccgcccaggactggcaaattagctttactcaacatgccccgagtaagataactaaaatacctcttagtctaggtagacactttcactgggtaagtacagtcctttcctacagggtctgagaaggccaccgcagtcatttcttcccttctgtcagacataattcttcagtttagccttgtcattcccttctgtcagacaaaattcctcagttcagccttcccacctctatacagtctgctaacagaccagcctttattagtcaaatcagccaagcattttttcaggctcttagtattcagtgacagactaatggtctattaaaaacacacctcaccaagctcagccaccaacttaaaaaggactggacaatacttttaccattttcgcttccagaattcaggcctgtccttggaatgctacaagatacagcccatttaagctcctgtgtagacactcctttttattaggccccagtctcattccagacaccagaccaacttagattgtgccccaaaaaacttgtcatccctactatcttctgtctagtcatactcctawtcaccgttctcaactactcacacatgccctgctcttgtttacactgccagtttacactgtttctccaagccagcacagctggtatctcctggtactatccccataccgccactgttaactcttaaaataaataaataatctttgctggcaaggctatgctgaacctccttaggcactttctaattagatgtcctgagtcstcccaattcttagacctttaatacctgtttttctcctttccttattccctttagtttttcaattcatacaaaactgtatccaggccatcaccaatwattctaaatgacaaatgtttcttttaacaatcccacaatrtcaccccttaccacaaaatcttccttcagcttaatcgctcccactttaggttcccacgccgcccctaatcctgctcraagcagccttgagaaacatcacccattatctctccataccacccccaaaaatttttgctgtcccaacactttacccctatttcattttatttttcttattaatataagaagacaggaatgtcaggcctctgagcccaagctaagccatcatatcccctgtgacctgcacgtacacatccagatggccggttcgtgccttaactgatgacattccaccacaaaagaagcgaaaatggcctgttcctgccttaactgatgacattgtcttgtgaaattccttctcctggctcatcctggctcaaaagctcccctactgagcaccttatgaccccgactctgcccgccagagaacaacccccctttgactgtaattttcctttacctacccacatcctataaaayggccccacccctatcccccttcgctgactctcttgtcagactcagcccacctgcacccaggtgattaaaagctttattgctcacacaaagcctgtttggtggtctcttcacacggacgtgcatgaaaggtgcgtgtatatttttgtaacacaataaataataacagtatayactttttcttttagaagtatgctgttaaacagaattaagaacaggaagtctcaaaattgtttctttcaggagagaagacttattaatgggggagagttctgaaccacttgctttgcatactgccacttagttaaaaaatcgcattttaacttaaaaatatccaaaaataacacagttttataataaattattacgaatatcacaaaataataaaaatacaagtaatgcagagtggaaatgcaaagctatgagtgctagacggctaacaagtcataacaaacaacaccaaaattaaagaacaagatagttgtgacttaccttggtcaatcactttccatagtaattcaagtcattcaatccaggatctcatctctgaaaatgaaggaaaaaagcaacagaaaatagtgtagaggtctctggtgttccaagaataggcgctgcagagagatgtgggtgcctgggctgtgcccagtcactgaaatggcacacctgatgctacctgttcacttcgggctgagcaggagagagaaaagacgttcccctcagccacttcccgtcttctgatttcacttcttgcctgcctccgactgcaaatcctggtttgacgtcacttcctgtcttctgattttacttcctgtatgacctcacttyctgtcttctacaaccacttcctgtcttcttacttcacttcctgtcttctgactttacttcctgtatgacttcacttcttgtcttctaccaccacttcctgtcttccgaatttacctcctatcttgacttcacttcttgttttttttttttttttttgacagggtctcgctctgtctcctagggtggagtgcagttgtgccagcttgaaaccacctttccaaaattatgactgagacagtgaaagagatttaactgactccattttgcttctaacctccaagctgtcctttttcattcctgggcataggctgaactttgggagaaacttatagtttaaacaaagatgatagcccttttccaaagcacacctctttgttgcctggggactagattggccctgtaggacgaacattagccacgagattagaaattatgacttaggagtcatgcagctggaggctacaagattgtgaccctccctaaactgcttctaagaccagcgcttaatttgcagatgctgcacttgatgggtcagctggcaccacccagatcaataaactggcccatcttatcttttggcctccactcaggaactgagtgcaagaagatagctttggctcccacgatttcatccctgaccaaacagcactcctggctcactggcttcccacccacccaccaagttatccttaaaaactcttcctgaatgctgggagacactgatttgaataataataaaactctggtctctcgtagagccagctctgcatgaattattctctattgcgattccctgtcttgacgaatcagctctgtctaggcagtgggcaaggtgaacacattggactattacaatcttggctcactgcaacctccaccgcctgggttcaagtgattctcctgcctcagactcccaagtagctgagatcacagacgtgcactaccatgctcagctacattttttttttctgtcccccgggctggagtgcaatggtgcgatctcggctcattgcaacctccgccttccgggtttaagcgattctcctgcctcagcctccagagtagctgggattacaggcatgcaccaccaagcctggctacttttggtatttttagtagagacagggtttcaccatgttggccaggctggtctcaaactcctgacctcatgtgatccacctgcctctgcctcccaaagtgctgggattacaggtgcgatccaccatgcccagcccattccgtcttctgacttgacttcctgcctgacttcacttcctgaaggatgtggttaccatggaagttgttttggggcacaggatgtggtctgggattggggattgtgaaaagcaagaccctcaccggggtctttcttccagagctgcagctgagccacaggatcttgaacaggagagagttcttcctattcttgtggaagagctgaggattgagaaaagcgcggcttagctcatgggagtgaccttagctttgagaagcctgaaaatgaggcttggaggtagagagtggtgtgtgtgtgtgcgcgttgggggagggggtcaggctctcatgacttctggctcttttttttgctccaggaacatttcccaagcccaccatctgggctaacccagccctcgtggttcctgggtgcaaacatggccgtggaattgtggaatggttttttttgtatccttagcagagaacccagtgaatactttgttcttgatcatcaatgtgatgagatccagagcaagcaagtgctaatgctgctgtgagcctgaggccacattttcagaattcagtgatgggcggaggcgagtggtcacaggtatagggagagcagtacttgttcatctctgaacgtatagattcagacacacatgaacccatgtgccacaggtttccctgtttaggacttgtaggtcatgggggtgggcatctgagagtgtggctacatgaaatacacacgttggagaaagatggttaattgtgagtgcgagtttacatttcatgggcccctggggtgtcgatagttcctcaatggatgtagatccgttactcaatttcttctctaaagatggggctagattacaatggttctcaacctaagaaaactttgcatttcaggaaatattttctactgcccagagacatttttgatcactgttaactgtgaggatgtgagctggtatctagggggtagaggctagggatggtgccgaacaccctggaaatgtacaggacgtttcccaacgagtagtgatccgatcccaaatgtcaatagtgtggagaaggagaaacctttagtttcttcacgcaatgtcctttttaaactttgtgcctctctttttaccaaccttcccccttcttcccgctgaaactgagaataaagatgctctggaggccgggcacggtagcttatgtctgtaatcccagcactttgggagaccgaggcaggcagatcgcttgaggttaggggttcgagaccagcctggccagcgcggtgaaaccctgtctctactaaaaatgcaaaaattatccgggagcctgaggcagaattgcttgaacttgggaggcagaggctgcagtaagccgaggtcacaccactgcactccaaaccgggcaatggagcgagactgtcaaaaaaaaaaaaaatgctcagggaatgacccatgccgcattgaacaaggacaccttgaaccaggaaacctcagaagcccacactgtatgcagtggaactggaaagtgatggagtggtttaaaggtagtatcagagaacttggatctagtcggtgggaataaaccaatagcccctgatgaagaaatgaaagtaggaagagagattaacttttttagttttaaatttaaatattaaaactacttttgaccaggtgtggtggctcatgcctataatcccagcatttggggaggccaaggtgggcagatcacctgagctcaggagttcaagaccagtctggacaacgtggcaaaaccctatctctaccaaaaatgcaaaaattacctgggtgcagtggtgcacacctgtggtcccagctacatgggaggctgagatgggagaactgcttaaactggggaggtggaggctgcagtgasccgagatcgtgccattgcattccagcctgggtgaaagagcaagattctgccaccaaaaaaaaaaaaaaaaaaaaaaaaaaaaaagaaaaaaatgttgccaggtgcggtgacttatacctgtaatcccagcactttgggagaccaaggctggtggatcacctgaggtcgggagttcgagaccagcctgaccaacatggaaaaaccccgtctctgctaaaaattcaaaattagccaggcttggtggcacatgcctataatcccagctactcagtaggtcgaggcaagagaatcgcttgaacccggggaggcggaggttgcagtgagccaaaatcgtgccattgcactccagcctgggcaacaagaagaaactgtctcaaaacaaacaaaaaaaaacatgattagtgtttaataaaaatttgtactgttctttttcccccttaccgtccatttgtttgctcatccagtaaacacagacagcaacaaagtctccccatgagaagcaactttgccaactagtgttgtctttatagtacagttcgttttgtttgtggttttacagcgtagagcttgcactgctgctttgttgaatttggaattctgtatcacaaggaaataatggagactctatagtgaaaaactatgcataccatgagattttgtttttttttggagaaggagtcactctgttgcccaagctggaatgcagtagtgcagtcttcagcacagtgcaacatccacctcctgggtttaagcaattctcctgcctcagcctcccaagtagctgggattacaggcatgtgccaccatgcctggctaattttttatatttttagtagagacggggtttcaccacgttggccaggttggtctccaactcctgacttcgtgatccacccacctcagcctcccgaagtgctgggattacaggtgtgagccaccgtgcctggccgagattctattttaagttagaatttttaaaaagcaaaatcagagcaatgacatggtcatatatgagctacaccgaagcacctaaaatattgtagattggtaggagaaatcctctggcaagtaatactcagcaggcagtgatccacgcaggtcaacaagtaacaagacaggctaggcacagtggttcacacctgtaatcctagcactttgggaggctgaggcaggaatattacttgcgcctgggagtttgagatcagcctgggcaacatagtgagaccctgtcttcaaaaaaatcccacaaaaattggcctggtttggtggtgtgcacctgtagtcccagctactgaggaggctgaggctggaggatcgcttgaacctgggagcttgaggctgcagtgagctatcatcatgctgctgtattccagcctgggcaacagagcaacactcatgcttgaggaaaaagaaaaagaaaaaaaaaaaagccgggtacagtggctcatgcctgtaatcccagcactctgggaggctgaggtgggtggatcacttgaggtcaggagtttgagaccagactggccaacatggtgaaacctcatctctattaaaaatacaaaaaaatttagccgggtgtggtgggggatgcttgtaatcccagctactcaggaggctgagacaggagaatcgcttgaacctgccaggttgtagtaagctgagatcgtgccagtgtactccagcgtgggcaacagagtgaaactcagtctaaaaaaaaaaaaaaaaaaaagaaaagaaaaaagaaaggaaataccaaggcaaggcaaagattgacaaggcaatagaaatcaatgcaattaaacactgtcacttcccccaccccccaggttctacccagtaagatatcttttctctaacttgtcaaagcccattattaagtaacagcttcatttgtgaatgctctcacctttatttctctcaatatacccgtgatacagatatttcatatgtaacaaagataaggatgtgtgcaggtataaaacagaggcagaatcatggctaaaacatctagcccagcaatgaactcattatccctgaggggtaggggccggggaggagaggagtcacaggcagttcaccaacacctggaaaatcgatgacttcatggagaatgaatgactcggggggattcagatcatgaagtcatgagaagaaggcctttctgcccagggatgatgtttctcagtatcaataatcagttgtgggtttttttcttctatttcttccagcagcttattgagttcatcattaaagtcatcgattttcaacctggggtacaatgggggaagaaaaggttactttgtgcatcaaggagatttgtttcaaattcccaagtacctgaaagtctgttaaggaggcacagggcatgggtcacctttcctgattattctaggtggcaaaggagtgttccacattgattttttttttttttttttaaaagacagtctcaggtggggcgtgatggctcatgcctgtaattcccagcactttaggaggctgaggcgggtggatcacgaggtcaggagatcaagaccatcctggctaacacggtgaaaccctgtctctactaaaaaaatacaaaaaattagccgggcgtggtggcggacgcctgtagtcccagctactcaggaggctgaggcaggagaatggtgtgaacccgggaggcggagcttgcagtgagccgagatcgtgccactgtactccagcctgggcgatctcaaaaaaaaaaaaaaaaaaaaaaaaaaaaaa

SEQ ID NO: 94720 - DNA, 709368 bp, Homo sapiens
  misc_feature (1)...(709368): n = A,T,C or G
attggctattgagatgatgcaattttgtctcaggttcatctttttagagactgtcctccactaatgcaccctaagtgttcctatatcatgttagatgttggatgatgttttttttttcccctgaaaatctcaagttcttttgagtctatgtcctgaaaagccatctgctagtcctaatgcttctattacctttattccactttcttgtggggggtttcacttagaaagaagggaaatgaagacttcatgtttgacttcctcctctgtttcttttcctcttgcctatgctcttgagcctgaggtagtttattatattcttttctcctcttttagcatggcaaaagtccttgatctagttttctaagtctgaattctaatattgtaatggaaacaagaaaagccttatattcaagattattgtcttgctatatggatccagaattattggcagacatcaaaatgtagactgcctttttaaattttatttatcttgtagcaatcttgatctttttagaggcaaatgctatgcctggcagaaaggtgaggtcagacacagagaaatgcaaaaggattgcatttagatatatttccaaacaacatccttgttatccttgttacataatgtcatatcatatttctcatgttattttgttttctgcttcttttccatctgacatgtccaaatagtgtttaaatgtaatgtggccatggacacagggaggggaacagtacacacttgggcctttcaggggaatggggtgggggaagggataccatcaggataaatagctaatgcatgtggggcttaatacctaggggatgggttgataggtgcagcaaaccagcatggcacgcgtttacctaagtaacaaacctacatgtcctgcatctgtatcctggaacttaaaataaagtaaaattaaattttaaaaaaaaactttgtgcggcaacaactgctatgccactgctatgcaatttctgtcataggacatggaaggatattatgccacataagtcaacgctgtctacctacattaatagatatttaatagatagcaattgtgtctgcacttaacaggtaccttctccatatatgctgatcattgagtttagcacaaaaggaaaaatgtgagaggcacaagttaaaataactgtccttgaagaacttaaaatatatctgtggagacacgacagcacaagacaactcaagaaggcaatataagttataggcattgactataattgctgcacaaggtagaagaacgataaaatcaacagagtccaaagtacctggagatcactttctggagaagttgtcattaaagctttgacagggcagtacatttggaaggtgctgagaagtaagaactgaaccacaagtagaaggaatagacctgaagaatggaactgggatagaacaacgtggcagctgttagacactccacttgactgaataacagagattatattgaagaacaatgtaaaattcatggaatgtataggacacctttaaaatagtatatccagaagacatattgtataatttttagctgtttcccccatgagtttcttaaaacacaaattgtgaaaaactaatatcatatgatgtgaaattggaaaactttgaccccttaaagcaatagctatcagatactaatgtgatttataaaccagatcaccttgtagaaattccctagtgggagtgtaagaactgggtagatacctcctacgtttccaatccaaaagggctgggagatctggagatgaaaggaagattttatggagtgaactgaaggtgtactcgaaatatacacaaggagagatggtgtagggtgttttccccctcagaactagaaagagctcttcaaggagactctctagagagtttaaaaggtatctcttgaagttttgaggttttagtggagacagtggactggattctgattaattcaaagaccaaagatgaggtggtgagcagcttatggtacagcaaagtaaagattctgaatggggattcatctatttttcaggggttgttagattcctctggaagagaggtgggccacgaatatgaaagagctgtcatgaggttgtcctaggtatttccttaaggcttcccagcaactgaactggtctcagctgactagtgactgtggatgaagtaagtaacaaagtgagacagtatgacctgcatcaagcatagtacaggtgaaaggtctccagtgattggaggtgaggattactgaagaaccaggaaaagctcaaacggggagagaatcaactttgtgcctgtcccaaagagggagccttcttgcttagtgagcagaaagtaagcactttcctgcttcatttacctcttgtttcctcacctttcctttttcactccactgctatattccagaggcatcaggatccaaggttcactagctggaaaagaaggacatgggggaaaaatagggaccaacaaattcctttccattggctattggcttccatttgcagcagattccagctgcaggaaactgttaaaactgtaagtcagtttgtcacgtgcagctgggtgttctgatttctaagttgagaatgtgtttgatgagctagcagggatccccaacccccaagccgtggacaggtaactgtctgtggcctgttagaaaccgggccacacagtgggagatgagtggtggacaagcaagcattactgcctgagctccccatcttgttacatcagctgcagcattagattctcataggagcatgaaccctcttgtgagctgcacatgcaagggatctrggttacgtgctccttatgagaatctaatacctgatgatctgaggtagaatggtttcatttggaaaccattccacctcccccatctttagaaaaaattgtcctggtgccaaaaagtttgaggactaccaattaaattaaccgtaagattttttttaataagttctaagttatcagagtctagatagaagcctgattcttgttggccgaagacatgtgttattagtttctttgactgccataacacattaccactaattaagtagcttagaacaagagaaatttagtgtcacatttctggaggctagaaatctaaaatcaacatgtcggcagggccctgctctctccggaggctctagagaagaatctgcttgatgcctttcttttagtttctgatgttgctggcagtccttggcattccttagcttgtagatttatcactccaatctctgcctgtcttgtcatatggcactctgtctgtgtgtgtctttgtgttcacatggctttctcttctccatgtatgtccatccctgtgtctcatctcttcttataaggttgccagtcatactagtttaaggggccaccttattctagcataacctcatcttaatttacatcttaattgcataaagattctttcttaataagatcatattcagggtaggacttcaacatatctttcgggagtacataatttaacccacaacagatgttatgcagatgttggtctacttgatgcctgcacctggagttagggattgttattggtatgaatcaaagtctcttcctaatttctttatttagaagacatatatgctgtactctttcaaaatatacagtgtaaggttttgagtctgaaacagtgtttcgtagtcaagcccaatcagggctcagctattagaaatgccactttatattttgtccattttactcccagtgctgttactaatgtttctcctctttgacatcctctgaccactttaacaagaaattgagaagactcccaatgggcactgtgagtggaccttacgttaatgtggacttcctttttttatgcttccagtttttgtatgcattaccccatcttcctggaaagacatacctgcttacctgtctgttaggcttagtacttcagagttctcttttgtgaaattttcttagaccaaatagcgctgactgtcagccgtgtgcacaagttcagctattctgactgattttttgggggttgggggacagggactcattctgttgcccaagctggagtgcagtgctgcaatctcggctcactatagcctctgcctcctggtctcaagtgatcctcccatctcagcctttcgaatagctaggactacaggtatgcaccaccacacctggctaatttttgtttttgtagagacagtgccttgccatgttgcccaggctggtcttgaactcctgggctcaagcaatcctcccaccttggccttccaaagtgctgggattacaggggtgagccatggcacccagccctgacttattttttaagattatgttttaaatccttttctgactccagaatattcttttaatactttctgctccttcaaaactctatgtattatctaataatgatattttcaccaattacttgaaataattgtccacagatgtgtttcctccactaaactgtgcttttcttgaatctctttttgtttgctgtggtttcttcagtctgccacagacgttggcttgcagtaggggctcaccaggtgttttctgaattagatcgagtgttcataagagtagataagggccagttgctttaagtgagtcttgaagtatatcacaatttcttgaaggccttcttcaagctaaagttctcagcaaaatcaaggggaaccactgcagtcgagcagttgacagcttactaatcttcttgaaatactgctattcaatctttttcacccaccagcctgaaagacccagaaggactctttcttccttcatcatcacagagtctaattaataaataaacaaaataggtaatgtccagtatgatatgacttaatcattttattgtgtggctcactagggcagtgattctcaatggaatagtaagccttttttgttgttgttctttaaagaacagtgataataataggaataataatgatgatattatattagcttatgctttctcatgcttagcttggtactatgctatgttctttatatgtatttatctcaattatcacctccatgggggataggaaaaaatatcattcccatattacagatgaaaaatgaagacttacaaaatttatttgtccaaaatacacagttggtaagatgtagtgattgcagttatatcactattcttatgactgctttagtcaattaatcagtgttgttttaaactgttagcatcttctattcagccaaataactttcttaaggggtgaatttaaaattcttacctatgtatgtaacagtcctttctggaaagctattgctcaggcttgaattttgtatcctccaatctgaacatttagataatgatgcaataaaatctattatgggataytcctcaagattgttatacattaaggcagggaataagatatattttcataacttttgacttcgataaagtactttcctccttgttgcagcatagaaaagctctgaaattacatctcataaggaaggtaatctgcagttatttacagttgtcccacagtatctcattttattactttgtggaaagacccaaactttcatgaatattttaaaacccatgctcactagcagtggaaggaaagtcaatttagataattttaaattccatttcagtccattgtattccaagtaaatgttctgtcctgacattgcttacatcttgtcttttgaaatgatggaagctaatgccttttcttgctcgagtgccagttttgttcacatgtgagagaagaaagagaagcaaagaaaacagggctgagtatctgctgcagtcacccatgttctcagctgtaagggagaaaggacatttggggaagtgatttggcatttaaagcaagtgtttcctgaggcagctgctgaatggagctgaatattttgttaaatgattttcttctctgacctttattactaatgaatcttctttaagaagcatttaaagaggaaaaaagaaaggttgtttttattaatcttctttctcttttcccgtagaatacaaagaaatggtgttacctggcaagaggtcttctgtcttttatgaaaaattagacaaaggtaatgcttattttgaattgatattttttcattctgtataactctacatgaaactagttgactttccttgattattcgttttagatattgaattacccatcaaaaaagtaaattattatctgaaaagccaagggaaggccttacgatgatcatcagattgataaagtgaacagtacatttttagatatataatagcttttcaaaacattgtgggtratggttaattttctgataccattttgaagtttatgttaatatataaataggatcttgagtacaggattgcagtctctttggaaataaatccaattggtttatcatatttacaaatgataggtaataacagcattagacccttgttagggtacaatgataagattctttgtgactttatttggcgttagtcagatgactttatgtatttttttgaatatacaaaaaaaatttcaatatgaatttctagaaaatgtcatcaagctttatgaagacaccctcatgcaaaatacatattttctttggaaagattgaattatatcatgcagttgttgaatagcgtgcctgattatacttaacagatgcatatttagttgctaaattttcaaatcactatgtgaattatttacatatgttgttctaagaatatgaaaactcatgcaaatattctaatgacatacgcatgtacacaaagtgtgagtatggctgcagataaacaatgtgtgtatgttttatgaataaagctactatctcaaaagagatttttgcagaaaagtttcagacagtttagaattttgaagggaactgagacatccattgagtcctgtctacttatttagctatgaagatgtgatgacactgtatgttcatgaacatatatagtatattaatgaaatgtattatatatttttatattaactagaattgattgggttttatttttgacaaattactgaatttctaaaaataaatgagtactgaaatacagrtagcatttaaatgtaatggatatcagcagaaagcttatttctgaactttgatttgcagttgagcaaaaataaattgttaaatttgaattacaaatgtgatatatttctacatatttctggcttctaggtaattcttcaaaacaggtataaaccccttgagaaaatagcttcttttcctaagggtagtcaccctatccaagttttatctatactgaaatgttaattcaaattaaaatgttcttaaatggttaatgaagttaattgagggttgtcttttacatagaactattagctttgactctccaaatagggacattataaagagaacaaattcctagacaatatgtggaagaggttgaagctgagctgtgtgatgtaggcatagggagataaatgctagaaaagtgcttgttgaaggcaactcaatggaagatggcacagtaaagagagaaagagaaatatcctgaatgagatgaagccaatgaggaaggtcagggatccatgtgctttagaatataaataaagcatgcagggagcacagactctccaggttgcatttatgtgaatttttcttttctcagagatatgtatatactaatatactcatttttaggcttttattttatttatgtaagctatgtataagcttattttgaagtgaaggtaacaaaggaagacttagggtgagggaaagtaattcccattcatgggatagaattttcagcatcagtatacccagagtaacaaaatttgttttttttctattatgtaaataaaggaatcaaggaatcattctgtgtattgccaaaatttggcatgatacaactcccaaggtgattatgatccaagatatgtatgttgctgtggaggttggaagtgagatattgaggaatagctagggatgggagaactatggccaggagaaatgacgtttatgtcattatctttctgggctggtcctatagatttgttgaactgggggtgtttgcaatctcgtaaaattcctattaataaggtaatacacactaacatattaacattctgcctattatctcagatggaatatgtgcatttaaatttcaatgtttaaatagtggaagtttaagacataytagtgaaggtgttatttttaaacaaatggaaccattcagcttttcttagtatacatgatgactaacacattcattttgtgtaggattaattctggcaatgggctcagcatgcaatctgttggattaaccgacacttttatgtgtgcagatacctgtgagttctacatttgactcttttaaaaagggcatttaaacaacttttcaggtagcgttttaatgtgaagttattggttataagttatagttacaattttcttaattttgtcatccaaagatggagggaacttcaattagtcaggttaaaatatctttcaatatacctggtaggtataccayggtaggattacatgtaaaaatacagaccgtgattctgttcaatttttacataggtttacatgtcctggaaatagatcaaatttcaattaagaaaatttcatgactgtaattatatttttattatgcaggaatgttaaattttattctcacatatattgaattttttctggaggaaattgaaatagcatattaagaattcagcaattcttttatgtactgtaggtttactatatttaggctttctgtaaacacaattttgtaaattgaaaagaaactgggttataaggctactatacagggttacttatgttcaaggacagtaagaaataagttgtaaatatattgtttacagattggttttattttggtttattatttgatgtaggaaatgatacagatgygatacatgttgagatttaaaaggatacaaatcttgtgatattttaagrgtttattacagattatattttctattatttatcacatacctactataataacaactgaaagtacagcatcataacttgcaggttgattaataagttagtgaccatgcatttaaatgagagttagaaatagtttaaggctagtgatgaaaagtacatgtaaatctcacagtgccgaaattaggttctatgtctgatatataccatacaatgctttacaaaaacatattcataacatcagcacagtatgctcccaatgagtatttaaactgcaaatcagagaataaatcattgaacatttttatggagaagtgattaaaaagtaattattaaagaaaaatttacatgaaaagaagctgttatggtagtttttaagaatgtggcttttatgatttttttcatttgcaaaaagttcttggtctttttaactcttctgggtattagtttctgtgcaatattttatctttttgaaactctcagaactataaaccacagcattgtctagaatcagctcctgctactgttcaagttcttccatcaattccccagctatgtttcttaccttatttatgtctctcttaacaccacatattccaaacattcttgtctttgcttaggtttaaagcttggctttgaatgtctggtctgctttcttctttattccaaaaactatgtaaccttaaaacttctctttaagatgctttctgagaccttcattatattacaactctctttctcccttagccagcctacactacattcactcacacttagttgtggtatccgccatactgtcattgatttgcatattctggtatattcttgtatgtatacatatgtatatgtgtgtgtgtatatatatataatttgatatcatatataaaggtgcacacacagacacggatttttttcttcaatataattgtaaaaaagatctttctgccagccacgtttacttttccttatgagtaaagcagacaaattttgagtgaatgagctccttgaatctccaggatttccattgaaggtatatttaaaagactaaaagatctctttgtaataagaaagttataattttgctatgttttgtattaattaggactacctggagaacctactatgcttttatgacatctttttttttaagacggagtctctctctgtcacccaggccggagtgcagtggcgcgatctcggctcactgcaatctctgcctcccgggttcaagcaattctcctgcctcagcctcccaagtagctgggactacaggcacgcgctaccacgcccggctaatttttgtatttttagtagagacggggtttcactgtgttagccaggatagtgtcgatctcctgacctcatgatccacccgcctcggcctcccaaagtgctgggattacaggcgtgagccacagcgcccggccttatgacatcgttttaataagaataaaatctaaattccaatcaactaatttataacaccactgtaggaacacattctcttcaccaaagggagacagcttaattttatcacttactggctttgtgccactccatacatcattgcagaaaaatctaacctgccctacccaacaaaagcatttttgtgcaagagcatatactctgctctatagtggagtctctctaggctaagatcctaaaagtacttaaatgccaggtatggaaatggagtagggtcatggttatttggaaagctgaaaagaaattaggcctattgggtttggggagaagactttgggaattggggctctcagagaattggcaattcccagtaaaagactaaagtctttgagggaattggttcctttaaggctttagcagatctgctcatttttatttctggttttgcagcactaagattactttggaaggagaatcacatcattgaagacaaagtgatctgggctacaaataattggtaacatgtccactagattttgcaagtacacgcttgaacataaatgtatgtttgttcttctctttctctctctctatatatatgatgctgaaaatcatacacacacacacacacacacacacacacacacacgagatgcactccagcctgggtgacaaagtaagaccctgtctcaaaaaataaaaaataagaaaactatatatatatatatatatagagagagagagagagagagagagagagatatatatgtatatatatatatattcatatatatatgtatatataatatatatatgtatatatatacacatatacagttggctgttcatattaatgggttccacatccatagattcaaccaactgggaatcaaaaatatttggaaaaaaaaccagacaataaaaaataatacaaattaaaagacaatgcagtaaaacaactatttatatagcgtttacactgtagtaggtattataatctagagatgatataaagtgtctgggaggatgtgcataggttatgtgcaaagactatgccgttttatataagggacttgaacatccgcatattctggtacattgggaaagaggaaacctggaaccataccccactgggtaatgagggatagctctctatatttttaatgaatttgatgttttaaaaagtatgccactagatgtcagcagcaacctcctaggggtcctgtgaccttaatttgctaacaataaaaaatgatacttcattagaacatcttacctgagaatagtaggtacttaatttgaaagtttaagaactattttttttgccgtacaaagagtaggagtgcaggcataaaatatttttgaattattttctaaaccagtttctgttcacatgtaacaagttatttttacttccagtattctctgtatcattgagatgacaatgacgaattatgggtgaacytgagtaatttgtcaggaattgtacctgatgccggagctctaaacttctgctttgatactttatgattcatttatgccatcattggatgggtatttgtgctttggttttgtttcattctgtttttgtaacagcatttggtgctatagcccatcagaagattgtgtagtattaatttttcggcatccacatctgtgccctttttacttaataaattctatctttaatttttttccttaataatttctaaactttcatggatctctgttcagttgttacaaggtactcaacttttggatagatgccatagagtattatgaatgtttgctcatgagttgacaacatcatctagaaataagaaaaaatgatattttccatggattatagtacatataattttttagtttttaagaattagtaaaagtatctcatttttttcagaaattaataagaaaattataggctgggttcaatgggtcatgcctgtaatcccagcactttgggaggccgaggcgtgcagatcacttgaggccaggaatttgagaccagcctgggcaacatcgcgaaaccccatttttactaaaaatacaaaaattagctgggcatgtgacggrcacctgtagtcctagctactcaggaggctgaggtgggaggatcacctaacccccgagaggttgaggcagcagggagccgtggtcacaccactacactccakcctgggtggcaaagtaagaccctgtctcaaaaaataaaaaataagaaaattgtagtattggccaatgttcaatagatactaataatgttattttaaataatgccattaattttttataaggttaggtttacattagcaggaggattcaatctaatttgttggatcttaagcatgatttagaaatcagtcataggtgattgggtgtgagtcaaccaagtgtgaagcaggtttgtaagtgataaagagaaaggaagagttgttcccatttctctcccttggaaaaaaatctgctttaaatccattcaagatgtaaagataattataaaaacatttgctttcctgaagcacattgtaccaaggaaaatattaatgtaaatgttacatctttatcatgtttaagatttttttagttggtatagtgaggtggggctaactgagctagttcataggctcagggaatatgtactttcatactgaagttgttatatttgaggattattggtttaacttcataagattaacactgagtttcttaaatcttactgagttttgcatctctattttagaactaccagtaaaaaggacttaacaggattttccccaagactttgattgttattctttaattatgtttacaggtgatgaggcagacatttgaaatcatgctacagttacttggcatatgaacatcaatatgaacatcaagctaatgctgtacctttcattcatgaatagcacttgctcgtggccctgactacctatgccatgagaaagtgctattcatgaacagaaggcacagcgctagcttaatgttcagttaagacactcttatcattgagcctgatgcggacgcacaagtttgcttgatctagaatagtccagcctatgcttcccatacttaactctctagaaggggcaaggaataagatccgattggggcatctgtcttcagtctgccactttcttcgtaatttatagttaaatgacaactgctcatgaggtattttgaatagagagcccgccarttttaaacaaactgttttaactacacttaaaaagctaacttccatttctatatgtatcagtgcatttcttctcaacatgttcatttgcttgtacatttaagtggattaagttaaaacagagagaatggggtttcctttgggctatttcataaattcaaacacctcaatctgacattcaaagactgcttttctgctgctgcattctaaattttctcaacctcatttccagtcgattcctcacccagatgttgccttgtagctatacagcctggttgatctcatatgcgtacgacttacttatttctaccctgctggctttgcatttaccattctttctacctagaatttaacttttttctcccctttcctaacatcttgttcttcgtttcagagacagaagagtgtacaaggggcaattcttttttttttttttttttgctttcttttttcttattattatatgttaagttctaaggtacatgtgcacaatgtgcaggtttgttacatatgtatacatgtgccatgttggtgtgctgcacccattaactcgttatttacattaggtatttctcctaatgctatccctcccccaattccccaccccacgacaggcccyggtatgtgatgttccccgccctgtgtccaagtgttctcattgctcatttcccacctatgagtgacaacatgtggtgtttggttttctgtccttgtgatagtttgctcagaatgatggtttccagcttcatccatgtccctgcaaaggacaagaactaatccttttttatggctgcatagtattccatgttgtatatgtgccacattttcttaatccagtctaccattgatggacattttggtagccagatagtttgggttcgaatcccagactggtaacttcttagcttattgcttcctggctgaagcaagctatttaagctctgtgtctaatattgccttcttctgcaaaactgggaaagaaagattcttacataatttagttacttaagtgaggatattaatagaaacttagaatagttactggtacatagtaagtagttaatgtatattagccactatgaattccatcaagtcagtttcaaaattcatcctcataaaatttagtctcaaaatttactgtccttcatgcagccactaatctcattagcatgtatttcaaggtctacctgcccactctatcagtacttttacatttggtaatctatacattttaaccacttggtatattcatttcctcatcaataaaaaggacagtaatacttgccatggtcatacctagggttattatgaagacaaaactagaaaatagaaataataagattgatcatagtaaccatttatcctgctcttatgtgtaagaaactgaattagaggttttacttatgttaacctatcacttaataccttatcctcatgttggtagcagggttctaagaaggagaaggcagaaatgtgaaagagctcttgaggcccaaggttcagaactgacacaaattactgcatgctactgaccattacaattggttggatagaagaggcagggtaattgaggtcgtttcacaatgaatatgccagaaatccatcctacatatgaaaaaacttwaatacaatgagatttaaatacttgctgctaatgtagacttgggacctctacctggcctgttaggaaactttacctttcaggatccagtgattctgcaaggattgggcacgtgccctgagcagaattattcatagccataacatgagaaatgctatttaagagagaaagattcttcttttaggatcaaaattgtcaggatgttgacttatggcagccagtaattttttgttctgccgtttggggaagataatgcaacagttaaaaattaaaagaaaaaaattgagagataagaaagagccaagatacagaatgaatgagcaagtattagaaagatgcgatagtatcatttgggtcactgaatctagccatacttgaagcctatagcttgctaatttttgtagaatatgtatgtgtatgttattaaacaggtttgactaaggtttcttttrtttgagaactaaacaattttaattaatgacaatggattagtttgcaaaaatggccacagcaatgtctccagtctcaaatgtttttccagaacctcgttggcatccccatcaagaggtgaggactattttcccctcccttgaacctgagtgggtttgtgtctgctgtgttaagcactggagaagtaatgctatgtgatctccaaatgtaggtcataaagttgacatagaagctgcttgcctctctcttttttgggacacttgtccttagaatctggctatcatgttgtgagaaagtccaggcctaatggagtaaccatttgtaaggtgttccagctgacagtccagctaaggtctctgccaacagccagcatcatttgccaaccatgtaaataaacaaatcttcaaatggtctcagctcctggccttgccacagcccaagtgataatgagtgaaacagagaaaagctatctccccatggtcccagcctaaaatgcagatggttaacaaaacaaatgtcaatatttgaagccactaaatgttgggataatttgttaggcagtcatagctaactgcaaccctaacttctcccagagctccttcccagggctctcttctgctacactgtcagaccctgctctacctggtactgccattccactttcacctatgcctttatttctacacactttgctttaccaggtggttatagacattttgtattcagcattgtatttcactgactttgtgatatgctattcttggatgaaaatggggttggagatccccatgttattctatgccccctattaaaaagctggtattccaacttgacaaattctactcctactttctagtgctatgctagcggatagccactaggcacatgtgattatttgaatttgagttaaattcaaattaaataaaattgggaatttctttacactagcaacatttcaagtgctcaatatttatatgcaactactggctaacatactggacattgcaacattatagagcattttaatcatctcatggttctattagatgatactgctccaatttgcaaatcacacatgtggcccaaggctaaatcctttaaatactaggattcaatgatgaaaatctttttacctagagcagagagctcaaaaggatttggtctctcttactcaggtttgagctctgggagaggacagagatgaaaatctctacctcagttaatagggttgtgtttcatttatattcacatgaaaagactacctttggtagactttcctaatttatttcctagccactgcacatgtggacaattgtttattttcttgttaacattagttatatataataacatttcttattaacattagtttctgtttttcagtccagtctgatttgtagaacaattcaattcccagaagataacccagatatcttttgcaaatatttggggcccttgttctcccagcagagagtcctcgtgagcacatagggctcctgttgacttgaaagtgaactctggctgtggagtggatattactcccttaaaagagaaaaagagtaacttcaaggcaaaaagggcctttattctccctgggtgtaagtttcctttaaagcttgtttattgatttttcttgtaacaactgagcttgcaagctataaaagagaaaagcaaaaacaaatagaatcagggaaataatatcaatgatcaacaagtttattcatcagctttatctcatttgtagtcagccaccacaggcctgtgaaataaaaagcaccacaagctgcaatcccagtttttattatggaatccatagactttagctggtcaaaagggaaaacaaacacttcaattttcaagcaagggtccattgtcattaaaagtgattgtgcctgaatttatgtcaacgtgtgaggaaagtgcagaaagtaagtgaaaagaagagaacatggttgagggcgtgatgcctggtacaatgacagtggcaccaattttgatctctaattagtctgtcaaaytgcctgaagtaccctctgttaatattgttcctataggaaaacatatttctaaatttatgacccatgtgatgaacctttaagaaagtcctctcattaggtaattttggaaaatgctgaattttatatctccctcctgtaattttatgatgtaattktatgatgcacattagaatattagtctctgagaaatcttgctgtaaagaaatctgtttaactttgtttaatccagcattttctcagattggtggaccattaagccttctatattttagtgtatgttttcatgtaatactcattgcatctagtggtactagctttcaatgaagcacactgtaaaatgctgctttagaagaaaacatggtttcctaagtgggcagcccaaagtttacccagggaaagggtaacactttaacacattagcatttgtttagacagattggctttcctaaatgagcaggatcttaaaacccccaggatgtagaagaggccagcacatatttcctaaggagtgctgtttcaggggactccagggacactcaagggtggacaaccatatctggcaaggccttttctgggacatgaggctttcaaagctgtgtttctggaaaggttgattttggaaggcatcaaatgggagattattagttcaagaaaatgtaatagtgycgctgtgtgactttcagagaatgttcaatcacttccttttctctttgagtaagtatttctcagaagagtagacttctctgtttctgctttctcaccaaccatttactctttgatcyacaacaatctttcgcttactctctcattccaatagaactcctctttctcagattttccacttgccaaatgcagtagactctttctgggtgaacttactagcctcctctatgattctgtattctacctaaatgcttttgacttccatatttctatctctagcccaggctacactttgagcttcaaaattgtatccccagagacatcttgaacttagttcaaaattgatcccataaacttgtactttcaatctcttccttctatagattatttgaagaccatcatctaccctgttaacccagccagaaacctgggagtcatccttaatttctcttttgctcttagcctcttcacaattgatcagcaagtcctactggttttgacaattgtcaaaatattgagatatatacatgagaaatgctgtttaagagagaaagattcttcttttaggatctgtcccataattcccatttctttcctttccttaggttctagcaaaacactggcctcagagtcaaaacacagctcttccacctgatatatggagagcctggacatgtttgttattccccttaatgtcttattttcctcatctgtaagatggagataatagtaaaacctaagagagttattgtaattttgtgaaaattagatgaggataaagtggggatgttgagagaaaattaagttgttttctttcctctccctaggaatgagggctggggagaagtacttatttattattaggggaaaaatcttagtgggttagttgacatttatatggtaacaartatgtctttaaaatgctatagtagtgaataaaaaggaaaacaagtacrtttgtgattggctagaattcatgagacaataatttatcaatttttttttctttcgatatacaatggtgggctattgccaggaaaataaaagaaggaaactaaactatctttaacacattttaggacaatagaaatgatcttgtgtgtgatggagtagattaaaaggaaggacccaatggcagcatgccttggacatttggattatctgttaatccaggctcatgtataggtatctgcatcttgtagggtcagccagcaggagcgcagttaagggtaggattcagatgtcctcatcttttaagacctggctrttaatttcagtcaatttcatataaacacctcttatttttgcctagtggctatcttagtcaccctactgctatgacaaagtgccttagcttggttaatttataaacaatagaaacttatttctaacaattctagaagctgggaagtccaagatcaaggcaccagcagatttggtgtctggtgagggctagcactcccttgctacgtcctcacatggtagaaggtgcaaaagtgatgagcatctcttttggatctcttttatttatttattgttattatttttgagacagagtctcactctgtcacacaggctggagtgcagtggcacaatctcagctcactgaaacctccgcctcctgcattcaagccattctcatgcctcggtcttttgagtaactggaactacagtcatgtaccaccatggtgggctaatttttgactttttagtagagacagggttttgccattttggccaggctggtctcgaactcctggcctcaagtgatctgcctgcctcagcctcccaaagtgctggggttacagtcatgagccaccgtgcccagcctacacctcttatataaggtcatcaatttcatccataaaggctctgtcctcatgacttaatcactttccaaagtccccacctcttaatactaatacactggcaaataagtttcaacatattcattttgtggggacacattcagaccatagcaatggctaagagtcctttttaaaactgtattagtgagagataactgaatagcataatacacatagccatgtgtactcttaggtttaccatgataagaataataataaatgattgatgatagtcactcattcttttaataaatattattagtctttttctatgggccactgattctagatgctgggaatatagcagtctacaaaacagaaattactgtggtgctcaatcttatgatccagttaaagaagacaggcagtaaacaaataagtataaagtattctataaaggggctatggagaaaaataaagctggaaagggggtcagagtacgttgtggtgggtctggagttatatatttaaatagggaggcctgggaggcctctctgagaagattctatttgagcaaagactggaaggaggtcataggaccaaagagtggttttgataaaaggaatcaaaacctttgatctgactttcctttcactaaggccattctagctacttttgacaatcaacagaaggaaagatctaggcaagagacaatagtaatggggcccagaagaggtgttggaagggacatgttgcagagataaagttcaattttagtgtatatggcttctctaaggctcatgctctcttctgcagaagtgccaggatttgaagagtagagtcagggagagacaccaaggaacaaaaactagagagaaataccagagtgatgggaagagaatcatttgtgttgtcacaaaagcaaagacagtgcaagttttaacaagatatgaacaatgtacaccactgcagagaattcaactatgaatgtattatatctgaaggagatacatcaaatttgacaaatagaagtaaatttgtggcattttcaagaatagttttagtggagttactaaagcaaaaacaactgattgagattgggaagtaatgaggtataggtggaggatatagattgctcattcatgaagcttggtagacacaaataagtggctttcaatatgtgaaaataatattttgttacatgaaaactactttttatatgtgcagtacactcatattttccattctcytctttattatctttttwaaaaaatgctacattttattaaattgattttataacccactctagggttttgactcatgatttcaaaaacatgatcatatgtagcaatcagggataaaagattgcttcttggaaccattgtccacatcctctaccatgtttgtcagtatcatatcttggccattttgttgaaactttcaaaaacatcatctctctcttacatatacaatttttacccttcaatgaataatcacaaactggaaatcaataggaaagctaatccaaatgtattctagtatcattaagactcagtatacagttaaaggcattggctgtgctcataaatttatcctgccaacaaaaaatatgggcaagtttccctactttgattttattctgcctctatgacctctgagatggagatccatggcctagagcagaaggaattaactatgctggagagctttcatccctattgagatctggaatggatccttcttgagcagtgcttggcatatactagaggctaatacagatttgtcaaataaacaaatagtattaagtaatatattttttgaaagtcagaaaacttgcgtacgccaatagaaatgattatttcctcctgggctgtaaatctatgctaatgcaatgctaaagcttatagaacagtatgaagaataaacttgaaaggaaatgagaggtgggcaatagatagagggggttacagatcaaaggacaatttcccctctgagacaaagcaggtaataagttgaaaagaaagtgtattagtccattcttgcattgctataaagaactacctaatactgggtaattaataaaggaggaggtttaattggcttatggttccacaggctgtacaggaagcatggccagggaggcctcaggaaacttacactcatggtgggaggagaagaggaaggatgtacatcccaggagaaagagtgaaggggaggtgctacatagttttaaacaatcagatctcatgagaactcactattatgagaacagcaagggggaagtctgcccccatgatacagtcacatcccaccagacccctcttccaacactggtgattacaatttgacatgagatttgggcagggacacaaatctaaaccatattatttcacctctggcctctcctaagtctcatgtccttcttacatttcaaaatgcaaccatcccttcttaacagtcccccaaagccttaactcatttcatcattaactcaaaagtcctcagtccaaagtctaatctgagacaagggaagtcctttccacctatgagcctgtaaaattaaaaacaagttagttacttctaagatacaatgggagtataggcattggataaatgcactcatttcaaaaagaagaaatcagccaaaacaaaggcactacaggccccaggcaagtccaaaacccagcaaggcagttattaaatcttaaaggtccaaaataatctcatttgactccatgtctcacatccagggcactctgawgcaagggatgggctcccaaggcattggtcatctctgcccctgtggttctgcagggtagaaccacagtggagggctagaaagccccctccactgctttcacaggctggtattgagtggctgcagcttttctaggcacacggtgcaagctgttggtagatctgctgttctgaggtctggagtagccttcttctcacagctctgctaggcagtgccacagtggagactctgtgtggggcctctcaygccacatttaccctccatattgccctagtagagattctccatgaggggtccaccccagcagcagacttctgcctggacattcaggtgtttctatacattctctgmaatctaggcagaggctcccaagcctcaactcttgccctctgtgcacgtggcttaacaccatgtggaagccaccaaaggttatagcttacaccctctggagcagcagcctgagatgtatctggggcccttttagccacaggtggagctggagtggctgggatgcagacagcagtgtcctgaggttgcacagggcagcagggccctgggcccagctcacagaaccattcctccctatgggcctgtgatgggagaggctgccttgaagttttctgaaatgcctttgaggcattttccccattgtctgggctattaacattccatctttacctatgcaaatttctgcagcttgcttgatttcctccccagaaaatgggtctttattttctaccacatggtgaggctgcaaattttctaaacttttatgctctgcttccctttttaaaaataagttccagtttcagatcatctctttgcctacacatatgagcatatgttgttagaagcagccaagccatatcttgaatgctttgctgcttagaatttttttccaccagatacccaaaaccatcactctgaagttcaaagttccacagatctctagggcagggttacaatgcctccaacctctttgctaacgcataacaaaagtggcctctgctccatttcccaataagttctyatctccatctgagagcaccttagcctggatttcattgtccgtatcactatcagcattttggccacaataatttaacaagtctctagggagttccaaactttcctttatctttcttcttctgagccctctaaactgttccaacctgtgtcccttacccagttccaaaggtgcttccacattttcagctatctttatagcaatgcccagttcctgctaccaattttctgtatttgcctgttcttgcattgctataaagaactacttgagactgggtaatttataaagaaaagaagtttacttgtctcatggttccacaggttgtacaggaagcatggctggggaaacctcaggaaacttacaatcatggcagaaggccaagaggaaggaggtacatgttatgtggctagagcaggaggaagagggtgaagggggaggtgctacacacttttaaacaagcagatctcatgagaactcgctcactatcatgagaacagaaagggggaagtccaccctcatgatccaatcacatcccaccaggcccctcttccaacactgcagattacaattcaacataagtgggacacaaatccaaaccatatcagaaagacataactaaggagccttgatagagacaaaataattaatgggatggcactgcattaggaaaaaaggtgggagcattcctcttaaagaagagaatggccacctctcgtttgaggttgagtggttccaattatacttaagtttgtagactgagaatgggaagacaaggaggttatttactaatatctctgagtttctatatgaattaggatcttctgctgagagtaagagagtgtatgtcaagagtggttgaggatarcagtgaagttttggagagtaattgagtagaagaagatgctgatccagtgcagggattggtggacttgacagtttagtacttatctattcacaacttacaattctgtcttctttctcattggtttaaagttaagattatgaattgataattcataggagccagacagatcccatagatttgttttgwttgtttcctgttattttaataagccaagttttaaaatgaagagcttcatatgcaaattttagatttccaggtgtaaagaataagccagaagatctgaaataattcactggagttgagcaatatttagcgtctttagacaaggcctgtattctcctttaagctcagccccttayattacccagcaaatgcatagtgtataatgcatatcactcatttgtgaggcttgtctggcctgtgtaggtgtatgaatgtgagatccctgctttaaacttcagccaatgggatttatttttgaagcatgcagtaaagccaagcttgcttgtttagccttagcctaggatgattgcagcttaatggattagtggtttttaatgtcaggtcatcagctctggtggctgagctctggatattgaggcatgttaacaaaacacatgaaacagatggataagcaaatacatacccctagccagactagacaaaggacaggatgctccttttctctctataaggccattaagcaaccgaacttattgactgattgattgattgatatagtttctcaaaattgttatcaaatatcaatcatgaaccaagtacaaaggtaaacaacatacatatccgccactctctcacagagtttaaaatccagaaagggagacaggcagccaaacaaatgtagctgtgctctgggtatgccaaggtgctatgcgtattcacagccaaggtaatggcctcgagggcttaggcctgacagtgttagccaggcaaacaggagtgggaaagatgttcaaatgtggataattgcatttgcaaagtttggagatgtaaaagcatgaagtttaggtagaatggaagcaaattacctgtcagtataacaggacaggaggaaaggttgagggatgaggctgggagtgtggcagaggccaggccatgaaggagctggtgagtcaccttaatggatttggattttgtcctctgtgtaacaggagccactaaatggttttaatttgggagctttattacatttccatttaggacaatcacccaggttgcactgtggagaatagataccaaggagtaaggctggcagcctggaaacactgtctaatgcagtatactgagtgcttaactatttgacagcattataacaaaaccttgtacattatctcatttaattattaagataatcctgtgagactggagtttataataatgccagctgtaaagatgaagagatgaaagcttagagacattaatagattgttgaaagtagcaccgtgaatgagtggcagaggtaggaatcaatctctgccttagagactcatgctcggaaccattaggacatatcaccccaactgcagcttcccagaagcaatatatgatcgagggtggtagaatggctgaagagaagtaatctactcttggaaatcaggagaatatgattgactttgtgtgtgtgtgtgtgtgtgtrtrtgtgtgtgtgtgtgtgtktggggtgggaatgggtagagagacttggtaggaagagaaggataatatgcagaatttttactgatcaattaagttcatggcttcagtcattcactgagatacacaaaaaaaggagagtcagtctgtgggagatgatacattcagtgaatgtgcaggattgaaagcccacgcaagtgtctgtagaagctgtccagcggagaagcacgatctggattggcaatagagaaccgatggtcctgaacatcaaggttcccatctaatccagggcagtggaggacatttccaggaaatatgtgtagattggaaataaaatatgaccaggaaggagcagtagtttaagaacagtcagaggcaaaaagagccagtaaaagagattgagaacaaaagtctgagggaaaaccagaaagggtatggtgaatttcaaggggataaaggccaataagagtaaacgtttctgtaatgctaaataagataaaaactgagaaatgcattaaattcagtggttagtcaagggacaaagtgatggttaagcgggcactaatcagggaaggtagaagcaaaagccagattactgtgacatgaaggatgggtgggggtgaaaagtacatacgaaattggcatttatgtcaacaggtttgtgagtggtaagaataaatgcagtgactatcaggagcaagggcttgagggagagttgttcttgtcatttgttaagaataaaggaatcatcagcatgtttacgtggcaatagagaaaagtgagtagaaaagaacgtgaaagatgcagggaaaaagaatatgcaaatgatagcgatctttgagcaattgggaaggatatcgtacagagcattggagggagattaattttaaatttaacttccccatggtaatgggaggaatgagtaaaaaaatgtgtagaagcctgtgaatgtgtaagttttgtggcaagaagttaagggaatcctgcataatgaaggaattcattctgtgaagtcatagaggccacacatgtcttgtttagacaggatttaaataaagttgatgtctcaaggggtagttttaccaaattatatgtaattcatatgtcattgtactcaccattatataactcaatgcaattaatttttatagtaaattcttgtggcagaagttctttactgatttgttgctgaaaattagctatctcaaaatgtttccaatacgttatttatcagtctcactctgtgyctcccctctaccacctcaccatcatgccccagcttgttttgttttgtttttaaaagttttcttcatacatgttctggaacaagttcctgtggtttgttcattccggcctccttatcttgccatccygttgcatcctgtgttgctggtgaggccttgagtcctctgctctgtgaaacacagcttcttctaatagatattcctaccgacacactctcattggttttggggaggtaccaccccattttgcttctaaggtcagtccttgctcctggctagttaagtgccagattttggatacaccatctccttccacactttgaaggtaatgttctcatactggggtgcaccaaatggtggagctccagaaatcagccactcttctgagttactagtctggtgctgctagttcacttgtttcctgagttagccccctttacctactggaatgcatctggtcttctttatgctccagagtttggtaccaatgcattctgccctcagagaggagcccatttttatcccaggatgaactaattctttggggtactaataattgcaacattcattctttcagaaacgatgagacatgctgtagtaaattaagctgccccagagaaaacaagctttttatttatatacccataaacatcaaaccctatgttccaaacctgctaatttgtttaatgggactccctggactcatcactaaatttgggagcacatttttcttttattctcctgaagctcttgttctctctagccttcttaacaatctgtttaaggctggcattgtcatctctgcccctcataatgttcctttaatagtacttctgccataatagtattgtgacctaaccattgaatctaacttgctgcagaatgtattatcattattgtaaggtatttatctttttaaaaatggaaaactatttattaatttaaaattctgagatttcaaatacatacttgttatttrtgagaaagtggctgtgtttggaagggccaatacaacaagttgaggacattgtgagagtttcatttacattaactaatggataaaaatggccttgaaagactcacaaagagggcaggagagagagtaacaggttctgtaccaagttttttcacaatctcttccttttaatcattacatattgtcttcctttggcaggtgaggaaatcgagctgatagaagttaagtaacttgcacaaaataacatggctactaagtttctgagccaagcttaaactcacatcttattaattccagagcaagtgctctagataaactagtttttcttcaacatgatagatattagcacttgttgataaaaacatcttcaatgttatctaacttcagatgtagtcagcagcaaaatcactaatgctatgcaaccaaattagggaaatttttttttgcagaaatcaatctttatttaaaaatgttatagtttgtgaacccaaagtaaattcaaagttcttttttttttttttttttttttttgagacggagttttaattttgttgctcaggctggagtgcaatggcgtgatctcggctcaccgcaacctccgcctcccaggttcaagtgattctcctgcctcagcctcccgagtagctgggattacaggcatgcaccaccacgcccagctaattttgtatttcaattttagtagagatggggtttctccattgttggtcaagctggtctcgaactcccaacctcaggttatctgcccgccttggcctcccaaattgctgggagtacaggcgtgagccaccgcgcctggcctcgaagttcatgctttaaatcataatctagtgaagagatttctatttttatgtttttgcaataagtaattaggctttctggaatatgctaaagactggaataaagaagagtagatgatttttaagagggtctcatcaacaagaattctgtgaaccacacacaagaaataaactttacccagtgcctatatggagtcttttgtgtccaattgtaacaaacaatttgaacttgaaagaatgatttttttttttttaaagaaactactaaagcttaaagaggacaaagccatgaaagcacagaaaagatgacagggtctgtgtgtggggttacaagccaggaaaaccttgtattggtaagactgctaacagattgctcaggctcctaacttaggcttgacttggctaagcttcagtgtgagtgggagcctaactctttccagtagtctgatttcacctagttcattttgtgttgaactctcataatatgtaataaatgtgagtacatttttagtactagtatatatagtatagtagacatcaaaatatctagaatatttgagtaaatacaaatatttattgtgttcattcaattttgagaaacttctgtagttcacctgtgtagtcaacctacccaagtgtctatttgatagatgtctagaagggtttatcacctacagtaccagattttcaggctctccatagtcgactgtgtcctctgcacatcaaggtagaggtactaactccttactcctgagcttgattataagcaatggttcaggaaggtatctagtagaagaaatggtctttcaaactagtgtttaacaaaaaattctacaatttcatatatattaatatgtatttggtgaaatagaaacaagcccaaactgttaccaagacaaatccctttttctttccatgaaaccttttttttttttttggctgctcggtgctgcttgttattatttttcattttcagcatgtatctgatgatcatgccagcctgattgcaccagttagagtgtggctgcccttgacctgattggatccatgtggcattcctttaaggagccttagagttgaccttcctcattctcctggctataatacatcatttccaccctctgttttggggcatctcctactgtggagaggctggcaggagggagtacctactaaccactatggagaccaaatgggtgggatatcctctcctctttggaacagtcagtggtaattatgacataccttgtttaccacctgcacttttctgaaactttcaagtagaggctgctccaggagtggcaagcagaccagtttgctcttgccatataaacttttctgtgattcctactttcttggggctccattcctcccaccagttccccaagactggccttctagccttccattaatgctgttatctttccaataaattttcttatggattaaggtagccagagcctgtttcttttgtttttgatctatagccctgactgatacatgatcttaaccataatgtgttctgagataataaatgtttaaatcatctgggtatcaatattttataatattttaggtataatattatctaataatccttggcccagatagtttttatactgaaagctggtataaaaatataaattcatttcactgatgcacaaacacaaaaccacacataatttcacagaaaggtcatgtgacstacttctaagaaaagattataatctgagataggaaaatgcacctgctgcaaaaataaaaaaaaaatttcatgcaaataagacagggcaaaaatgagttaaaaattgggcaagtgtacaatgactagctgttttcttaaataagattgctcttttctttcccaaaagatggaatgaaggggttaatagaatttagaacagatactttgaagaaaagaagtaattctctatcctacgatggaaataagtacaattctataggaatctgattgactggtttcatcttcaattcctatagattgagttgaaggaatacaagatacagcacaaaaaagaattataaaaaccatattcaactcagtactgtgaatttatggaaaagagaagccataaaatgtgtccaactagtgctctcattatttaagttaaatttggtgccttcattgtaaataataaaaagtttattattacccatatccatgtattgttcaaattcctcatttattgtgacactaggttttttttctccctgttgcrgttttagaagatactacttggcatcatcagacttttgataaagtgatgagtcccaaagcttgattggaatggtttcaagaaaggattggagaagaaaatttgaaaaccatgagtataggcaaatctagtaagatgctttactatacagggagagagagaaagagggtggttgctgaataaaatttttttgttttgttcttttaagatgggagaagtaatagattgtttgtatgctgatgaaaaagaactggtggagaggggaaaactgtagaaaaaaaatgctaaaatgatgcccttgagtaggcaagaggagttgagatttagtataaattggagttagttttagacaaatgcatatagagttgactcacaatgatggagaagaggcaagatatacaagtgcagatgaggttgttaaaagggtctagatattgcataccttttgatgggagcttgcatatcttccagttgcttatattttcttactgaaataggaagcacagtgtcagagagacataaagatggagggggtgtcagatgtttaataggagacaaaagtatttaatagaatttgaggtatatgcatgagtgaatggatcagggatgtataatatatttgccattgaagataaagatcatggatataaagcaacgctggccagtatggttatgggattttctccagacacattcaaccacacaggtaaaaggacagagtaggtggagctctgtgatttaccaagctctgtgattaccaagctcatgattttcccaagtgagcataatgaagcacaagagagtcatggtagtttgaggtataaagatatggctgaatgcaataaacaaccatgacatttaagctggataagaatggaaatgaggacatgaggagggaaggtatattgaaaaggtggttgtacaatggattgtagatgtcaggggccaagctgagctggagagagctgtgctgtgctaccatgcttcagaatagctgattatgacaataaaccacaatgaaatagtgctctaacatttaatcactcactgtgatagtataagcaagaagctaaaccagagaaagttctgaccactgtctctaccacttcccacttccaccccacccatgcaccacctctgtccattttacccgtgaaacagtactggatatctgagggtcaagtgaatcaatacatgtggggaattgctttactgctgagggagtcttgaacaaaagtctcctttagttttatatactaggggcccagggaaaagggtgaaaaggaaggggtaggagtaaaaaattattgagctagagtggagaaaagtgtcttcaaggttccccttcagctcctccaaatgataagttcttagcagaggttcctgaaggccttcttgctgagctaagaacacggatatgcataagagcatggccagccctgggggcttgagtctgtgactgcaactcctttcagcaatgcactagctgcacaccaagtctggtatgaggaaggtagttcaggtctgccaggaaaagtctttgtaactgcctggggttaggcctgaaagatcacagtaggtttttagccaaaacccagattcctcagtagaccctgatgcagcttaaagattgttggrcacagaatgggagttagaaaaattaggaaatgagatgcttgtgattgagatctgcagaaagtccagatattggtagtgacaagatctagggtctggtaatgaaaatgaatagtcctaataaagtggagacaatcrtttaagacaaaaggcaagatcatatctgtggatattgaaatctcaaatagttatgacaagaataacactggaaggagaaatggtgacctaccctttcagtgctaagatttaaaaattaatctcgtatgtctttttttctatgagaaataatttatgaaaactctattgatttcaaatcaataaaaatgatggatttgtttcagaaaaaaattgtttataacttgtaagatctgtaacttaattgttttctcttactggtaagggcatgttcatgctaacagtagccctatagctgtggttacttatcttaattacagccaagatttatttcagcttgagtgttttataagcagattagaattttaaaattttcacagccagtcttcttgcattatactctttttaaattcaagcatgtwtcatattataagaagctaaccttaaattatagcccttgttttgttaaatattcagtattctaggaatttgaaattctcaaatgtagtctttaaaactctgagtttatctgataaggattttattattattgttatttacatatgaatacaggaacaaaatgtgatttaagtaagtcatggcctagaaagggatttgtaatgtcttggccctatttaagaacttttacccatgcctcatgttctaggatttctacttgatccagcttggaaatctgaataactcatgatattgggaaatttccatggctgcattttcttcagttccttgcttgtagctcacctttgtctcctgtttttcttgtaggtttccagtatatgctttggccatataaagtaataaagcaaataagttcmtatcgtttaatcatatagaaaagcccagcaagaatccattgtccaaatcttgtttgattaagattgattgacagttttatgtaattggatgacatttttaagagaaaatcaacagaacattatcacatggttaaagcctactgccagaaacaataaacttggcttacctatttcgttagagtattattttgatttattcactcatgtatataattcactttcacagttgatcccagactctgtttttatgaatggcaactcagagaatttaggtagcttttctgggagcaaggttgatggcattggtgtgggttggggaaagcctaacagtattaaaagggagaatgatatagaggttgttcatcccatgttcagttaccgatgtgttttcaccaaaaccatataatttaaatgtctccttttcctggaaaatatgaagcattgtacaacaggtaattttaataacaatgtaacttaggctgcttatgattgacatcaacatcacatgtatataatatgattgtaagaatttttaaaaatgcatcattgggataataaactgtaactgacatccttttaaactaaaagcaggtgaaagcttgccagtgttccactctctctgacttaccattctaagaataaacacatacagtggagtgtgcggggctgcacactgtggttttatctacttccttgctagaggaaagcactgttataaaaacaagtaaaacatgcaaagggaagtaatttaataagtaattttacaataaaagaatggaactataaacctgcttttcttggacagccttggtgttatccaatttgccctcttactgagcctctctactggctggctgtaaaggacatggtgaattaggatcagaagtcgatggctgtgtagtgcctggttttgaaatgtttggagaacaacataagtagtagctgatggcaaggcagagggacgcagggttgagtgggcactgcagatgccaggatgacccagtttaagtgggtgtaagcagtgaagtaagcaacaaagttgggcaagcactgaaggtgtagtttgtgtaggagacagatgtcagggctggggtggggaaagggagtatctgtaccacagaattacagcctgggtcagttagtgccttgcactgatgtttgtgtatattttgtcccctcagctagattttattactctttgggggtggtatccttgtttataattgttcccttgagctgctgggcacagttatggaacaaggtgggttgttgcatgaggatctcttggaaagttctcctggggctttctggccccttgaggatggtataaatgctagtaggaccaggcacactctctgtcttatcagacacatggaaaagggcacagaggaaatgatctgttttagaatcagagtgtgccttaatccatctaatatgctggtgtcattrtttgacttcctggactgtaaacactgcccttctaggctcctgggacctttctaacctttcctcgtctgataactttgtcaatactcaacattttcttgctcaatccaggggcacctgtctaattctcctagtcccagctggctctccttgaacttgatctgtcatctgatccacagtgtctaggttttggattatcctggcccgtctttcccttgagatcccacatcaagataagaaacactgccttgagcctataggggttgaggggaatttgtagccctctggatatccatcttaaaatatgccaaataagtatattttggggtaaaatatttttatttccttcaagcattatgcctgacaactaagatttgattgtagtaacttagtgctctgttggatagagcactgtcattgtcttaatgagcattatataactgatttaaattctattgcacagtttattaaatcgtatctgttgggtaggttcctgcctttgaggcatgctgctaacaacatgatggaacatcttatttttctttcaactagttattttcatcataaatttatgcatagtattttaaaaataaactgataattttcagataattatattagggaagtgacagctgcattacattctatcctttgcttgaaaagcacagtaagaactaagacatttagatgttttacwtaggaaataatatttttggcattattaaaactcacttctatgtattaatttaaaaatttttatttttagggaaacaaaattgctattcaatttggcagaaggtttgttttgggatttctggctaacagaatctttgctttaactttggcaaggctgtttgagaattagcttcatattagggacccttcagttcctgggtcattgttgaaactcagttttagaactttattatctttatgctattctgaaatagggtcagtgatcttgatgtctccataagggaacttattttgtcaggtaatgttttgtagaatttatacataattttataattttactacatgggaataagtgttaatactaaaaaaaaagtgaatgattatgaaggtgttgtaggcacattaacttgtgttgctatttgtgcaaatatccttgactttataggtgcagaataatacccctacccccaccacaagaccctattttattactggatcaatagtgacaggtagggtttttaaaccagaaagtggtttttcttatgtttttgctccccgtagagaaaatattttttctgagggactttttagttgatatctctccctatacatgcagtaaaagcaaatatatttttcaaaaatgttaagggaaagtgtaggggctgtaggctcttctcagcgtgaaccctctaagggttcactgaaaaattagtgcaattttaattatgtatcagatgcggagctcaccacaaaggacgaagctgcagataatgtctgacccttcccagcatagtttaccctgcctattagtttagagcctagaatcaaatgcctccaaaacagacaagttaaacaattctaaaaaatattacagaagtggtttataaccttcaaacaagtagcaaagacagtatctgacctgcctgaccagttttgaccaaatgtctaatttggaagacatttttactttatcaataattttaaaattagctttatttattaaagattattaaagacatgtgaactaaaaggcatttgagttaaagggttttttttttctttttttcttttttgttttttttytttgagacgagtctcgttctgtcacccaggctaaagtgcagtggtacaatctcggctcactgcaaccactgtttcctgggttcaagctattctcttgcctcagcctcctgagtagctgggattacagacgtgtaccaccatgcctgactaatttttgtatttttagtacagacggggtttcaccatgttggccaggctggtctggaactcccgacctcaagcgatctgcctgcgtcggcctcccaaagtgctgggattacaggtgtgagccaccatgcccagtcagctttcttttttaaaaaatttttaataaaatgcttgatttaagcacttactttttctttaaaccaataaattagagcccttttatttattttagtagtaagacatcacatattaccagtgtaattaagtagacatatagacacatagaagcagatcttataaatttgtgatatttttaatttgccagttttcaaggctttttcttcctactttagactgtcaatttcttgattatctgtttctttgctctcagttattgttagctaggcaaccttaaatttgcatttctaaaggaacagctaagataaaacaacatatatcatttgaattttgatattttgaaagcatagcgtgaagacattaggcctgaatattgtaccatcacttgttcaaaccaagggaaaaaaatcatgtaagtaaattttagttaagaaggtgaggaaaagcacctcaaataaaggtatagcttataaatttaaaataatggttaagagtttaatgtatgcaagcagacacccttacaaatggagagttccttaaagatgtcaggctttttttttttttttttttttttttagaaaaaggcattttaagatagccagctaaatgccagaaagttgtaaaatggctttttaacttagcttatttcttaattagattactggttttagggtggagccctttaaggaactcagcctaagaaagcagtcagtcttcagggcctaaaggatgcttttcttatccaaacactcaaagaggagcaccctgtagtaataactgttcactgtaagcaactgccatcagccattytaaaagtgtatttctcacctagccatgacacataccaaggttaatttttttcataaagtaatttctggtaccccccaaagccaagaagatcaggaaatgcaatacaaaagggaacagaattttagatctgagataactccgtccatttacagctttggggattccctaaggaaaaatagcagttactaccaaaaaggaacatgtggcacctttttctgttaatttctctttttttttttttaaggcatcaagttgttagaatttactatgtatgtgtctgtctgtctgtctatctctatctatgtatctatgtatctatctatctatctatctatctatctatagagactagcctaaatataggttttaattaagtcaacttttgactatagagctcttaaaaaatcctctcaaacctcttattaccagaatttgccagggacaaagagttgatattttaaatcacacaactgtcaaaccagaaaggacttgttccctggccaggaattgaacctaggccaccacagtgaaagggcagaaccgtaactcctggacacagaatggagtgtctccgttgttcttcccagaaggaatgtaaagcaggcacttttgaccttgaataggattttaactttgttttaggtcagatctgctcsaaagaatagctataacattactttgtgtccctttaatttaacctttccaacaattgtttagaataaaagatgggggtctcgctttgttgcccaggctaatctggaactcctgggctcaagcgatcctcccgtctaggcctcataaagtgctagggttacaggcatgagccaccccacctggcccaatttgatacctttaatctgagaaagtttttagggtaactgtaaatcttgtcggcaaatagaaggtggaaaattattaaacattgaaaggatacttcctattaatattctctatttttttatcctcaatatttatttctactccagtattttttgtttgttttagtaatctatttagagtaacaataaagcaggtgagtgaaggagcacaaggaacttcatccccaattaatctgccttttatcagttgatttttcagtgaaacttcagagggcaaagtggaagggtccccttggctccttcatgataacctaatctgatttgtgccatctgcggcttctgaaaaaaaaaatctttagtgggacagagaaataattaacatcttccatgaggtttctttttcctgtgaagaccaagtatgattctgttttgggaacattctgtaattcttcatagatttttaaattagaaggggagtgtcttagtttctcttatttatcctcctcctttcagaggagacagcaagacccagaaaagtgaagaacctgcctgaacatggtcagtggcagactcagaagtggaactcaagccttttgcttgtccccyccacgtttttgatgcagagtttttatagctcctcaagggaggaaggaacagaagggaccctgcagtccaaggtcagtggtttagaaagttggtagttgagaaggatccatgtcacactccctgtttcctgagctacccccaggaaayacagagaagagtttactcagtgatcagagagtcaatggaggttttctgagtcaggtaaccaggattctgagtttgtgttttttctaaatctgggttgttgatggagaagtagactggattttattaatacttgcaagacacagggtacatttttttcagtggttttctttcccttgtttgatttttataaaggtacatcatagtttgaccttctaaaggtacaagctgaggagtacattattcatcaggggaaatttttctagggcatctgttttcgaaacataggcctaggattgtgtgggtcctgataagcaaaaatttaaaaaaaaaaamaaaactttgcccttgtcggcattttggacccactgtttttgacattttttcaaaatgcttcaacatcacattcaagtctcagtgtaaaaggggctatcattttcctttgagttttctcactgggcttttagagtttgataggaaacatggtgatagttgcaactaaagagaatgctaagatgagaaggaaaagagacacattggggggctgagatgcgcttagagctccatggtctcgtgggaatggatttaaaccaatggttcccaccgagttcttagtgctgtcaagttctgcaggtcagctggtcatcacaggctggatcatgtattttatgtgcactcagcattatattcagaacttgaaatagcagtgtgaaaaagagatagttgctttctataatcagcttctgggtatgcatttctaaaaatagctttgagggacaaggtcctggactctgtggtttctagtttctggaggtgggggtgaggaggaaggtgctggggtcctcaggacttatttctaaacccttgctttgctgtacaaaaaggtcaattttagtattcactgggatagaaaagtgggtattgggagtcatttaaaaagtctaatgaaagttgaaggcgccaggggaggttctcttgcaggagtgggaggcaacaatttacaattccttctccagtcctttttgccagttctccagcagttctctgcaggggagcctgggtttctttcaagattgtttcaatgttaaattgacactaaatcaagagcacagtaagtcccaacctagtctttttaagtgaagaaaattttgaaggcagccagggctcctgtggggagtggatgcagaatcaaggaggcagcaaataaaaccactgaagagggtgggaaattggaagcagaaattaaaaggcttttacatttctataaaaatatgttgtctgtcttcatatgtctttttctcactgcatcttctagtattatttgttttacgtggtgaagagcttccctagtccaaaagaacaaacattacctttaaaacattttctccatgctatgttcctttatctacctgcacagcaccttgttggctcaagctctcagccagtgtcttcgtgctttgcaacacacctgagtcatatattcatggatcaatgaaagacgccgcawggtatcttaaaaggatgctaagaatcagatcctgacttgaagtcatggtgctgattgatggtgactagatctctttttggtaaaatatagctaatcatgtcactcagttgcttaataaaactcaaaagcaatrtacaggacagtgcatcatggaaaagattattaaatataagtgtcacttaattttgttatgcagacagtagttgcgatctatctacgttgcaagataaggaaagtctgtttgactttttaaattgcatgaaaccagaacttagtacttagtgagaacttagttttataggaaaaggggaaaataaatctcattttaaaaaagaattagctgcgcataaacatgcatatttatgtacggcagaatttgcttaatcacaaatgtttatctctaaaaactgtgagatattttaatgctttagaaaaggaagtatattatgggtcattttataccatccatttaggttacctctttaagaagtttcatataacaagtttgcagaattaatgttgctaggtagagaaataccactagctcttcaaatattttgtggcttgttgtttcaaaatgacccctaaacaaagagttttggaaactgttaaaagaatcataacttcttggtttaaacctaacaaaaaaggttatcatgggcaattcagcactgattgttgaaatcactagttgaaagtaacagattgcaatttcaaaaaatgtcatttatttcataaatattcattgtttgccaatgtgctgagaccttcgtatggtcctgggtgctagtccatacccaacaaacatgtaaattaattggtgagaaagatttgtttctttgtagtggagatacaaggtgcaacagggatgtaaaggtgaggtaaagagtgatgttttttgccttcatcattcgacatcattctggatggaaagaccattagcctcctgagaatataacacccaatgggttctccttgcccgctgcctagacagagttgatttattaagagagaagaattgcaatagagaaagagtttagctggctgtatgggagaccagagttttattattacttaaatcagtctctctgaaaactcagggataggggtttttaaggataatttggtggatagggggttagaaaatggggagcgctattggtcggatcagagatgaaatcatgaggagtcgaaagctgtcttcttgtgccgagtcagttcctgggtgagaccagatgagccagcttattgacctgggtcatgccagctgatccattgagtgcaragtctccagaatatttcaagcactgatattaggtttcacaacagtgatggtatccccacgagcaatttagagaggttcagaatcttgcagcctccagctgcatgagtcctaaaccataatttctaatcttatggcgaatttgttagtcctacaaagtcagtctagtcccaggcaggaaggggatttgttttgtgcaagggctgttatcatctttctttcaaatttcctcccaaagttagttcagcctatgcccaggaatgaacaaggacaacttggaggttagaagcaagatggagtcagttaggtcagatctcttttacactcataattttctcagttataatttttgcaaaggtggtttcaagaaggcttcagggcatgtaggagacaggaaaggatatgggaggatttttggttgggtcttgaaagataaatgttttccagagaaaagtattatgggaaggaatttcagaacaagcaaataacatgtgcagaatgatgaaggcaaaaaaaatcactcatggtgtatttgggggaatggtacacagtcctgctgtgttttctgttgaaagtttgctctcctttcagcactcacagagaaaacaaattctctttgtgtgtgaaaatagaaagacaaggaaatagtcttcagttacctactaaacaggatgacttcatatttattatgtagttgattctggtgatgaagtgaatctggaaagtgttataaagagaaaactaaaataatcataatactgtatggaagggtcaggccccttcaggggaaggctgagtacagctttggtatctatctagagcctgtgagtcatgagtgaatgagtagggaggatagtgttttcaggtgagatttgtgtttctttcaaggcaaaaacacaaagaatgaagtttagtcaagtgagtgatagtggaacaagggtttcataggacagggtagaaaggaataagtgaagagagaaacacacgagcattgttgggggacaaggcggagattggatagtgtcatcctggcagcttaggtgatgaaaagtttggatcccgggtaggcgtatggtgcctgagagtcccccaacatccaccctgcttagagtgtctcagcaaatgtcaactgtgtcattcatagtaatcagggctatgtcttctattcctggtaattccatgcctcccacttacttgctctttctgactgttatctccctgcccagctttgccctgcagaacccgcacaactcacattacctgggctagcccaaggcttccgtttttccttcaaggatttttttttttttttttttttggaggaaggataattgggaaagaaaaaaaaaattagtggcctcactattcctgcatccttttttgctttgaatcccagaaagtttaaagccaaatttgtttcccagctcaacaattctacaagagcttgtgctttgcatttctttgtgcaagtcctaaccagacccttatttagttacctatggttatttttgccttttcttgattttctcattcctcagttttgggctttggtattggagctatttttaaaagcgctctgaagcacttttggaatgtgatgaaatttaataagtaaaaataatcaaaaacctttctaagtttatgagtcctcaggtataatcctcccagttctctgctttggagcacattcttgattcctcgtcagtcggtcaattcatatgctcttttgtttggtgctttttcttagtaactcttagcatccacatagcttccaataaaaaagtcccccatcttgttagaaacaaagaaactctttgtttcttcccagttttcgcaagaatccccaagaattttttttctcctgaaattatcactgtttcccatataccaaaaagaataccttgccttttttcgccccaaaatctattttactcctaagcataagtcttgttctctatcccctatctccagtgaaatgaacattttctgtttccagtttttcatgatttggctggcctgctttctaatctctagagtggaggtaaaggaggcacagaatcatctctgtaggggtcattttctcttaacaaaggttggttttttcaaattataagtagcacatgaaatccaggaataagcaaatattataactgataaaactgtgtttgaagtatgctatctgatctatgaaatgcattttgtactgtagaagctctacagtatttgaggatgaaacttagtagtgatgttcaagttcagaatgattaatakaaaatgtcaaagatgtaacaatattttcgggatccttgatttttcttttgtgttaaaatggtgtgaggtggttattgccctgtattttgttacatgactcagtggtgcattagtcctttgacctcatctgtgctccagccttcattaggagtcctgaccactgattgtcagggcagcacacacacagccaactagactgttggtctggccctgaacttgggtttttttcttttggctttgacccaacatgccaccatatattgcttattcaaattggcagcaaaggttattagaatcagcgtttctccctaataagggttcttaatttacagttgagtttttggctttgtcattcyctgcttaagcttgtcttaactttcactttttgttatttgaggccttgactaacagcctgtattgctctagcatcttgaattctaacattctagatagtttcacaaattcttatgggtcatatagggagtagaaaacacagtcctagactctttgaagcctttgcagtcccagttccaacctggttgtagagtcatgaaattcyggtcaacagcctatagagattttggtgtattcagaattcaaagcgaggcttctgggctttgttaacctatgatttgtagtttgctgtaaacgtcaaaactctagttttctaaatcaaatatttatttatagtttatgtactcaatttaaccaatcttttgatatttatatagccatgtataatttttatagacttacctatttaagtcagttgtcttgacacatattttaaaaatgttatgaaaaaatgtacacatagaaacctatttatttaataataattttttttgagatagggtctaactctgtctcccaggggggagtgcagttgtgtgatcacagctcactgcagccttgacctccctgactcaggtgattttcccacctaagcctcacaaagtgttgagattacaggtgtaagccaacgtgactggcggaaacctatttaaatttataccaagtataactgctttggaaatttaaaggtggctttgtttaaaagtgaaactcttgaccacttgtatttttacaaatgactgaagatagcagaatttcagcagaagtaaagtagaccatatcaaaaaactatactgtgaaattcgccccatggaagtcactaaaatatttattgtttatacaatacttttttcaccactgaatagtctttgaaatattactcactaaaaatgtctccccaatgaaggattattctaaagtgcaattggcttttttttctcctctcttcagtcaacgaggatctataaaatggtaaatattcaaatgttcttcttgtaaaatactatatatttgcctgtctcaggcaagtatagaactctgttggcagaagtcagcttctgcttattaagtaatattgctatggcttgtaaaattgggaagaagcatatctgaagctgcagcattcctttgatatatcactgactgttctgcctttcagagttattgaggacatacttaagtctgaatcagggaataatgtcagagaaaataaatatctacattttggcagcagtttaaaataaattaaattttagaaatgttcaaagtcacacatatgttctttgatttattcctttttattaatatataaccagcatgcagtgttcaaactgaccttttgaggtttggattatcactctggctaatttttttgtagtcttatgccaattttgtccaattataattttgccaagtaattaataatgtgaaagtgactttttttctcgtataagaataatgtgaccaagacatttaattaaatgtatctcagctcttcattttattctgaaatggctgcggctaaatatcaaggataccttttcaaaaataatgtccctgaatattcaggaaaatgcaattaaatattaatggcatgtacaaaatcttaagttattggcttttttatttttaaattattacatttctttcaccgtcctaaattctcagacctttctcagttttatggctgttgagctatttgggaattattgatagtggagtccttttgcctaagtaggagggagtgggtatgggggagaggagaaatttttatagaagacttcattcatatcattaaattagactgatctccagtctgagaatattctcgtattcacagttctgcagataaccaagcatgtgctcttggacaaattctatgagcctttttgacttttctatgttgagtctccacaaagggattattcccatgcaatcccttttgggagcgctattcggtaaggcccatattgtgttctaaggatgtctcattttgtatcgtttcataaaacccactaaatatcttggcaaacctaaatactgggcaaccttgttggctggcagcaactctcccacttgcaaacatgatgaccacaaaaattctaaacaaagttttattattgcatacaaattggaggagttttgcaatgaacaaataaacaaatccaagttatacctttccaaacttatttcttgtcttttcatctccatatatccactatgctttagcctccccaaataacagctagtcctggaacacaccatgttctcctttgcctttgtatgtttgcccgaaatatccaaaaatcctgtcactctctgataactatatactcagttttcctggctcaactcaaacaccaattattctgtgaagttkccaaaatttctctccctttcccaagcacagaatggttttggtcttccttttttwaaatcaccttataccttttgcagtacgtaatagattgtatgaagacttactggcttgtttacacatgtgattcatatatcctcagatctttctagcctagagattaaaatataggttcacaataactggacagaaaggcattgtctggcttcattcccaagagttggtagtcatggggttgtctcccatgaaacctattaagaaacttaagaaacctatgcaagatacataataggtttcnnnnnnnnnnnnnnnnnnnnnnnnnnnnnnnnnnnnnnnnnnnnnnnnnnnnnnnnnnnnnnnnnnnnntagatagcatttttctctcctacagcatgtttctctgatggcccttggaagccaccaaagccagatactctgtgctgcatctgtttccctccacatggaaacctgtctggtgtcctgtttaaatgaccatgctcattttgtacaccagtgtcctcccattgcctgatggggaaagtcctttcactctctttagtactttgttttgttccactgttacaaaaattcctgttttgtgctctcaataccttacataagcttttatagaacaactggtattcctcctctcctgccaaagaaatacaaacaaagcacgttgagaaaagatatccttttatttcagggtgacaacatttaattacagtgggttgcttgtatatctaatatgcatgtactgttttaaaggagacttaggagttcatgggcactatgactaaagaagcaaaaaatgaataagacaagcttcagctgagctaaactttgcttwtctaggaaatcatctatctcaaatactaagagacacatctttttgagactgtccattcagcacatatatatgtgtatatgcatatacataatatataattgttacaatgcatttactgtacaatatactctcctttactgttccaaaagctaaagtaccgtttttatacctactaatggatatcttatagatgccaaaggtactttatattaagtattttttataacatcaaatttccaaaacagaatactcttctttttgaggataaaatcccaaatatcaattcattgcctttctctcagagtcccatgatcagagtccctggatggaggacatttttaacttcacatattaatactctgagagaatattttctgctctcatgcaatagagaaaacctttcatgcaaagatacagttgttatagtctttgcatgaaagtgacactgttttaggtataaaatgttattggtgaattagcaatgctattttcatgaaaaacacaatataataattattttatcagygatgtaatttaattacttttaaggatattattgtatttgcaatatattatagaaatatcccttctttttcagagtttttttgattgacacgaatgacagtcttcaaaaaaagatacaacactttagatttttaaagaaaaggcatttcttttataatccgtgttcaagcttagattgagtaggtattgttttagaactaaaagggaggagagagaaagagagagagagggagagagagggagagattaagattcttgccaagtaattacattaaatattctctctggaggggaaaagtgtcaaataaacctagagaaattgtggaaattggtagaataaattaacttcttgtaaaatcatttttccacatcattataacatttgttttcaaatgtcagaagcagatgaaataattttcctacagatattgcttcaaggataaggctaraactcacagagcacttagaagaacaaggatacaaacatcccaaaggtgtacattaagattaaatttgcacgttgaagaggaaaagaattgcactttatgactgaacttttgagttgtttctgcatgaattttaggtaagtatacataatgaaatatggtaaagcatagacagcaatatctgccarccatatttattaagattgaatgcacatggagcattaggatgccatacaatacaatttgtcatgttgaattttaagaaatttcaaggcagattattagaaaattargacaagtcacctgccttattcttcyactattaacattcctattattgctattttttctctttcatcgctagcaaccttcatttctttggcgtttgcargcatccactaccttgaaaaccttttggttttcgttttctttctttctttcttcccttcctctgtcactctcccttcctcttctatcatgctctctctcactccatctcgagttatccagatgttttctttaatgccaaaattaatgccacttttaaattcgttatttgattttaagctttaaacacttgaccttttctgccttgtacttcacctgaactatatttagaattttgtgaagtctagtttggttcagtgggctcttctctatttaagaccttaggtcctggcatctccaggttaagtggaatcacttgctctgaacaggatgcttctcttcactatgtgatcataggcctataatggctgtgctaggaaacgacattgacttcagatccatggctcattagaacactgtacagagtttcaaaaaaggatggtaacataagtgtgtgccttagactgtttaaagggccatgcaattacagtcaataagaatatatactgagtaaaactacaggaaagtaggattttatgcatgcggctgacataatgtaattacatgcattatatatagacttgaatgaaaactcaaccgccccagcagcctttcgtataaatgggtcttgacggaactattcttcttggctcctgagaaggggtttcctcaagagaatttattgaaggggaaataatatttggattttctgactttcatgaatgtctgtaaaaagtgtctggcttacttttgtgtcatggatgtttgagtgtcgtgggtgtttgtaaagcccatctactatgatagccatgggaagtgaactatggccacctaatcagctccagtttgtcctggtgtttcaagaacctagtcctaagcccaaagccaaaatgagatgcttgggagacagaaatagggagacagttggtggaaaggatatttttagtattggcagcctaactgtagaactgtatttggtgaatcaatacatctctagtaaaaataatttgtatgaaaggtgctttttaaaaaagtgacttccacttctaaatagcatgcaggtaactcattaactaaagaggcttaaattatgtacttgctgaaaactgtttcatgtcaagtagaaccctttgattctagaattttgcatctttttatttttcatggttttttatagataaatacccagctataaacaaagaatcaggttgtttagcaatgtatattttagagggagaagtaawtgcctttttgatttggaagcaaagttaaaacaaattataatgttagctgaagtgcttcccttgagggatatgataggtaagaatgggcaataggatttggcacggtgtaggtaattttggaatgcagtgtagctaagaaatattttgatttgctttcctattgatttcttggctggggtacttggcacaaaatgaggaactcaaattaatataaatatgtggagttttaatattttatgttaaaatgccattttaaaattagtctaaaaataatgaagtctagtttgaattcactggctaagatttgtaactagtttcatgcatggtgatgttatagctctaaatcagaactcaaagtggatgaagggtatggctagctaaaaccagccagcttgtccattgctgaaaataaaatggaatagatgaaagagaagccaggtcttcactaagagttgccatttatttctaaatttaattgcttaagtctctaatgtctagataataccgtagggtatctattttttttttaacgttttgacacagggagtactattgaagggtatacagctctattaatgcccacttgcctgactgagagataattctctcttggtaaatgatggtgatcattagtatttcctgagtaagcattgaatctcatataaatagcctgaaaagttatccgatagagagtactctctgctagataagggcttgtcaacttttcatcttatagatcttaatcctatgtatgggtttgaggtgttgatggtgtcacagaacagactgcctatggttaaatgcatgccaaccacatgtgacccctgtaatggtgtttattttaattggcacttctcaaccttactacacaacaactatattggaatgcatgctttactaatgtaaaataaaattcaggagtaatacaatctacctatacataattttaaaaaactctagtgccataaattaaacattaaaaaggaaataagctattataaaataatttgcctagcaataggtaaatacccatgcaagactttaccagaggacaaacaaataccctcactatttccaagaaacttttaagggactgcactaatctcattaggattcctcctttaaagaaagtgtactgtgtcttgtcaagcctttgaggtctagatagatgttttcctcacttgctaaggcagcaggaccctttcctccaaagaaatcacatgcaggtgtataatatataaacctgtataaagcatataaaagccctcctgtgcttcctgtaagttgtaatggcttctttctgagaaatctctggtccaggggtctggatagctaattgtgtcagtggtctcttgagaggtaaaaataaactgaagtagatgaaagggaatctgtttttattagtaaggaaatgacttcttccttaaactttattttccttttttggttagaacagtagaataatttccccagtcttattactgaaaggaattgttaaggattagagaagataaattaatgtatcttggaaagatgattcaggaatattttatacaattctttattgcacagctaaaggaaaaaaaaacaccacaacaaatgtttgagtagatgagacattcaactttctaaatgctccaaggatggtctaacttcagatcagctactcatgtttaagatgaagccatttgaggacaatctttctagcatttcttccagttcaaaacacagattaaaaatttaacttgtgaatggttggttgtatgatataaacagtttttctttcactaaccctttttatatsctcttacgttgagtgtcaagtctgtcttctaattagtctttcctggagcagtgtatcatagaatcatagtctttcagagccaaaataaacctaagggatacctagttccaaatctaaatttgtaaaataagtaaatgaggccaagaggtgcgaagtgattttcttaagatcacacacactcagttgtctaatgggagacacgtgctggctacagactataacaccatctaataaccccctctcaggaggggtttgaatatttgttactacttgcatattatcgggtatcatgaagtaaatatttattctagcaaaataggatttgttttgttaactggcaggaaccaggcttgttacaggactagagggctgatacggtagacccctctgaactgactcaatttttattatatctctaatggccaattattaggcctgtgggtttaatgtggcagcctgtcatcatagtattctaataaataatgtcataatagcctgccttcatatttgtatttctactgaaaagataaatgtatattgttaccattaattggtctcaacatgacaagactctttcctcatatgttctacacctttttttaaagttacttttcttcttttaaaagcttttttttattgtactttaagttctgggatacatgtgcagaacgtgcaggtttgttacataggtatacgtgtgccatagtggtttgctgcaccatcaacccgtcatctacactaggtatttctcctaatgctatccctctcctagcccctaaaccctggcagaccccagtatatgatgttcccctccctgtggccatgtgttctcattgttcaacccccatttatgagtgaggacatgtagtgtttggttttctgttcctgtgttagtttgctaagaatgatggtttccagcttcatccatgtccctgcaaaagacatgaactcatccttttttatggctgcatagtattccatggtgtatatgtgccacattttctttatctagactatcattgatgggcatttgggttggttccaagtctttgctattgtgaacagtgccacaataaacatgcatgtgcctgtgtctttatactagaatgatttataatcctttgggtattacacggtaatgggattgctgggtcaaatggtatttctagttctagatccttgaggaatcaccatgctgtcttccacaatagttgaactaatttacactccaaccaacagtataaaagcgttcctatttctccccaccctctccagcatctgttgtttcctgactttttaatgattgccattctaactacaatgggatagtatctcattgtggttttgatttgcatttctctgatgaccagtgatgatgagcttttttacatatgtttgttagctgcataaatgtcttcttttgagaagtgtctgttcatatcctttgcccactttttgatggggttgtttgtttttttcttgtacatctgtttaagttctttgtagattctggatattagctgtttgtcagatggatagattgcaaaaattttctcctattctgtagattgcatgttcactctgatgatagtttcttttgctgtgcagaagctctttagtttaattatattctatttgtcaattttggcgtttgttgccattgcttttggtgttttggtaatgaagtctgcgcccatgcctatgtcctaaatggtatggcctaagttttcttctagggttttttatggttttaggtcttacgtttaagtctttaatccatcttgagttaatttttgcataaggtgtaagaaagggttccagtttcagttttctgcatatggctagccagttttcccaacaccatttcttaagtaggaaatactttgcccactgcttgtttttgtcagttttctcaaagatcagatggttgtagatgtgtggtgttatttctgagggctctgttatgttccattggtctatatatctgtttaggtaccagtaccatgctgtttttgttactatagccttgtagtatagtttgaagtcaggtagtgtgatgcctccagctttgttctttttacttaggattgtcttggctatatgggctcattttcagttccatatgaaatttaaagtagttttttccaattctgtgaagaaagtgaatggtagcttgttggggatagtattcgctctataaattactttgggcagtatggccattttaatgttgattcttcctgtctatgagcatggaatgtttttccattcgtttgtgtcctctcctttttccttgagcagtggtttgtagttctccttgaagaggtccttcacatcccttgtaagttgtattcctaggtattttattctctttgtagcaattgtgaatgggagttcactcatgattggctctctgtctgtttttggtgtataggaatgcttgtgatttttgcacattcattttgtatcctgagacttttgctgaagttgcttatcagcttaaggagattctgagctgagacaatggggttttataaatatacaatcatgtcatctgcaaacagagacaatttgacttcctctctttctatttgaataccatttatttctttctcttgcctgattgccctggccagaacttccaacactatgttgaataggagtggtgagagagggcatccttgtcttgtaccagttttcaaagggaatacttccagtttttgcccattcaatatgatattggctgtgggtttgtcgtaaacagttcttattattttgagatacattccataaataactagtttattgagagtttttagcatgaaggatgttgagttttktcaaagtccttttctgcatctattaagataatcatgtgatttttgtcattggttctgtttatgtgatggattacacttattgaattatgtatgttgaaccagacttgcgtcccagggatgaagctgacttgattgtggtggataagctttttgatgtgctgctggattcagtttgacagcattttattgaggattttcgcattgatgttcatcagggatattggcctgaaattttatttttttgtttctttctctgccagattttggtatcaggataatggcctcataaaatgaattatggaggattccctctttttctgttgtttggaatagtttcagaaggaatggtaccagctcctttttgtacctgtggtagaaatcagatgtaaatctgtctggtcctggactttttttgattggtaggatattaattactgcctcaatttcagaacttgttattggtctattcagggaatcgccttcttcctagtttatacttgggaaggtgtctgtgtccaggaatttatccatttcttctagattttctagtttatttgcatagaggtgtttatagtattctctgacggtggtttgtatttctgtggtatcagtggtgatattacctttatcattttcattgcatctatttgattcttctcttctttattagtctggctagtggtctatctattttgttgatcttttcaaaaaaccacctcctggattcactgattttttgaagggtttttcatgtctctatctccttcagttctgctctgatgttagttattcttgtcttccactagcttttgaatttgtttgctcttkcttctctagttcttttaattgtgattttagggtgtcgattttagatctttcctgctttctcttgtgggcatttagtgctataaattttcctctaaacactgctttagctgtgtcccagagattctggtacgttacctctttgttctcattgatttatttcttctttaattttgttatttacccagtagtcatttaggagcaggttgttcagtttctatgtagttgtgcagttttgagtgagtttcttaatcctgaggtctaatttcattgcactccattctgagagactgttataatttccattcttttgcacttgctgaggagtgttttactttcaattatgtggtcaattttagaataagtgtgatatggtgctgagaagaatgtatattctgttgatttgaggtggagagttctgtagatgtctattaggtctgcttgttctagtgctgagttcaagtcctgaatattcttgctaataaatggcatatatttttaatgttactaccaaactcactctaaacacttatggttttttaacaggagttaacatcttaaatagctggggaaatgcaaaggctgcataagcctagactgtacctcagacttactcaaagaggaactctagagatgggatgcatgcaggtacatctttggacagaagacccaggaaacagattctgagcagatttacattcaggaagtttattggaaagtactcttggaaatgatcctgcatgaaaatgggaaaagcaggtgggcagagggagaagttgaattgaaaagtaattgcaatagaggcctcagacgacccatagggagagccttggaaagaccctggaatgaccaaccctttgaacttgtcctgggatcagagaagggaaagggcttaattactggatgcagactttttctgggtagaagtatwacttgaaagaggcagctcccatctgccatctaggttgtgccaagagaaggatgcatctatgagctattagcagccaacactgctggcagctgtggcaatgagttcctggggcctgaaacggtaacctaggtgctgtatcatgggtccacccagattcacttgctttacatagtaattgaccgcatctaggaatagctctttctggattatgggtagtctctcttcctggggaaacataaaagaggaaaattagtctgacgaacttcagttctgtgcctgcagcaaaatttgaggctgcaactgacactcaggttgtccttcatcttctgttcattctggtttacactcactctagactggaacctctactgttcaaggccttacctggtggactgacccaaatccctaacaggtctgagcccttgattcctatgcccttctcaggccaaggtacactactgcacttgtgtatttaccgttaacattgggtgggagagtacaaggaaatacccaagggatcatcaggttgcaaacgtattattctctgtcccaacctccttgtggcaattaggactgaagacattacaagaagtgtgacttttttttttttttgtctcctggtttattggcatgaagagccaagagtgactagcaacactcataggctaatatataataggactttctctgaactttaaaaattgcactatctctactttaaaaatgaaaatagattcaatgcartttcaatcaatatcaaagttattttaatagaaattggtaaattgattttaaaatctgaaaagtcaaaggaactaaaatagccacaataatattttctaaatgaacaacgttagaaaattcacactgtgtgattttaagactttgtattaactagagtaattcagtgagtgtggtctaggtaaaggacaggtatataagtggctagaaaagattggtaacttcagaaataggctcacagaagtaggatggccatgtgatgttggcaagggtgcaaagacaattcattgcagaaaggtaatctttttaacaaaagatactggaaaaactggatatccatttgcaaaataatgaacttcaacctatacctcacgtaatatacaaacattaactcagtatacatcataaacctaaatagaaaatctaaaccataaaacttccagaggaaactatggagaaagtcttcaagacttttgattaygtaaagatttccttagctatgatactaaaagcaagattcataaaaattgtaaattagactatcaaatttggaatcctctgcttcttgaaagacattattaagagaattaaaaggtgggaagaaaatatttgcaaaacacatgtgtgatatggaaattgtgtctagaatatataaataactttcaaaattaaataagaaaacaaaataactgaatataaagaaacatatttaaagagacactttgccaaaggagatataaagatggaaaataagtacatgaaaagatgctcaacatcattagtcattaaagaaaagcaaattgaaaccacaagggaatactactaaatcaactaatgtctgaaacaaacaaacaaacaaacaccaccaaaaaaccactgtacctaccaaggtctggcaaggatttagaatagctggaagtctcaaacattgctaatgtgaatgcagatggaagagccactttcaaacacagttgggaaatttcttgtaaaagtaaacttacacttactgtatgacccaccaatctctctcctattcactgaaaacaaatgaaaacttatgttcacacataagtacagaaacacttgtaaatgaatatttacagcatctttattcacaatagcccaaaatgtaaactatgaaaatgtgtttcaactgctcaattgataacaaagtagtactttcaaacaatggaatactacttagcataaaaaggaattaactactgatatatttaacaacatacagtatgggaaatgaaagacatcagactcagagggttacatgtttcatgattccattctggaaaagacaaaaccataggacagaaaatattatcagtggttgctaggcatcgagaatagagtaggagttgacctcagaggagcatgaggcaatattttggggtgatggaattgttctatatcttgatttagtggttactcaattaatatacttgataaagctagtcaaattatacagtaaaagggtaaattttacagtatgtaaattacacctcagtaaaatgaaattttaaccacttcgatgggaattttattatgccccctggtggaagtgttactatcttggaactaagacctccaaacctactaagtctaaacctatgagggcgatatgcacaaatttcccaagtgtcactggcaataatagtaagtgggacaacttctactttatcccttggtttctrgacctacaaattccactgaattgrtattgtagcaccatacaatgaaattgcatttgagatgagccttgaaggagccagttgcaacaagtctataaggtgggaaggattcccagaggaaaaagcattgtaagagcaaaatattggaggcaggaaaatacacagtgtgtttcagaatccatttcattggagcactaggtacacataggactatattgagatgaaggctgcaaaggaaagttgggtcatatgatgttgtgctgaaaaggttgtatgtaattctgtaatccattcagggctttgagagacaaattggctgatgatagctgcactttagggagattggtggatcgccaggccttagtatagatttatatggttcaagagaaaaggtggttataatgatcctctgattttccatatgacaagcctgcaaccgcccaaaactttggtgtttttacctacatctatattcttttccccatctagtgccctagaaataattatcttccacactgggcaaaatttaagagctagtttaatgttttaggtaaatttacattaagattagggtagtcttgctttttccctgtaactgactgtatgtctaattatctaggcttctagcttcccctctttctttaaaaaaattaatagataaaattgtatgaacttaccatgtagagcatcatgttttgaagtatatacatatttgtggaatgactgattctaactaattaacatgtgcattatctcacatagtaatcactttggtggtgagaacagtttacatctactctcttagcattttttaataatacaatatattattaaatattgttgccatgttgtgtaatgatctcttgaacatacttcttctatctaactgaaattttgtatcctttaacaacatcttcccaatcccacccccaaaccaccgcagcccttgatagtcaccattctactctcttcttccatgacatcaacttttttctattctacatatgactgaaatttatgtagtattagttttttttgtgcctgacttatttcacttaacataatttccttctggttcatctgtgtcctcacaaatgacaggacttccttcttttttatgactgactagtatatcattgtgtataataccacattttttcttcacctatttatccactgatggacatttgcttaggttgattcagtaccttgactattgtgtataatgctgcaataaacatggaaatgtagatacctctttgggatctttattttaattattttgcatatataaccaaaagtggggttgctggatcatatggtagttctacagcagtcctcccttatctgcaggacatgttccaaggcaccagtgaacgtctgataccacaaatagcaccaaaccctacacatactatgtttttttgatctgataacttagatggctactaggtgactcttaagtgattaatgggcaagtagcatatacaccgtttgtatgtgtatacaaagcatgcgatttcaaacttatgaattgtttatttatggaatgttttacttaaaattttgactatacttgaccaccagctactgaaaccacagaaagttcaactttggagaagtggggctcctgtatcttcaaattttttgaggaatctccatacttttcccagtaaaggctgtactaatttacatccacaacaacaggatacagggttcccttttctccatcttctggccaacacttgttatctttcttatttttgataatagccatggctatggctactgcttttgctgcctgtgcttttggggtaatatccaaaacattactgcccagaccaatgttatggaacttttcccctatattttcttcaagtagttttataatttctggttttacatttaagtcattaatccactttgagttgatttttgtttatgatgagagagaaaggtctaatttcattcttcttcatgtggacatctagtttacccaataccacttattaaagaactgtgctttattgtataatcttagtgcctttgtccaaaattagttggctgtaaatgtgtgaatttatttctgggctctcctttctgcttcattggtctctgtgtctgtttttatgccagtaccatgctgttttggttactacaggcttgcagcatattttaaagtcaggtagtatgatgccttcagctttgttctttttgtttcagattactttggctactgggggtctttgtggtgtcatatgaattttgggattatgttttatttctgtgtagaattatattaaaattttgatagagattcaattgaatctgtagatcttttgggtactatgagcaatttaacaatgttaattcttccaatcaaagaacacaggatatctttccatttatttgtgtcattttaaagttctttcatcaatattttacggtttcagtgtacagatctctcacctcttagttaaatttattaatgatcattttatttatttttatttttatttattttcttttgaggcggagtcttgctctgtcatccaggctggagcacagtggcgcaatctccgctcattgcaagctccacctcctgagttcacattcattctcctgcctcagcctcctgagtagctgggactacatgtgcccaccaccacgcccggctaattttttttttttgtattttctagtggagatggggtttcaccatgttagccaggatagtctcaatctcctgacctcgtgatctgcccacctcggcctcccaaagtgctgggattacaggcatgagccaccacgcccagccatgatcattttattttttagtagttattataaatacaattgatttcttttttggatagttcactgttagtgtacaaaagtgctactaatttttgtatgtagattttgtattctgctacttgtctgaattgtttttctagttctaatagttttggggtggagtcttcaggattttcaatatgtaagaacaagtcacctgcaaacagggacaatttaagttattcctttttgatttgatactttttatttccttttcttgactaattgctttggctaggcactctagtactaggttaaatagaagtaaatatgagcatccttctcttgttatggatcttaaagaaaaagctttcaacttttttccagtgagtatgatgttacctggagttttgtcatatgtgacctttattttgttgaggttcattccttttatacctaatttgtttgtttgcataaaaggaagttggatttttaaaatattttttctgcatctattgaagtgatcatatgttttgtacttcattctgttaatgtgacatatcacatttattgacttatgtatgttgtaccatacttgcatccctggggtgaattccacttgatcgtgctgttgaattcagtttgatattattttactgagggtttttgcatttatgttaatcaggaatattggcctgtagttttccttttttgtactttctttggttttgatatcagggtaatgctggcctcatataatgaatctgaaaatattcattcttcaatttttgaagaatttgtattaggtcttctttaaatatttgacagaattcagtagtgaaactgtcaggtcccagacttttgtttgatggcagaatttttattactaattcaatctcttcttacttggcttatagctttttatttgaccaagatttatccttgaatcatcatcatagcacttagtttcagatttgcacctctatacccaatcctttctattcaatcatctactgtgaggcctccttcttgaacagagagactggagtctgtcttcattcttcattatctcaatagccttatagtcttcgctatcctccaatgtactactcctagatccaattagcaagggctggccatatgtcaggatccttttatgcaatctcatttaattctcaaaataaccccctagagatatgctcgcagatggagacacaggcttagagaagttaaatgactcatttttctatgcaatttgtaagcagctaagataggactagatatcagtagtttgactccataacctggattcctaacatctctaatgtccaggttgcagccatattgatacaggccaatacagtgcattacagttattgagttggtagtctgcactttatggagccatattctgctagcatcaagaggtacatgatggtggaagcagcctccaatatgtagatatcaggtcatgaccaactgggtcaagattatagggaaacaaactgcagcacagagcagaaaacaagaaaaaactaaaatgtgaaggctggataaatacagcagggactgagaaggagggctacaattgagtagacacactgattctgagagataatgcttgtcatactatgtagggaataagttttactgatgccctcatctgatcatggttttgagcctattatgctgttagtatgatcagcattgccccacaatttaggctttcaaatgccagaccacagtgattgatccaggctaaggaaggtagatgttgacaaatacatatcatgttaagtgatttcttttatttataaagtccatgttttaaaatatgggtgtacttttgtttgtgatttacagctgagcttcagcagccattgaaatctgacagaacgcatgaaaaaagtctcaggttgtgttgaccttccattcatataaatagtttgtttattgaacaaatgaatattaagggttattagtctttcttaagaaatgttagcaaattaaaaggttgatagattgcatttgtcttcatccttttgctctcaaagccagtgctggtgatgtaattggacattaacaaacagtaggtgttcaacagcaagaaaagtacacacacacacacacatgtgcacacacacacacagagaaggccaataccacattaaaaattttaattttcaagagctaaatattgagatattctaatatttggtagggttcttttttgcttgatattgtattataagattttcattaatataataaaatattaagaaaaaatctgattttatttgccgtataatattgttaaataaatatttgttaactcacataactttgcctttgtgaaaatgacagctttatctctgattactttttgtttttatttacctctaaactcttttttatctttgtatttttaagctttactttttatatgcatttcttgtaaataggtttttaaaactttatgaaatgaatctaaaattatatatacatttttactcttgttgcaaaaataaactgtttcttgcagaaaaattaggaattatggatcaattacacaaaaataagcaataccttcctagttcttaatattttgatttatacttttccatttatacatatatatacacacacagatatatacacatacaagtatatgtagtagtcccccttttttgtgattttgcaatttgcagtttcagttaactgtgatgagtaccgtatagtaagatatttttagagagaaataggccagattgacataacttttattacagtatcttgttggaactattctattatttgttattgtttctaatctctactattccttgtttataaattaaaccttatcataagcatgtatacctagaagaaaacatagttcagtgctatccatggttttaggcatccactgggggtcttagaacatagccctcatggacaagaggggactactgtacacacacatacttatatattgatttatcaagcaaaagaagtattataaatatgacattagttatttttggtgcttttttattaataaaatctgaattttttatcatttcacataggttatgaaaatattttcaatggcatacagtatcccacttgtatcattttttatacttctttgactacattatttccattttttgcattagtaaacaaaactgcagtgaatgaccttgtaggtaaatctttgacacatcaatcattatttctttggaataagtttctttttctttttctttctttctttctttttttttttttttttgagacagagtctcgctctgtcacccaggctggagtgcagtggcatgatctcggctcactgcaagctctgcctcccaggttcacgccattctcctgcctcagcctcccgagtagctgggactacaggtgcctgccaccacgcccggttaattttgtttgtacttttagtagagacagggtttcactgtgttagcaaggatggtctccatctcctgacctcatgatctgcccgccttggcctcccaaagtgctgggattattggcgtgagccaccgtgcctggccggaataattttctagaagtgaatttgtgagacaaaaggcatatgaagtatggtcatgtgccacataatgacattttgatcaatgatggacagcatatcccatggtggtctgatgaggttataatatcatattttaactgtacgttttccatgtttagatatgtttagatatacaaatgcttaattgtgttacaattggctatagtacttagttcagttatatgctatatagatttgtagcctaggagcaattggctgtaccatagagcctaggtgaatagtaggctataccacctcagtttacataaatacactctatgatgttggcacaatgatgaaattgcctaacaatacatttctcagaacatattctgctgttaagcaaggcatgactacataaggattttggttgaaaaaagcaaaatttaatttcttactttagacatcttgttttctgttttctgtattttgtaaatttctgtgctcttggaattctgttttttatattttattaattgaaatatatctcatttctattgatgctttcctttcaattaaaaaaaattcttaaaacttaatttttataattataagtattataaactgattattttactgttatctttagtcttcagtatttgttattatttgttgttagtcttcgtgtttctgaatggaagtgacgtaaacctgattttggcattctaatgtgttagaaatgatctagtatctcacctttggcttttgaattgtcccatttatatattatgcagtgccaggtattggatggcaacgacctgttctaggcacagaagggacagcccagacttgggtgagaccttggtggagtattagacacaaggttgaaaagggacctggccttagcggggagaagagatggcaaagagaaccaggggccagtgagccaggtaaatagcttgggttgggcataggaacatcttggcagtgtgggacatggcttagcctgctaccatcaaagtcctggcatggctggcatgtatgttggtgagtagggaaaatctataagatgcctctcttactcttcctaattgggcccaaactgaagctgttaagtgggccaggtagatccctcaaatagataattagagtcttcaggccagagagttaagtgcatggcattcctcagatgaaatcgagttcatgaattgcctcaaagaatgcagataaccaagtcattcctctgatacatttcatttcttagtcatctttttggaatatctggaaatattttcccaaggtaattacttcatttaagcaaacattttttaaaaatacatcttgagtttctttctataattcatcatcttttaattttatcagagtgaaaatttccacttactgaaagatttttctaaattttcaatacatttgtctgaaaatcagaaaactatggtgacagttgctatagaaattcttagaaatgaatcaaaacacaattaaaatggtctttcagcttataaatatattaattttactttatgaaaaataaatggtctattaaaaatattacacataattacttagcagcttggatatatttcaaaaaatatacagttaagtgaccttttaaaaagacctgctccttatattgaagaaaacctgtccattcttattctctaaacagagatgcatttcttacattacaatgtcaacttagacagttcttaaagatgtcatccatttaattcttatctctcattttgtttctaaacttctatttctattaatatatctatattaaaatgtgtaatcacaaatttccttgaacttccaaatctaatcttaaagataaatgaaattaatttattatccttcaatatacagacctgttctcattattctaatttattaacaatgatactgatttgcttctcttagttcttgaatgtttttaaagagatgtaactttttttctgacgtgaccttttaacagataaacaaaatagatattaaacatttcaatgagaaaatggaaatggaataactcgcctgactacttctgatctagaaaaacacccattgtacttcatacctttctctcactttcacctccatctatgcttttaatgtctttcaatttctcagttggtaaattaagtttttcctttattctgataatttgtttcaacaagagacccccaacttgttccagtaacttttaatacttaggaaaaatgtgactattaatattaattaaatgttttggactaatgagatgactttcaatggttatagcattttaattatgagaccagcccatgtattttaagattataactatttctcaaacctttccatagccaggaatttttaaaaactccaatatgtcaaattttcttttactttacttttggatttggatttataggtttactttagctgctccaatgaataaacaccaaatttttaatttcttacttctttgagtccaacatgaatatttctgattagtgggmagtttttctccatggaatcattcagggaacccaggctctttccaccttttgattccaccatactctggtgcctctgagttctccatctcagatctatctgctgcttaaatgctttcagcatggaggtgacacaatctcttctcaagttcctttggtgggggctagcacatggacaaacctgaatccagggtagctaggaagtgtatctctaattgtgcagccacctccccgcgtcatcaacaccatgctctgaaatagagaggggaaaatttttggtggacaattagtcatcaatgccacataaaattaaaaatgtgagtacctacctcaaaggtaatataggtgatgctctctaataatgagacaataacaagggagcattaagattgtgcagagttttcaagaacatgaccacacatgtgcagtggtcaaactttgttcaacctctcccaccgtttttttgttttttgtttttttttttgaggcagtctcactctgttgcccaggctggagtgcaatggcgctgtcttggctcactacaagctccgcctgccaggttcacgccattctcctgcctcagcctcccgagtrgctgggactacaggtgcctgccaccacgcccggttaattttgtttgtacttttagtagagacagggtttcactgtgttagcaaggatggtctccatctcctgacctcatgatctgcctgccttggcctcccaacgtgctgggattacaggcgtgagccaccgtgcccggccaacctctcccactcttctgaccaattatgctttagggtcctgttcacctcagtccccatcagatcatgtggaagacttcaacttaaggtaacgtctcctgagctccatatgcatctactactagcttcagatggactgtctcctgttttgaaggaaagacttgcagtatctgtaacttaargtgaagaaaagtcttttctcattgtttcctagttagtagctgtagtgcactatatctgaatgaggttgaaagatttctgttttaaatagtcatccttaagatctaacaaagcatgaaagaaagatcccgttgtatttttaaaaagggtttatttaaactctgaaaaaattgctaaatttagaagtccacagtgtttaactattataaaagatacaatattgcaggtggagaaactctcaaacattacctactactgtgattgtaacctatttttcaaattctaccacatcttgtttatatccattttaagagcttagtatcaggaacctatttaatatatgactaaaattgtttatgctgtaattaagctcatttcttcttgtgctcttctcctgcagaatacaawcaatcggtggttatagttggcatgttgaaatttattttattactgcccatatgtttttatgttcttattgataaatgtaaacctccctggtattgtaggacttttcttagttcagctaaagactgggttcttgtccatcccaaggccacaaaaatttagcctcacagacagtttaaagggtgagcaaaatagggttttattgggtgaaaagggagaaaaacgggtgggggaaacacctgcctggcgtttgaatcccaggtccacacaggaagacgacgaggcaggctcctccctgcttcaaatcgtgtgaacttcccaaggctccaccccagtgcgcaggctgcttggagtttctccaggaatcccctcccactggctgtctcattcccccctctaaagaagtacatctaactgtggttagattaaggataaggatgaagactgatcttaaccgcttcctgctgacagggggcgctgttttggggaaatggcagaactccctcagaggcygatctaagggttcccggcagaaggggccatcttcagaggctctggttgcatgactgtttggagtttgatggcctgaaggtaagaacagacaaacccaattattagaaaacatgtatcaaagtgaaacaaggggaggggtaaggacagctcaaaaatcctgaggccctttaccagtttgcatggagagagggaggccaaaagcctgactagttaaaatctttacccttttggtggcatgttgggcttctgggtttccttcccctgggcccagtcctaaggcaaccagtttcagctttgggaaattaactctttcctgtttggaaaatgcatctgaggggagtgtcccatagtacagagacacaattaaatatcagtgaagagagaaccaaggaggagaaaggaataaaaagaagatgccttttaaaggagttccaggggttcaggatacattttaaggggtacagactgaagatgaatggctacccatctagaaagaggggagtagccatctctagttcccttctcttcctagcagatacccaggggtaagtgagggagagagagaacagcatcctctttccctcttccatccttgcatccccaagtcctggtgaccttggcaggtctcgccatgcaaagcagcttgtacccatgaagtgggggatggggagggggtggctagagaaaaggaattatctgttctcacctatgtctctttcccacctaatgtcagtagctttggagttccctagacctcatttatgctatggatattaacgtggtctttatccatgaaacaggaagcttggggttggcttaattggcagaaatcagccacactcacctgctcggtgccttttaacctctgttgttatctgcctctggatccttaacatccagttttccttcctagggctttgaaccaaagcttagaattgagtctgggacaaaactgtatctcacgggtgggggtggggttgcatggatgccttatcataagccgaatgcaaggtgaagctgtggaattgagtcctcctccaacaagggagaggaaaggatgtcttgtgagacacccagatgagtgtttgctatagttatgcttgctaagatttgggtgcatggtgcttggctttggttagctcccttggttttactttaccaaaaggaaacctccgagtgatgggcatcctatttattcccatcacctggcaggatttgaaggataattactcagaactagaatatttatcaggatttctacatcacccatccctcatgttgtttctgagctgcagctagagattgctggttggttcataggaacaagcagggttagtttcaaatgtaggcaaaaaattaaaaacaactaatgagtttagaatttagtgaccaatatataagttttgaaacataatttctctctctccagtcctcttttttttttcttttgagacagagtctcactctgtcgcccaggttggagtgcagtggcgtgatcttggctcactgcaagctccacctcccgggttcacgccattcttctgcctcagcatccggggtagctgggactacaggcatctgccaccacgcctggctaatttttttttttttgtatttttagtagaggcggggtttcaccgtgttagccatgatggtctcaatctcctgacctggtgatctgcccgcctcggcctcccaaagtgctgggattataggtgtgaacctccgtgccctgcccagtcttcatttttgttaaaaaaaaaattataggactgaatggtttgcaaaatagaatttagtcttaaacttggcctgattatttgcataaagtgcagcaagaatgattatttctacatacgccttttgggttggctttaatgggattttgttccacaaggagtctcagataagaacttttaaagccaagcccaaccatgggtttgtatcttcaaacacctgtgagttgggtgcttctgtcctcttaaggtcgataaacttggacctcctagaactgttagaacgtgacattctttactgaccacaggtcaggaaccctgtacagggactgcatagatgaggtatgagaccagtttccccactgggcttttattggctctgcaagtcaagatcgtctacttaaagggaagcatacccttctagttaaagccttggtaaaataaccaattcttccaattgcatcctgctgcaaaagaaaaatggattcttattgcactgatgcaaacaactgtaatgcygtaagttaagaatgctcacagatagtttcaaaattctagaggaaccaggcagagacaaacaaacatgctccatatcttgatcacaggattataccttgcttaattcttaaaggctgtaaatcattcaaaataagtttccttgactatgaaaaacagaacaaggatcagcaatatttaaaccaaaagtcaaaaaggttgctttagttttctgagtttagtccatttagttagcccttgttttacttgatatttgtgaacatttcagctcttcatgagtcctgtacattttcctgtattccaatgttacaatatccaaagttatcagaagcctgtatttaagagcacctattacagttttatagcttattataaaccattttttgaaaaggattaaagcaagacaacaattgtctgtgaagagcaaaatgttcagtgagttacagttagaaacacaattgacaaatttggttatcttcatggtttacaataacttaacataaccttaattatgattgatagcatatcgttagacatcaggattttagaaatcccatgcaattttggaacatatgtgaacattattttctaagaagattgaataacattttggcaatcctatgtacctaaacatgtcaaatgatcctatttacctctctttttggacacttcaggggccttccgaagtaattgaaaagcccggtgtcaaaaaagacaattttgaaacttaaatttgattttcggaatccgttaaatatcttccaggtttaaaacacttgatattatgaaatagaattccagattaccatgtcatttatttttccaaaatgatgactcagaaattttaaagcagcaaaaacattttataacctatttagtcaatatgtttacacaaagaacctcttctgaaagattaatttccacagttctttcaccacttctttgaaccttcagctttttcctaatttaactcaaaacaattctttaaccctaggcaaaagtttacatttccaagccttcttataaccttttactaaaaaacacattttactgttcttacacaccctgcatgtaaatctatttctagtagtttcaattaactcctagcaatttttaactttaagataaaacttggtaagttgctttgtgtgctaagtgcagccaaggtttgcattcttagttaagggtgtgattagttccatatgtccacaccttaccagttgtgaagctgamaagtcaaatagatctcaaaacccaaaaagcagtttgtaacctcaaaacacttaacaaaccttgcatctgacctgaattttaccagtggtctttagggctgtttatatttcttaaagattaaagtcatgtgaactgaaggatamcacagcttttatcttccctctaaaaaatgttagatccaagcgcttgtttttctttaggccaaattaattagagctctttttacagatatcacacacagtacacacacagaggaccacccagtcactgggtgcagccctttaagagacagggctaggaaaacatgcagatgtctaatctgagagggctcatcccctcagacaggattgtgaaacaaagccttgccaagtggctactggccatgcccccaggatgtaaagcaagatggaggcttgcaacacaaaccatacagacgtgtaaagcacaccagattggccacagccaaagactagtcccacaaatccttttccacaaccaaaactttacagagagtacaaacagtgatagttggggggcctaacccagtaaaaacatcttctaaaaggaaaaaaaaatctttaagggctaacttgttgatgaggtagagaaggagaaagamcaaaaaagcagtttaaaaattcctggggaagagcctcttattcttgtgcaaatggttcctccaccagggagacaagtttaagcttaattgctgtccaatagagttacaccccttggccaaggaaggggaagactgctgcaacgggaagtggttaggaccagccagccagctgtgcgggatccttaggccatgcatcctagccccagcaaagcagggagctgctgctcagcagtgagtcccgaaaaaggaaggaaaaggccatgaaaaggcccaggatccacagggggtaggggtatggttttccccactgtcagaagtcccaggatgaaaaggcttagaagcaacagtgagaggttttgtgtccccatttcattcaccacttctcgagccccatgttgggcgccaaaaatgatgcaggactttccttagttctgctacagacgggattcttatctgtttcccagctatgaaaatttaggctcacagacagtttaaagggtgagcaaaacagggttctattgggtgagaatggagaaaagtgggcaaactggccagagtctctccactagagcacttcccacctggtgatcaaatcccaggtccacacaggaagcagaggggccaggctcctccctgctgcaaatggtgtgaagttcttgaggctctactccagtgtgcaggctggttggtgtttctccagggaccccctcccacctggctgtctcactacaagtatgatttagtattgcctttaatattcagtatttattttacctgtatgttgtatttcagaattaatgattaatcaagtatacaaatgtcattatgtcactgtcaatatttaaggaatggtattagtcatctaactaacagtaggtctgcttttgaaaaccaacaaaaatgcaagaggcttttgagagtgcaagtaaaaatagaaaataaattagagtagttggactttaaaaggaataatgtactttaaatggactttaaaaggaataatgtacacaaatcaaaataaccaagtaacattattaggaataagtttgtaatctacagtatgttgccacagattccaatttttttatactcagataattatgccattcattagctttaaagaatgcttttgagtcttgttacttaatcgtagactcatgctcgttaattatagaaaatgtaaggtgcagggtttttaaaaaaatataattcattcaggtgcctgaaaagcacttaacatacaggttgtacaaattagctgcatttcacagataattttggaggcaaatattaaaaatgagcatatggatgatccttttacttagacttgggccaggtctgaaagagtttggttcattgaaataatgatatgctccataacacaaagaggactcactgaagatggaaaattttaatctattccctgtaaatgaaagcttagaaaataaaatgacaagaattgaacaagtgtgaagacaatggagctcacctactggagctggaccaccaggtgagatgattttcataagcatcattctaaccaggaaaattgatgctatacagcaataataaaacaatatctaggaaggttttctattgttgttttttgaagaatgttaactactgaaactatgctttcatgcaatgaattagaagacagaaactctgaattctagatcagatttgtaactttttatcttactgttgctgtgagaattgagcaagataatgtatctgaaggtgactgttgcatatactagattcaggaatcctttcaattaagtgctttctctttttggcagctatataacatcttatcccccatgggtgcacagggagtgatcctctgtgtattggactggcktgggtatttgtgtcacttcatgctttggaacattattttgaagacasgatctgcaccttatttactattttaaccacctccttgctgaacacagttctcaaatatccttaaaattatttactgactttaattgaataattgagtttcaaattaaaatggaactttggtctgactttgttgtctccttgtctcctttgtaatgttagatggaagaagctattcagggaaggagtgacttccagctttgaaacaagaactttagaaacttcagaagcatacggaaaaggaaacaagaaaaaygtaatcaagcaagcctcttgaaatgatacaataatataatagcagaattagatccacagaatttatacaattaaatccacagagtttgtaactatccttaagatcaatttattatcactatgtctrcaaggaagtgtgaagagcagaggaaagtgaccaatgccctttatggtctcagttctctaactcattttatgtttttttttttttttttttttttatactttaagttctagggtacaagtgcacaatgtgcagttttcatacataggtatacatgtggcatgttggtttgctgcacccatcaactcrtcatttacattaggtatttctcctaattctatcccttcccgagccccctacccactaacaggccctggtgtgtgatgtttccctccctgtgtcttaagtgttctcattgttcaattcccacctgtgagtgagaacatgtggtgtttggttttctgtctttgtgacagtttgctgagaatgatggtttccagcttcatccatgtccctacaaaggacatgaactcatcattttttatggctgcatagtattccatggtgtatatgtgccacattttcttaatccagtctatcattgttggacatttgggttggttccaagtctttgctattgtgaataataccacagtaaacatatgtgtgcatgtgtctttatagtagcatgatttataatcctttgggtatrtacccaggaatgcgatcgctgggtcaaatggtatttctagttctagatccttgaggaattgccacactgtcttccacaatggttgaactaatttacactcccaccaatagtgtaaaagcattcctatttctccacatcctttccagcacctgttgtttcctgacattttaatgattggcattctaattggtatgagatggtatctcattgtggttttgatttgcatttctctggtgaccagtgatgatgagcattttttcatgtgtctgttggctgcatgaatgtcttcttttatgaagtgtctgttcatatcctttgcccactttttgatggggttgtttttttcttgtaaatttgttggagttctttgtagattctggatattagccgtttgtcagatgggtagattgcaaaaattttctcccattcagtaggttgtctgttcactctgatggtattttattttgccgtgcagaagctctttagtttaattagatcccatttgtcaattttggcttttgttgccattgcttttggtgtcttagtcatgaagtccttgcccatgcctatgtcctgaatggtattgcctaggttttcttctagggtttttatggctttaggtgtaacatttaagtctttaatccatctcaaattcagttttgtataaggtgtaaggaagggatccagtttcagctttctgcatatggctagccagttttcccagcaccatttattaataggggatcctttccccatttcctgtttttgtcaggtttgtcaaagatcagatggttgtagatgtgtggtgttatttctgaggactctgttctattccattggtctataaatctgttttggtaccagtaccatgctgttttggttactgtagccttgtagtatagtttgaagtcaggtagcatgatgcctccagctttgtaccttttgcttaggattgtcttaggattgtcttggcaatgcaggctcttttttggttccatatgaactttaaaatagttttttccaattctgtgaagaaagtcattggtagcttgatggggatggcactgaatctataaattaccttgggcaatatggctattttcacaatattgattctttctatccatgagcatggaatgttcttccatttgtttgtgtcctcttttatttcgttgagcagtggtttgcagttcttcttcaagaggtccttcacatcccttgtaagttggattcctaggtattttattctctttgtagcaattgtgaatgggagttcactcatgatttgtctgtttgttattggtgtttaggaatgtttgtgatttttgcacattgattttgtatcctgagactttgctgaagttgctgatcagcttaaggagattttgggctgagttgatggggttttctaaatatacaatcatgtcctctgcaaacagggacaatttgacttcctcttttcctaatttaatacccaaatttctttctcttgcctgattgccctggccagaacttctaacagtatgttgaataggagtggtgagagagggcattcttgtcttgtgctggttttcaaagggaatgcttccagtttttgccaattgagtgtgatattggctatgggtttttcataaatagctcttattattttgtgatacattccatcaatacctagtttattgagagtttttagcatgaagggctgtcgaattttgtcgaaggccttttctgcatctattgagataatcatgtggcttttgtcattggttctgtttacgtgatggattacgtttattgatttgtgtatgttgaaccagcctaggataccagggatgaagctgacctgatagtggtggataagccttttgatgtgctgctggattgagtttgccagtattttattgaggatttttgtatcgatgttcatcagcggtattggtctaaaattctttttttgttgtgtctctgccaggctttggtatcaggatgatgctggctgcataaaatgagttagagaggattccttctttttctgttgattagaatagttacagaaggaatggtaccagctcctctatgtacatctcatagatttcagctgtgaatctaccaggtgctggacttttttttggttggtaggctgttaattattgccttaatttcatagtctgtgattggtctattcagagattcaatttcttcctggtttagtcttgggagggtgtatgtgtccaggaacttatccatttcttctagattttctagtttatttgcgtagaaatgtttacagtattctctgatggtagtttgtattactgtgggatcggtggtgatatcccctttatcagtttttattgcatctatttgattcttctcacttttcttctttattattcttgctagtggtctatcaattttgttgatgttttcaaaaatccagctcctggattcatttattttttgaagaattttttatgtctctatctctttcagttctgctctgatcttagttatttcttgccttccactagcttttgaatttgtttgctcttgcttctctagttcttttaattttgatgttagctgtcaattttagatctttccttctttctcttgcaggcattttagtgctataaattttcctccaaacatggctttagctgtgtcccagagattctggtacattgtctctttgttctcattgatttcaaataacatttttatttcttccttaattttgttatttactcagtagtcatttaggagcaggatttcagtttctatgtagttgcacaattttgagtgagtttctgaatcctgagttctaatttgattgcactctgttctgagagactgtttgttgtgatttctgttcatttgcatttgccaaggagtgctttacttccaattatgtggtcaattttagaagaagtgtgatgtggtgctgagaagaatgcatattctgttgatttgggctggagagttctgtagatgtctattaggtccgcttgatccagagctgtgttcaagtcctggatatccttgttaaccttctgtctcgttgatctgtctaatattgacagtggggtgttaaaatctcccattattcttgtgtgggtgtctaaatctctttgtagatctctaaggacttgctttatgaatctgggtgctcctgtgttgggtgcatatatatttaggatagttagctcttcttgttgaattgatccctttaccattgtgtgatggccttctttgtctcttttgatctttgttggtttcaagtctatttcatcagagactagrattgcaacccctgccttttttttttttactttccatttgaaggtagatcttcctttatccctttattttgagcctatatgtgtctctgtacctgagatgggtctcctgaatacagcacactgatgggtcttgactcttaatccaatttgccagtctgtgtcttttaattggggcatttaacccatttacatttaaggttaatattgttatgtgtgaatttgatcctgtcattatgatgttagctggttattttgcctgttaattgatgcagtttcttcatagcatcaatgatctttacaatttggcatgtttttgcagtggctggtaccaattgtttctttccatgtttagtgcttccttcaggagctcttgcaaggcaggcctggtggtgacagaatctctcagcatttgcttgtctgtaaaggattttatttctccttctcttatgaagcttagtttggctggatgtgaaattctgggttgaaaattattttctttaaggatgttgaatattagcccccactctattctggcttgaagggtttctcctgagagatccacwgtttgtctgatgggcttccctttgtgggtaacccaacctttctctctggctgcccttaacattttttccttcatttcaaccttggtgaatctgacaattatgtgtcttgaggttgctctcctcgaggagtatctttgtggtgttctctgtgttttctgaatttgaatgttggcctgctttgctaggttggggaagttgtcctggataatatcctgaagagcgtttttcaacttggatccattctccccatcactttcagatatatctattaaacatagatttggtcttttcacatagtcctgtatttcttggaggttttgttcatttctttttactcttttcttctctaaccttttcttctcacttcatttcattaatttgatcttcaatcactgatactctttcttccacttgatgaaatcaggtattgaagcttatgtatgcatcacgaagttcttgtgccatggtttttagctccatttaaggtcttctctacactgtttatcctagttagccttccatataaccttttatcaaggtttttagcttacttgcaatgggtttggacatgcttctttagctcggagaagtttgttattaccgaccttctgaagcctacttctgtcaacttgtcaaagtctttctctgtccagctttgttccattgctggcaaggagctgagatcctttggaggagaagaggcactctggtttttagaattttcagcttttctgttctagtttctccccatctttgtggttttatctacctttggtctttgatgttggtgacctacaggtggggttttggtgtagatgtcctttttgttgatgttggtactattcctttctgtttgttagttttccttcgaacagtcaggtccctcagctgcaggtctgttgaagtttgctggaagtccactccagaccctgtttgcctgggtatcaccagcagaggctgcagaacagcaactattgcagaacagcaaaaattgctgcctgatcctccctctagaagctttgtcccagaggggcagccacctatatgaggtgtctgtcggcccctactgggaggtatctccccatttggctacacaggtgtcaggaacccacttgaggaggcattctgtccattctgagagctcaaccaccatgctgggagaactacagctgtcttcagagctgtcagacagggacgttgctgccttttgttcaactatgaacaaaaaagaagctgtctgctgccttttcttcagctatgtcctgcccaaagaggtggattctatagaggcagtagtccgtgctgagctgtggtgggctccgcccagcccagtttgagcttcctggccactttgtttacctactcaagcctcagcaattgcggacacccctcccccaaccaggctgctgcctcgcagtttcatctcatattgctgcactggcagtgattaaggtttcgtgggtgtgggacccactgagccaggcataggagagaatctccttgtctgcttgttgctaagaccttggtaacagcacagtattcatacaggagtgtcctgtttttccaggtacagtctgtcacagcttcccttgggtaggaaagggaaataccccaaccccttgtgcttcctgggtgaggcaataccccaccctgctttggctcaccctccatgggctgcacccactgtccaaccagtccctgtgagataaaccaggtacctcagttggaaatgcagaaatcacccatcttctgcatcgatcatgctgggagctgaagaccagagctgttcctatttggccatcttggaaggcactttcatatttttctgctaacctatgccaatgcagtttcatagccttgcagtggaggcaaatgttacttagggaaactaacccaggaaatacttttttgtggaggagatggtgaagagaagcagtgagttcctttctaagaaattaattttaactcgtttcagattttgtgtcatttggaagtttagagttgaactcggattgaatggtggaggaaaagagaaagagaacgaaaaggaggaggaaatgtgcatgtacacagtcaatcaactgatagtcacttactacaaayggtggaaaacaacggtagaacaaaagaaagtaaccttcattagcatctgctttgggcaaagccctgagcgtgatgctttatatctgcagtcttacttgattcttacattaatcagcatgggagatatcattacctccaaattgcctgtaagaaaactggagaagtaatttgcttcagctgactatgctgataagggaaagaggggattagaattcagatccgtttcaatgttcatgcccttttagctgcactgtgctccctctctctagctaggtatttttgaatttactggtctcacacatggttatcagcaagcagggaagaaagaaaacacctctggggacactgtctatttctccacacacaattgggcaggcgttaggcaccattgtggtgggtgagcattgtcttccatcccctcaagttatcattgatggccttttcactctttgttggcatacttcttccttcatgccctctatcttcttgtaccaataaaaataggaaagggttggtgtcaggcattatatgcgcaggtttcaatccttgcattaactgaatttcatttccaaattattatttttaaagtaatacatgtgcttagttaaaatttacctgaagatacaacaacaatgataaaaaaccagtaggccctgctctacccttcctggaccctgattctcatgtttctgagggaaatatggtcaactgcttcagccatttattttggtattttcttcttttttccttagtaacaggcctactcagctgcatctttatttatgctcttaattttaagcattatctattaacttctctttatggaaaattatccttatttaggcccaagattttcccctatacaaaaatttttatccaccagtaaagttataattacagtcctcagtgaaatcattgtattgtgtttacagtttaacatgttgctcacaggtgagccacctagtatgttaaaatttcattcctttttgtgtaaatctttctattttccttggtgttaataactgctgtgtttggtttgcttagttttgtatggtccaaacttctcaagagcacccttgctccttagagagggccttcctggagcactctgtcctggtttcaatctagattggttactttctacacctgaagtccagtggtcctgcaatttcctctccctgagggatttctttgcacttttctttgttgcaattcctgttacctgaacctgtcatgttctgcattttttggtttatgctttcattggtgaaacacattctccattatttttttaataaatggatacttaggaagtaaagcctttgaattctgacatgtctgaaagtgtcaacattctgtcctcataatcaactgccagtgtggctaggactaaaacattttttcacagagttttgaaagtatcacttcatggcattggaaggtgtttcttctaacattccaatattgctataaagaaatctgatactatgctgattttggatcttttgcctgtaatctttttttcttgtttttcttcttcttttttaaaaataggatcttctttgtagctgatagtctaaaaatattataatgacttactttgatgtagatttctgttcattctctgtgttaggctgttagttgtgttagtttcttgtgttgatgtttaaaatttttttaaaaatcaacttcattgagatataatttacatacaataaaatgcaccaacattaaaaataccatccagtggttttgataaatgtatatactcatataactatgactacaaacaaaatatagcaagggtccatcatccaaaaaggtgctcttgttctcctttgcagtcatccttcagtttaccctggccacaggatactactgatcaggtttctgttactatagaatcactaactgcatatwtgggtctctttctgattgtataacacaggtctctgtattttcattaaagtcccagcctatgaaaatgtgttagtttctctcttcctaaaaaggatctttcrtttttcttatttcttcctccttgtcgctgcttaacttctcaagatgagtcaatgcttacagtattaattaggccaggttccattttggggggaaaaaagaaaccaaaatggcagtggcttatagatagagtttatttctgccttatgtaacagtgtgaacaagaattcaacagctgatataaccgttccaatggcaggaactcagactccttttatctcattgttttgccagccttaacatccggcttctgcctcgtgggctaaaaatatctctgcagctcaactcctcatggctgtttttctaaaagtgggaaggggagaagaggatgtggatagcacagaagttgcaaacatcacattctattggccaaaatttagacacatggccacacataactgcaaggaagagtgagaaatatagacttattaggaaaggcacatatccagctaaatttaggggttttatactaaaagaaaaaggaagaatggatatttggaaacaaattaatgcctccactgccttgatttctgctcaatttttttctgacttctgcctctactgttgtactgacattatccatcctaagagaacctctacatcctaatggtcaaatcatatgactgcttttcagttgatagagcatttcttttattaaaattttgtccaattctattgattataaattttctgaaactcattatcatcatttacaaatgtccttactttttgtattgtttaaattgtgagacagaatttaaaattaacaaatgagtcttattatttaatacctctgtatatttttgtttgttgatgactagtagcatacactgtcaacaaagctttagatacatcttgatttttagtaattatagaatcagatcttaacatgtactttttctttctccatagaataaattaatacataaagctaagatgtttgagatgtttctctttgcytttttttttttttttttttgagatggagtcttgctctgtcactcaggctggagtgcagtggcctgatcttggctcactgcaagctcttccaccacccaggttcaagtgattctccctgcctctgggattacagggacctgccactacactgtgccaatttttttttttttttttttttttttttaagtagagatggggttttgccatgttggccagactggtcttgaatttctgaccttaggtgatccgcccagcccacctcagcctctcaaagtgctgggattacaggcatgagctgctgcacctgtcctctttgctctttaaattcagtcacagaatgaataaaaatttttcctggaactgaatgttctgtcactgaagttaactaaagctagttgacaataataccattttaatcaccaaagtttggcaaaataaaaaaatcctgtcttaaagttttagtaatctaagcagaagccattatcccctgatataatttcatatctctttttggctcataatttgaaagatcttgagataatcagactacagtgatcctgacaggataagtggaaacaggtcttctttcctccttctcgccctcctcctcctcctccttctcctcctcttccttctcctcctcccccactcctcctcctcctgacccccttccttctctttctcctccttctccttcttattttattttattttattttttttttgagacagtctcactctgtcacctatgctgctggagtgcagtggtgtagtcacagctcactatagcctccaacccttgggcttaagtaatattcctgcttgtctcccaagtagctaggactataggcacctgccaccacacctggctaatttttttagtttttgtagaaatgggatcacgcaatgttgcccaggctagtctggaactcctggcctcaaatgatcctcctgcctcagcctcccaaagcactgggattacaggcatgagccactgcacccagctccagatattcttatgcggggagttgatgtagctttccactattgtttcagttttcttgatcatgctctgttctggtgtgattccgaatggaaaaatgccattcagcaccatacttactatttaataatttgtttctttaagcttttaaaattgtatgaaatcctcacttaaacctctgcccaattagctattaagtattttcatggtaagctttgaagaaggtacaggcaaatatggctgagctggttatattccaaacaatgaagtgagatgaacactgaacaaggagctgttacagagttatctttttcaaaaaaagttgaaatatagcaaaatatagaaaaattcataaaacaaaaagctttctcctcaatgatttatcaaagtgaacacccctgcaaccatcatcaggtcaagattgccagcgcattagaggcttgctttcacctccaytgaattgctcccctccttaaatgtaatcattaccattactttgttttattcacatcttttgtttttctttatagttttactggataagtatgtatccctaaatcactttatacagcactttctgtttttatcttccctgtatataaatattataaagcatacactattcttgtctatcttgtttttttccacagtttttacaatattcatcatgttgttgtgagaagtagtttttaaaatttttggccctgtttgcagatggcatgattgtatatttagaaaaccccatcatctcagcccaaaatctccttaagctgataagtaacttcagcaaagtctcaggatacaaaatcaacgtgcaaaaatcacaagcattcttatacaccaataacagacaaagagagagtcaaatcatgagtgaactcccattcacaattgcttcaaagtgaataaaatacctaggaatccaacttacaagggatgtgaaggacctcttcaaggagaactacaaaccactgctccatgaaataaaagaggacacaaacaaatggaagaacattccatgctcatggatagaaagaatcaatattgtgaaaatggccatactgcccaaggtaatttatagattcaatgccatccccatcaagctacccataactttcttcacagaattggaaaaaactactttaaagttcatgtagaaccaaaaaagagcccgcatcaccaagtcaatcctaagccaaaagaacaaagctggaggcatcacgctacctgacttcaaactatactacaaggctacagtaaccaaaacagcatggtactggtaccaaaacagagatatagaccaatggaacagaacaaagtcctcagaaataataccacacatctacaactatctgatctttgacaaacctgacaaaaacaagcaatggggaaaggattccctatttaataaatggtgctgggaaaactggctagccatatgtagaaagctgaaactggatcccttccttataccttatacaaaaattaattcaagatggattaaaggcttaaatgttggacctaaaaccataaaaaccctagaagaaaacctaggcaataccattcaggacatgggcatgtgcaaagacttcatgtctaaaacaccaaaagcaatggcaacaaaagccaaaattgacaaatgggatctaattaaactcaagagcttctgcacagcaaaagaaactaccattagagtgaacaggcaacctacagaatgggagaaaatttttgcaatctactcatctgacaaaggggtaatatccagaatctacaaagaactcaaacaaatttacaagaaaaaaacaaacaaccccatcaacaagtgggcgaaggatatgaacagacacttctcaaaagaagacatcaatgcagccaacagacacagaaaaaaatgctcatcatcactggtcatcagagaaatgcaaatcaaaccacagtgagatatcatctcacaccagttagaatggcaatcattaaaaagtcaggaaacaagaggtgctggagaggatgtggagaaataggaacacttttacactgttggtgggactgtgaactagttcaaccattgtggaagtcagtgtggtgattcctcagggatctagaactagaaataccatttgacacagccaaatcattactgggtatatacccaaaggactataaatcatgctgctataaagacacatgcacacgtatgtttattgcagcactactcacaatagcaaagacttggaaccaacccaaattgtccaatgatagactggattaagaaaatgtggcacatacacaccatggtatactatgcagccataaaaaaggatgagttcatgtcctttgtagggacatgaatgaagatggaaaccatcattctcagcaaactgtcgcaaggataaaaaaccaaacaccgcatgttctcactgatagctgggaactgaaaaatgagaacacttggacacaggaaaggaaacatcacacaacggggcctgttgtggggtggggggagggggtagggatagcattaggtggtatacctaatgtaaatgacgagttaatgggtgcagcacacctacatggcacatgtatatatgtgtaacaaacctgcacattgtgcacatgtaccctagaacttaaagtataataaatatatataaaatgaaaaaaataaaagttttggtgctgtatagcattttcttgtatgaatagaccacattttagcaatctagtagtttgttgatgaatatttgctgtttcagttgtttccagttgtgacaattacagacagtgctgctgtaacattcttgtgcatgtctcttggggctcgtgtatgtgcatttatgatagtattatacctaggagtgcaattattacatcttaggttatgtttacctgcaacgttagcagatattgccaaacagttttccaaaatgatactgatttatattcctatcagcagcagtaagtcagagttcttactacttcacatcttcayccaaatttgtgattcaaagcctttttaaattttagccaatctgctgagtgtctagcagtatctcattatagttttaattagcrtttccatgattattaatgagcttgagtactttttcatatgattattgacaatttggctatcttttttttttgaaaatgcttttcaaagtcccttgaccttttttctattatgttgtctattttaattgttaggaattattggttgtatgtgttgcgaatgtcttatctagctttctgacttgcctctttactgtcttaatgtgaaccttgataaataaaaatttttaatttatctctaatttctttatgtttggtgctttttaaattcttgtaaggaatttttccctttgctaaattgttgatgttatatccctgtatattatattttaggacctttgctattttaaattttatatttagatattttttatatcagtatccaactgtcctagtacaaatagtgaaaataatcattaccctacagctctacagtgtcaacttcctcataattcaactatccatatattaattattccatttattccacttacctattcatttgtgccttgtaccagtaccacataattttaattactgtaggtttttaataagtcttaatttccaatagagcaagtcatcttaccttgtccctttttttcaagagcattttggttatttctttgcattttcatttatgtttctaaattagtttgttaggtaccattggaatatctgttagtgctcttattaagattgcattgaattgtagaaaatatgacattcggtctagtttgcctagtacagtcacagtttacacctgttgccctcgtatcctttctaggttagtattcctatgaggtttttcaccttttcactattcatattattactgaattatgataagctagaaagggtatacctcactttgtaattctagcttctgcatggtcacatctagaagtagtagtaccatttgttgaaaagattatcttttcaactaaagtagatgagatacatgggtagtgaacagaattttcacttttacttatggtttaattggaaaactgaccagcaatgatccgcctctttttatcaatctttttctgtcacaatgctaataatacctctcattcaaaggcaacaagcagaatgcttgttgatgaactgaactcaaacacgaagagctaggagtagctaactcattttgatttagggtcgtggcagaaaattatttgattttgctgtctctgcaaagccgcctgcctgtgcctttggtttatctaacaaattctgccttatgaaaatatttgtcaaaaaaaaagtgctcttcaaagtggcagagtcaatatttataaaaatatttggatataggtattttaataaacaactctatgccaaaaaatgtgataacctagatgaaaaggaccaattactacaaagacacaatctgccaaaactcacacaagaagaaatagacaatctgaataaacstatttaatcaataattaacaacccattaaaacagaaagttttagtaccagatgtattctgccaaacattcaagaaaaaaattatatcaattctctacaatcacattcagatggtagaagcagagtactttctaactcattctattaggtcagaattacctgaatattaaagccaaagatattacaaaaaaagcaacttacagaccaatacctcttatgaacacagatgcaacaaaatactaagaaatcaaatccagtaatgtataaaaataattatataccacaaccaagtggcatgatcccacgtatacaaggctaggtcagcattcaaaaaacagtcaatgtaattcaacacttcagcaaggtaggagaaaaaccatatgatcatgtcattagatgccaaaacaaaaaaatttgactaaactccaacacccattcatgataacaactttcaataaaccaaaaatattaggaaacatcatcacttgattaagactatccacaaaaaagcctataggcagcatcatacttaatggtgaaaacgagaagcttttccattaagaatagacaactaggccgggcatggtggctcatgcctgtaatcccagcactttgggaggccaaggtgggtggatcacgaggtcaggagatcgagaccatcctggctaacatggtgaaaccccgtctccactgaaaaatacaaaaaattagccggacatggtggcgggcacctgtagtcccagctactcttgggaggctgaggtgggagaatggcgtgaacctgggaggtggaacttgcagtgagccaagatcatgccactgcactccagcctgggtgacagagtgagactccatctcaaaaaaaaaaaaaaaaagagaatagacaactaaaatcaatggaacagtataaagagcccagaaatagactaacatagtcaactgatctttgacaaggaacaaaggcaatacaatggatcaaagatgatcttttcaacaaatagtactacaataacacaggcaaaaaattattttagacacagattttatacmgttcatgaaaatttactcaaaatgaaccatagacttaaatgtaaaatgccaaactataaaatgcctagaagtgagcatgggagaaaacctagaacttaggtatggtgatgattgtttagatgcaacaccaaaggcacaatccatgaaagaaataattggtaagctggactttactaaactgaaatttctgctctgaaagacaatgtcaagagaatgagaagacaagccacggactgggagaaaatatttgcaaaagacaaatctgatgaaagattgttatctaaaatgtataaagaattttcaaaactcaacaataaaaagactaacagcttaatttttttaaatgggcaaaagacctaaaaatatacttcaagaaagaagatatatagatggcatgtaagcatataaaaagatggtcaacatcatgtcattagagaactgcaaaattaaacaacactgagataccactacacacctttttgaatggcccaaatccaaaatgctgacaacgccaaatgtcggtgagcatatggagcaacaggaactcatttgttgctgttaggaatgcaaagttatgcagccactttggaaaacagcttggcagttggctacaaaactaaagatactcttaccataagatccagctatcatgctccttggtatttacccaaatgaattgaaaacttatgttcacacaaaaacttgcacatgaatgtttacagcagctttatttataattgccaaaatttggaagtaaccaagctgtccttcagtaagtgagtaggtaaataaactgtggcatattcagacaatggaatactatgccatgctagaaagaaatgaagtatcaagccatgacaatacatggaagaaattcaaatgcatattattaaatgaaataatcaaatctaaaagggctacaaacgttatggttttaaatatcrggcattctggaaaaggcaaaactatggagataataaaaaatgagtgattgacaggatttgcagggtcaggagggatgaataggcatgacatagacaatttttttgcggggggcaatgaaaccattctgtactgtactacaatggtgtatatcctcattatacatatgtcaaaacccatagaatatacaacaagagtgaatcctaaggtaaactatggactgggtgataatgatgtgtcaatgcaggttcatccattctaacaaatgtaccattgtggtgcaggatgttgataatggatgaagttttgtgtttagaaagggatggttcatgggaactctatgtactttctgctcattttttgctaaaacctaaaactgctttaaaaaataaagtttattgataaataaaaaataaataagagtatgacccatttagcagaatttaagtgatgtactttagccatgtttttagagtattttaacaattaaaatatcatctataggaagaatcattgaaaaagttgttgtcaattgtagccataaaataaaatcctataattacaagtaattttataaaaatttaaagataataccatattcaataaaaataatattttcaggaaataccagtgacatgatattagtaggagaaagggagctaataaatggactaaagtatgtgaatatatagcaaaagtaattctgcttgtatgattttaaggtttagataatccatatagaatatttttttcttacatgtataccattttaggttatttacattttttaggaagagtatgattttaggagaaaattgaccaggaatattttataagtccactaataaactaaaactaatacctcttggtcaataaatcactatttatttagtgccttctttcactggactaacaataatttggctaccctatctatgaattgggaaaaatttgcaactcaatgatattgagacttttaattcatgaaaataatagttccttctatttacttaggttttccttagtttttcaaaattttttatttcttcatataggttttacacattatttattttgtttatttctaggtatttgacttttgttgcattttaatgtaaatattaccttctgtattagtccattctcatgttgctataaagaaatacccgagacttggtaatttataaagaaaagaggtttaattgactcacagttctgcattgctggggagacctcaggaaactttcaatcatggcagaagtcacctcttcacagggcagcaggaggcagaatgggtgcygagtgaaaggagaagccccttataaaaccatcagatcttgtgcgaaatcactcactaccactagaactgcatgggggaaactgcccccatgatgcagtgatctcaacaggatcctgcccttgacatgtggggattattataattcaaggtgaaatttgggtggggacacatatcaccgaaaattatttttayttctggcatatagaaatgcagttatttttgtagattttgtagaaatctttcaaaacttattaatttttttagacttttattttaggttcaggggtacatgtgaaggtttgttttgtaggtaaagtcatgtcatgggggtttgttgtatagattatttcatcaccaaggtattaagcctaataaccattagttattttttctactgctctcctttttactaccctccaccctcaagtagacccaagtatctattattcccttgtttgtgtttatgtgttctcctcatttagctcctattgacaagtgagaacatgcagtatttggttttctgttcctgtgctattttgctaaaaataatagcctctagctccatccatgttcccacaaaagacacgatcttgttctttttatggctgcatggtattccatggtgtatatgtaccacattttatttatccagtctgtcattgatgggcatttaggttgattccatgtctttgctattgtgaatagtgctgcaatgaacattaatgtgcatgtgtctttatggtagaatgatttctattcttcaggtatatacccagtaatgggattgctgggtcaaatggtagttctatttttagctgtttgaggaattgctatactgccttccacaataattgagctaatttaaactcacactaacagtgtataagtgttcccttttctctgcaacctctccagcatctgttatttttttaactttttaataatarccattctgactagtgtgagatggtatctcatagtggttttgatttgcatttctctaatgatcagtaatattgagcttttttccatatgtttgttggccacatgtatgtcttcttttgacaactgtctgttcatgtcctttgcccacttttgaatggggttgtttttctcttgtaattttttttaagttcgttatagatgctggatattagaccttcgtcagatgcataacataactaacttattaattttcatgcatcatagaatcttttgaatgttgttaagtacacaaccatattcctggcaaataataatattttcatttttttccagttcttataccttttattgtttttcttatgttattacactgaccagaacctccactataatattgatagaaatggtaatagtggttgtatttttaaaaatttccagtctcaaaaagaaatctttcaatatttcactattgaaagtggtattttacataattttttcacagatcttttttagcagattaatgagagcttctaagaaattttaatcaggaataaatggtaaatttggttaaatgttttaatatatatggagatagttatatgatttatcttatatatgctgttaatatgctgaattgcaatgttaatttttacatgttaagctcaccttgcattccttggttgaacttggttgtgttgtattataatttctatatgttgttggacttgatttttcttacataaggtttacttagtattttttgcatctatgatcctgaatgaaattagactgtcatttctatttctcaaaatgttcttgtttggttttggttttaaaaaagtgaagaatttgaaaaatgaattagcaagcattttctctttttcctgtgctctgaaacaatttgtgaaagaggtgtattttgtcttcagtgttttatagaattatcagccaagccatctaaatctggagtttttattatgggtctaatttgctaatagtgataagattattcagattatctatttattcacatgttaggtttggtaacttttaagtaatttgcatttctcttaagttgctgaatttatctgcattaaagtgtttctaatatctccctccagccccctgccttttccccccacctccctcctttttatctgagacatggtcttactctgttggtcaggctggagtgcagcggtgtgatcactgctcaccagagcctcaacctcctgggctcagctgatcctcctgcctcagtctcccaagtagctgggactatgggcacatcaccatgcccagctaatttttaatatctaccttttatcttttaatgggtttttagggtttttactggtgcttctctttcaattaatctattttatgttattttatcattctctccaagtttttatcaattttgtgtcattttacctttttgatattctctaatgtgttttctcctgtataattttacctctttttgagttcctgccttttactttctaaattttattttactctcttcttccaacttcctaccgaaaaatttgctcattgctttcggtctttttcctttcccattatatccatttaggaatataaattctccaacaatcatgatcttagctgcttaactgcactgtgtacacatactgttttgtataattttaattcctttaagtgtgttaagatagtccagcaagtgatcagctttggcaaatattccagtggttttggaaataagtttgttctgcagcttttgggaaaagcgctctatatttttcagttaatggtattgttcttctacttgcatttatcttcagcatttacttatttatttatttggtctatttgttttttatagttagaaggctgtgttaaaatttcaaattgttattgagtacttttcctttatttttctaaatatttgctttctatattttgaaactatagtattaggtgtttacaaatttaagatattttatatattcctagtgaattaaaccttttgttgttatgaagtgtcctttttgtcgttagcaatttttcttgacttagagattgctttttctgataattatatgattataccagcattattttgagattatttgcatcacatatatatttcccttcttttgctttcaacttttctttgtccatatagtttacatgttttttaaattgagatgtttttatttgatcttcttttatgttttaagatccaacctgtttatgtttattattatttaaaattttttttcaaatctaccatccttctgtgatccttctgtctttccttaactgtcttatagtgaagtattattttttatcaagttgaaagttgtatattcttctaccatttttagaatttattctagatctcacaacatgcatcttttacttctgaaaatttaatatcagttgatattcttcctccattactgataatataagaacctttgaacattttaactcaatttattttgccttttagtatatgctattatcattgggtatttaattctttttatatatttaatctaaaagttattatttgtattttatagcattgatatttatgtmgatattcgcatatttattatttttattgctctttattttattgtaaactatagttaccatactgatctatcaaatactaggtcctattatttcttctatcaagtgtatatttgaacccattaatcaatctctcttcatctcccccctcctcacaacactccccaatctttggtaatcaccagtctactctctatcttcatgagatctactttcttaactcctacatatgagtgaaatcatgtaatatttgtctttctgtgcatggcttgtttcacttagcataatgacctccagttccatccatgttgctgtaaatggcagaatttcattttcttttttttggctgaacaatattccattgtgtatgtgaaaacaaaggtgaccccatgtcggatgctagtctgccatgctgacttctgttagcctcagtcccatgagtgcctcctaattctacttaatttactgtccttagtgtaagaacatgtcaaaccttgttgttgtcacacaaattataggctatgacgcacatagcattcttgtctgtttgagagaatgacaagaattgtctttaactgtcttgctggagcacatataccctttccctgtggtatataacccttgggtctgggaagtaacagtgtggagatctgtctgtcttgctgcctttcacaaccatgcttctgtctgtaagttccctcaatatgtcacccaataytgacaaaatgaatttgtctgcaatttgttcaccttcattcttgaagaatattgtattttggtagagaactytaggttggcatgtatttttaagcatattaaaatattttacgtgttcagcttccttttttctgtagatagattagctgacagagtaattgttgctactttgaagttaatcctctcttttctacctcttaagatattttcttcatctttaattttctgtaggcttaccatgatgtatttagatgtagattttttttatttgtcatgcttccagttttgtaagatctcttgagtccatggcttaatgtcctcaataaattttggaacgtttttagtycgtattgtttccaataatgcaattatccttttctccttctctttttgttttgttccagttacccaaaataataaaccattgcattatattccctgttccttaccttctttttggcatttttatccttttacctcttatgctttattctacatattttcttgcaaatcattttcagggttaccaaatagttctgcaactgttgctattttgcttttaaacccatctattgagtgtttaattttaattatcatacttactagttctagaattttcgtgtcaacatttcttatggctccacttctctgccaaaatatccagtcttgtccttctgtctctttgaatataataagcttagtcactttaaaatctatcctggtatctggaggtcatattactctgtttctcttgtatgttgtacctggagggtttcatccctgttgatttattgccttgtgtccatattttggattatatggtaaaatagtattttttaattggagaaataatttgagtcctagcatgatgtcatttttctgcagagaggatttatgttagctcctgccaggcacctggtcacactagaaatacaggagtgcctcaattcaattctaggtatgatggcttgaagctaagctgcrgtcccagtaaagagatgttcacttttaattcaacattacttctaagattaagccttttcatgtctcaacccaaagagatagacttacctaccacctcagcatagtaggtaagtgtactgtacctcaattccatttttcctagtgctgtgaggctatataaattgcttcttagctgaacctccagatttctcagaaaagtagctccaaaagtcaggcttatcttcctcttcttctgtcctcctaagtctcctgacctggtaattattcactttcttgtttgctctgaaaagacttaaaatgcagtattttttataacattttatccagatttctagttgccctcagtagcagtattaatttgtattaaccagcctgtcattaacagaagtagaagccttaatagagtttattcagtttacatgttaaaaacctgaatgctacctcacctcccagaagaacataaacatcactaatgtgtttagaatataaaaataaagttcctgaaaatttttaaatatttaatttgatttaaaaaataaaagataaacacaaaacagaaacgtactrtgttggctgtaagtaacagaaatccaattttaattagcttgggtatgaaagcattgccttatttaaccacattcttagaaagaactataacaggaataactagattaaaagcacaaaacactgaggaatatatctcccttggttttcatgcctcttctgttctttagatgctgaatttaccctactttggacaagctttttcatcatggcgggaacagaactactgatcgcgttgggcttacatattgccatcagaaaggagaaaagaagctcttttccttcacttctttttccttccatcaaaatccaataagaagaatcctagcaaatgtctagacaatgtttagtgtaggccctatgcctgtctttggatcatcactgtactcagtttctgtagtttggcttaaatcctacatccaaccttggacacattgctctggtcagtttctctagaaggggctattctaattggcagcagcagatgctagcctcggaagaagaggcatgcaggtgaagggcaattgggcagagggcaagaataacccctatattatgctgcatcaaacatttcacaaacaagttccatcctgcttccaacattgtattttactattgccccctcacaccttaattcttgtcacagtgaacttctcaattttccctccaagtgtgtcatgttttttcatggctctatattgttttattgactagaaatatgttctgttgtgcaaactagcattgcctaaatattgtaaagacccagcttaacaaaacacctcagtgtgttctctctgcccctcaaacacacacacatacacactcatgcatacactcacgcactctagggtttccttcatctcatctagaaataaacaatctctycttcctaaatcagaatctctgcatttatcctgttgaagctaatatcattcttatttattttcttataccaaactatgatcaactccaatttagttgccatttcttatctcatatatactctcttacagtttgccacacctaaaacaatccataatcatttgttgaataagtaaatgaaaactggtgttttccaggaattcatgctcagctcaatgatcattcaatattgattgattgccagttccctgggaagcagktttaatatatgccccagaatctcctcacttttccagcagacttgggctgagagaagaaccactgggcacactctttacctattacttttgtttacatccttagtcctggaagggaacagcatactctcatcaaaatagcatattctgtttctggattattaattgctggaaagtgcttccataaaaaatgggtgagaatagagaagaataaataaaatgtgagagaggtggattttgtttcttatggacatattttgactgcacagtactggattatttcttaggaaataaatattttgtgttatctatgatactttatttgtgctcctccccagcacaccttccctgtgatgcaggctgtgcacttatttgcgtttatcttttgtttgggcggaactcctatgggagaataaaactgtcatagagaatgaatatatcttctctgcaaagaaactaaacattaggaattctgtaatattgtggggccatatcttatgaaatgtctataaaaaaggatgaatcaaagaaaaatataaataacctacgcatccatgggaataatcatggcagggaaatggtgcggtagcaagtgacaatcaaagaacaattctttttttttttttttttttttttactttaagttttagggtacatgtgcacattgtgcaggtcagtcacatatgtatacatgtgccatgctggtgcgctgcacccactaactcgtcatctagcattaggtatatctcccaatggtatccctcccccctccccccaccccacaacagtccccagagtgtgatattccccttcctgtgtccatgtgatctcattgttcagttcccacctatgagtgagaatatgcggtgtttagttttttgttcttgcgatagtttactgagaatgatgatttccaatttcatccatgtccctacaaaggacatgaactcatcattttttatggctgcatagtattccatggtgtatatgtgccacattttcttaatccaatctatcattgttggacatttgggttggttccaagtctttgctattgtgaataatgccgcaataaacatacgtgtgcatgtgtctttatagcagcatgatttatagtcctttgggtatatacccagtaatgggatggctgggtacgcaaataaactagaaaatctagaagaaatggataaattcctcgacacatacactcttccaagactaaaccaggaagaagttgaatctctgaatagaccaataacaggatctgaaattgtggcaataatcaatagcttaccgaccaaaaagagtccaggaccagatggattcacagccgaattctaccagaggtacaaggaggaactggtaccatttcttctgaaactattccaatcaatagaaaaagagggaatcctcctaactcattttatgaggacagcatcattctgataccaaagctgggcagagacacaaccaaaaaagagaattttagaccaatatccttgatgaacattcgtgcaaaaatcctcaataaaatactggcaaaccgaatccagcagcacatcaaaaagcttatccaccatgatcaagtgggcttcatccctgggatgcaaggctggttcaatatacgcaaatcaataaatgtaatccagcatataaacagagccaaagacaaaaaccacatgattatctcaatagatgcagaaaaagcctttgacaaaattcaacaacccttcatgctaaaaactctcaataaattaggtattgatgggacrtatctcaaaataataagagctatctatgacaaacccacagccaatatcatactgaatgggcaaaaactggaagcattccctttgaaaactggcataagacagggatgccctctctcaccactcctattcaacatagtgttggaagttctggccagggcaattaggcaggagaaggaaataaagggtattcaattaggaaaagaggaagtcaaattgtccctgtttgtagacgacatgattgtatatctataaagaacaattcttaaggtggtgcagttgactgaagtgcactgacactgcacagaggtactgagactggagagtgtcattttaggtcactttatagtgtcacagtgaagggctcttgtagtaggagactatgtatcaaaaacttcagtgatagaatatacagcctcttacaaaagtctcccaagcaggatcctttaatcatacctagctacttgaggctttcatttggatgagaaatacattgagaaaacacagctttatgggtgtttttggatagtgatatataccagagaatggaagaaataccttacagcatcaaacactactagtttatttgaggaaatttcagtaagtattaagaacaattaacttattctgccattttggtggagctagttaggatttttcaagtagaaagacagagtgaatatgttggtttcttttattgggtagcaaattcttacaaactcagtagcttaaaacaatgtctacacatttgttcatggttctataggtgagaagtctgggtgtggtgtaactggggtcattgcccatgatcccacaaggctgaaatcagaagtgagtggagtttaattcgtacatggaacttagagcccttttccaagttcacatcattgttggcagaatccagttacttatgattgtagaactgagacccctgcttttttgtgggctgttggctgggggttgatctcagcctcctgtggctgctctcacatccttgccacatcactcctttcattttcaaagccaacattggagaatctctcatgtcaaatctttctgacttaaagaagatccctgtcccttttaaggatttacctgattgtgtcaggccaatccaggtaattttccttttgaataaactcaactgattattaacctaaccatggggatgatagtccatcatgttcacagttctgctcatgttcaaaaggagtgaattttgtaggttgcctgttcactctgatggtagtttcttttgttgtgcagaagctctttagtttaattagatcccatttgtcaattttggcttctgttgccattgcttttggtgtttcagacatgaagtccttgcccatgcctatgtcctgaatggtattgcctaggttttcttctagggtttttatggttttaggtctaacgtttaagtctttaatccatcctgaattaatttttgtataaggcgtaaggaagggatccaatttcagctttctacatatggctagccagttctcccagcaccatttattaagtagggaatcctttccccatttcttgtttttgtcaggtttgtcaaagatcagatagttgtaggtatgcggcattatttctgagggctctgttctgttccattgatctatatctctgttttggtaccagtaccatgctgttttggttactgttgcattgtagtatagtttgaaatcaggtagtgtgatgcctccagctttgttcttttggcttaggattgacttggtgatgcgggctcttttttggttccatatgaactttaaagtagttctttccaattttgtgaagaaagtcattggtagcttgatggggatggcattgaatctataaattaccttgggcagtatggccattttcacgatattgattcttcctacccatgagcatggaatgttcttctatttgtttgtgtcctcttttatttcattgagcagtggtttgtagttctccttgaagaggtccttcacatcccttgcaagttggattcctaggtattttattcactttgaagcaattgtgaatgggagttcactcatgatttgactctctctttgtctgttattggtgtataagaatgcttgtgatttttgtacattgattttttatcctgagactttgctgaagttgcttatcagcttaaggagattttgggctgagacaatggggttttctagatatacaatcatgtcctctgcaaacagggacaatttgacttcctcttttcctaattgaataccctttatttccttctcctgcctaattgccctggccagaacttccaacactatgttgaataggagtggtgagagagggcatccctgtcttgtgccagttttcaaagggaatgcttccagtttttgcccattcagtatgatattggctgtgggtttgtcatagatagctcttattattttgagatacatcccatcaatacctaatttattgagagtttttagcatgaagcgttgttgaattttgtcaaaggccttttctgcatctattgagataatcatgtggtttttgtctttgattctgtttatatgctggattacatttattgatttgcgtatattgaaccagccttgcatcccagggatgaagcccacttgatcatgttggataagctttttgatgtgctgctggattcagtttgccagtattttattgaggattttttcacgaatgttcatcaaggatattggtctaaaattctcttttttggggttgtgtctttgcccggctttggtatcaggatgatgctggcctcataaaatgagttaggaggattccctctttttctattgattggaatagtttcagaaggaatggtacaagttccttcttgtacctctgatagaattcggctgtgaatccatctggtcctggactcttgagaaaattttcacaacctactcatctgacaaagggctaatatccagcatctacaatgaactcaaacaaatttacaagaaaaaaacaaacaaccccatcaaaaagtgggcgaaggacatgaacagacacttctcaaaagaagacatttatgcagccaaaaaacacatgaaaaaatgctcaccatcactggccatcagagaaatgcaaatcaaaaccacaatgagataccatctcacaccagttagaatggcaatcattaaaaagtcaggaaacaacaggtgygggagaggatgtggagaaataggaacactttatactgttggtgggactgtaaactagttcaaccattgtggaagtcagtgtggcgattcctcagggatctagaactagaaataccatttgacccagccatcccattactgggtatatacccaaaggactataaatcatgctgctttaaagacacatgcacacgtatgtttattgcggcagtattcacgatagcaaagacttggaaccaacccaaatgtccaacaatgatagactggattaagaaaatgtggcacatatacaccgtggaatactatgcagccataaaaaatgatgagttcatgtcctttgtagggacatggatgaaactggaaatcatcattctcagtaaactatcgcaaggacaaaaaaccaaacactacattttctcactcataggtgggaattgaacaatgagaacacatggacacaggaaggggaacatcacactctggggactgttgtggggtggggtgaggggggagggatagcattrggagatatacctaatgctaaatgatgagttaatgggtgcagcacacgagcatggcacatgtatacatatgtaactaacctgcacattgtgcgcatgtaccctaaaacttaaggtataataataataaaatttaaaaaaggagtgaattatacaggcctgtataacaaggaatggaaatgttgggactgtcttagaatttagccatcaccatggatccctgttttaggagagtgactgtggaaaaatatgaaggacaggttagaaaggtatgaagatattgccaaaaggtgtcagcttgtgtgtcaactccagtcatgtggtggggactttctggggcatggtgctaagggttcaccaagccaggaagattcctgtaattaggcaaagaaggtaggagtggcagcaaatgcactttgttttcaccaccctgttagggagattccagtagtcctagaaatggacggtgtcagactgaattgaagcaggtacaataggagtagagaagatgcagaagttgtacagactctgtgtatatttgcgactgtgatagataagcctcagataaggaaatcagagggagaagtaaaggcgatttgactctggagtttccattttcaagtgatttccacgggtcacctcagaaagtcagaagtgtaggagaatctgggatatgaggatatttaggaggctatagaggagtgttaagggccaaaacatctctttgggcagtaatttattcccattggcttaacacacaattttttaattgattgaggtgaaggttgcacagtgctatgaatatattttgtatgctttaaatgggtgaatcttacaatatgtgaattacatctcaataacgctgttccaaaaaatttctgtagtacaggactcaaaatgtgttttacagcagaaatcttttttaacaataacaaaataagggtctaagatgtagctgaggttttagagtaaactctattttctatagagaccatgattggttgtgccaatcaaccaagttccttctcttggatcaccattgatcctcattaattgtctttgagttttctctttctccccttgcctgtcatcttgttttggtccaaggaatttcccgcatgatatttttttctccttctccactcaggcggtctcattgtctcttcttgcattaaggctattcatttagaaggactgaagtgcaaaaagttttatttgctcttcattgtataccccaactcttttatctgcccaattccctattgctttaaccattacaagcaagtatgacatgcacactgagatgttgggagcacctgggcatcttggtacaggaccctggagagaggttaagggatggggactttttttttttaatggaagcttttactgttgattcacatcggcattataaagaaacccctgactttatcaaagggaaaatgtgatgaaaagtatcagtgttagcaatatggttttatttacatcattaaagtttgtagcccgggcccacattgagytttttgggagtccagtgagattagtttgccataaaattgcaaagctgcagttacagcagcaaccattaattcagcatctatcctgtgccaggtcatttatacatgaagaaataatgatgaagctgtttaagcacatggactttagaaccagaatgtttgggtccagatctcaattttcaatttacttactgtataaccttcattaagttacttaatcttctgtcttagtttttctacctgtaaaagtaggctattaacaacacttgcctgtagatttttttcttcagacaagtaagttatactacttaaagcattgagaataatcatgtgcaacgtgcaaacactaaatgttaaatattattgtttatatacataattatattttattacataatatttttatacataatatttttataaggtatgtgtgatattttattatgtacatagaatatgtgattacatcatatttaatccacatcattattcagcaaggtaggaaggatttttctatttgtgagaaaactgatttagagatgttaaaaaataaatgcttgtcaaatctctcagagtgagaagagagtgaagttgcaatttaaatcccactgagtaactcttacaatcatgtcctttccactctgctatggtctgaatttatctcttatattagtattaaatacagatgattgacatccaaaaatatttcttttcctcctgaatctgggctagatataattgacacccatctaaagcaatttcaagtgcacggggactgtataagtggtgtgtggttgtaatcatcatctattttaccatgagctatttaggactggcctaaacagatataattttctaaatcttttagtagatctacatcacttacctctctactgctaagtttctcacaaacagtattctatttttttgcagatttggtcaataataagaagaaggatttacactccattcttagttctttattttatgtttatatttggtggtagaaaatttgcataataaagtagcagaccacgcaataatcagaatcagtgaataatagacaaaggggctaaaatgtcctgcattttattattggtttcctactggatataactaagacattatagtatgaaaatccagatacactagatttaaaaaaaaagctccttcaatagcatttaaggtttttttgatattttaatttacttttttgatttatagttctatgaatgttaacacatgtatagacttgtataaccaccaacacaatcagaatacagtgcaattccatcatctaaaaaactccccgaatggttatgttttaagtgagtctttgaaaaaaattaaatggttaaagtcagaaacacaaggaataatctgaaaataatgaaacaattaaaaacttgaacaaaatctgaaaacttgaatttttcttttgactctgctgctaaatagttgtaaaattctatgggcattcttaacttttttttatttttaatactcatatctttatttttttaactcttatttcagtttaatgcatacatgtgcaagtaggttctgcagataaattgcatgtcatgcgggtttgttgtacatactatttcrtcatccagttaataagcatagtacctgataggtagtttatcgatcctcactctcctcccccactccatcctcaagtgggcacgagtgtctattatttccttctttgtgtgtgtgtgtactcaaagtataggtcccatttataagtgagagcatgcagtatttggttttctgttcctgcattaattcacttaggataatggcttccagctccatctatgttgctgcaaaagacataatctcgctcttttctacagctgtgtaatattccatggtgtatatgtaccacattttctttatccagtccacagttgatgggcatttaggttgattccakgtatttgtgcttgtgattagtgtggtaatgaacatatgtgtgcatgtgtttttatggtagagctacttacgtttctttaggtatatacccattgttggaattgttgggccgaatggtagttctgttttaatttctttaagaaatctccacgatgctttccacatccccagcagcaatgtatgagagttatcttttctctgcagctagcatctgttattttttgactcgtaaaacccagtttcttcatctttaaaaaacgaggttaggttaaattagtcctactactcttacttggttttaaattttaggactatgattctgtgttaaatcatgtgagctcaaacatttcagaaagtatccttactttgtggcaaaataaacgtatctctcttcctttcctttcttatccactcctgagatataatctctaatctcatattcatttctccttttggggggtattcctgtggtaataacacttaacatgagatctgccctcttaacacatttctaagcggataatacagtattaactgtgggcacaatgttatacagaagatctctagaacttaataaccttgcataactgaaaccttactcctattggatagcaattccctatttccctttccctcttatcccctggcaacaaccattctactctctggttctgtgtgtttgaaccttttatataactccctgactcttttatataactcctttaagtagtattatccagcatttattcttctgtgactggcttatttcacatagcataatgtcttcaaggtttatccatgttgttgcctatggcaggattgccttttattttaaaggctgaatcatattccattgtatgtatataccatattttctttgtcccttcatctgtcagtagacatgtaggttgtttccacatcttggctattgtgaatcatgctcagtgagcatgggagtggaaatatgtctttgagatcctgatttcaattcctttggataaatatccagtatcaggattactggattatatagtatttctatttttaatttttttttttaggaatctccatactgttttctacagcagctgcactgttttacattctcaggatggcacaaataatcagtttcttcacatctatgccaatacttcttatttcgtctttttcgataaaaaccatcttaagaggtgtaaggtgacatctcaatgtggtgttgatttgcgtttacctggtgatgagtgatgttgggcagcatttcatatatctgttggcctttcatatgtggtctttggagaaatgtatattcaagtcatttgcatatttttatttggctgttatttatttatttatttatttatttattttgccattgagttgaaggatctattttagatagtaatcccttattagatatagtatttgcaaaaaattttctccattccacagattgtcttttcattttgttgattgtttactctgcagaagctttttagtttggtatagtcccatttgcctagttttgcattcattgcctatgctttggtgtcatatgcaagaaatcattgtcaagaccaatgttatgaagattttcctctattttttatgagtattacatagtttgggcttatttttaagtgtttaatccattttgagatttttgtgtgtatgtgtatagtggaagaaaagggtccagttttattttttgcatgtgggtatctagtttccccagtgctgtttgttgaagagacaatttgccttccctttggcatatccttgacacctttatcaaaaatcagttgatcatacatgcgtgagcttatttcaggagttctccattctgttccattggtccatatgtctttcattatgccagcagcatactgttttaattagaatagctttgtattatattttgaaaccaggaagcgtgatttctcctgctttgttyttcttacagttgttttggctattcaaggtcttttgtagttccatataagttttagggattttttttttctatttcagtagacagtaccattgatattttgataggtattgcattgaatctgtaaatcagtttgagtaatatggacattttgacaatattaagtctttcaatattcatttcttaatgttccccattggatatattactatagcacatgaagtatataaaatctaactttctttaattccctttaaaaaggatgatttgaattaccattccatcattgtaatgacatttagccataatgcttcttaagtatgatatttttattgataaattataataatttggactagctcatttcaacaaaaggagacaaaacctgaagagtgacaagtgacttgagaatctccaacttttatgctgttatctctattgcattgcctggaaattgtgttaattcaatccagcttggcaaggtgagagatgctaagcgtatcctctaaacagggttttctataggatttatattgtaactattttttagcagatgacttaatcagggatattctcccttttcatctgtgctgttttctctgaactccaggagtcatgtgcttgggaagcagacagacagtgcctaggataatgccagctcgttgtttattgctcacgggctaacctttatgaaattaatggcagcgccttctctctttatgttacccaaactcatgtcccttccactctaggtgtgaagattgtgctagaggtgtctctccagccgtgagcttttgcctctgrtgctgtcctggtcttgctgaagggaggggagattatattctgagcagcaagcaatggttgctgcccttgagcattttgcctccagctgtcatccctgtgacctaagggaaggtgggtgcagatcagctatgcatgtgtgtgagttggagcgaatgtatgtcagctatgttcatctttccacagccagggaatggatgagatctgccttttttgtgtgtcaatttgtcaatagaaatagtgcggctgtaggcacagagtattctggtaggctagaaactcctgatattccaggaaagccactgaatagaataaatgataatgggttaggagtgtgagggttctcagtttatgcatgtttgagcaaatagagggtttattttttaaatttttattctatttttttagatcttagaggtaaaagtatagttttcttacaaggatagattgtgtagctgtgaagttckggcttttagtgtgcccatcacccaaatactgcacaatgtacccaataggtagtatttaattcctcatacccttcctaccctccccacctttaggagtctccagtgtctattattccactctggctgctcatatatacctgctctttagctcccacttacaagtaagaacgtgtggtttttggctctctgtttctgagtcatttcacttaggataatggctcccagttttatccatgttgctgtaaaagacaagatttcattcttttttatggctgagtagtatcccatggtgtatatatagcatattttaaattcagtcatccatcaatggacacttaggttgattccatgactgctattatgaataatgctgcacgtgaaaagatgctcaacatcttcagctttcaaggaaatataaattaaaactaaaataagacaaaaatgtatggtcaccagaatggctaaaatttagaagtgttggggtacaaaaataattccccaaaatatggctctttaacatgctaagcaccttaaaaattgagaggtctcagaacatgctaagcgccttaaaaattgagaggtctcagaaataagcttcagaactactggctttctccgaccttgtcttgcctccctctctctgatcctctttacagaagcactgggagatatctctctgaagtttctttatctaagaaagcttatttccaaaagaaatgtgttatgttttaagactccctctctaggaatctcatcaaataactgggaaagataaactaccaaagaagagaagaaactgggagtcatcaccacactgagatagacatttcatccattccgagggcagcaccaagagatttcattgggtgagggttggggggctttatctgcataaaaatgtcaatctttgtttttatgtagttctgcccctcaccttgtccatctagcttccaaatagaatcatttataaaataatatctaacacctgagtccatacatctctcccatataaagagattatttaagcctcaaacatatggcccctctttaagtctcatattttgtatatgacttctgtgtttaggcacattatgaatttgtatgcctttttttctcctattaatatggcttttgtcagtttattttctgtgaaccttcagtgggcagagaggaagcattctctcaacccctacgaaaaagttaaactgtcaagttgtaaactaaaaataaaatcttaagtcccccactgactgaagacacaccttcttggccaaggggacctcagaaaaaccttaaaaactgaattcccagccatgatgggaagggaggtcagacgtaccttgttataccctttcccttttggagtttaggcacaactgactcgcattaataaaaaattaataaaaatagagatcatgagactaactaggtggactcttcgtgacagtaagatactgaatcacaaataggacctaaggccatgccagacaagggctaactcacacatccctacaggtcactctgacctagtttattggttaacagacttccttatcttaacttaaaacattcctttctgctgactccaaatttgtrgacaaagctttactcctttaaccagttgcaaattaaggaatctcttaatccacctataacctgtagatatctatctttttggatcaaatcaacatataacttccatgtattgatttattactttgcctgtaactccttcctttctaaaatgtataaaacctcctccctttctaaaatgtataaaaccaaagtgcagtctaacttctgcagatrcactttctcaggaactcttcagattgtgttcctcggtacatagtcagtcatactgactcagaactaaccttttaaaataaaaataaataaacaaataaraaatgaatagtgctgcgataaacttacaagttcaggtttctttctgatataatgatttcttttcctttgagtggatactcagtagtgaaatttctgaatcaaagggtagttctatttttagttctttagaaatctccatactgtcttccatagaggttgtactaatttagatttccaccaatagtctataagcattcctttttctctgcatcctcaccaacatctgttgttttttgactttttagtaatagtcattctgactagggtaagatggtatctcattgtggttttaattttcattactcttaagattactcatattgagcatttttcccatatgtttataggttacttgtatgttttcttttgaaaaaatgtctgttcatgtcctttgtctactttttaatgtggttgtttcttttttgttgagctgtttgagttcctttggttctggatattagccctctgtcagaagtattgttttcaaatattttcactaatcctgtaggttgcctgtttactctgttgattatttattttgttatgcagaagctattcagtttaattaagtcctacttctatatttttgttttttgttgcatttccttttgaggacttagtcataaattctttgcctaggtcaatgtccagaggagtttttcctaggttttcttccaggagttttatagtttcaagtcttacatttaggtttttaatctatctttagttatttttatatactgagagataggagctcactttcattcttctgtatatgattatcaaattttcccagcatcatttattgaacagtgtgttctttccctagagtatatttttgacaacttgcttgtaggtatgtagctttattttgggtttgtttgtttgtttgttttgagacagagtcttgctctgtcacccatgttggctggagtgcagtggccttcgcctactgcaaactccacctcccagcctcaagtgattctcctgcctcagcctcctgtgggttctttgttctgttccattgatctgtgcatctatttttataccagcactatgctgtttcagttactattaagaacttatcttgatatttatttgctacccgttcctataaccatcaccactgtgtttaagtataggtttgtattaactaagaatcttagtataacatggtgggatgcagtggaagtttggctcttaatacaacaaaccctttctatttgtgaatttggccttggaggacttaccatttgcaaataaccttgaagatcatgatatctgattttttacaatttaaggtatgtgagtaatatgcaccatgaggctgatgtgtaggactaagttattaaatgacaagtgaagctagccaagcacccagcatctaaatattaatcttttttacattctccatttgttattgtatagctttttgttaaatgatttaaacatttctctttgtaatgtgatggaaggatatattcacagaacatgagattctggacagaaattatgtctatgaaaagtcaagggtctttacaaagatatatgtgttgtgaattttagatttcccaaggatctgtagccatagctacacactgagagtctactgcagtataatcagtgtatgtatgatggtaactcatgaaattctattgatttccagatatagatgaccttggcaggagcatgtaacagtcttttagttttgtaatctccaaactattttattgtatatcctgtgaaaaataaagagcatgcatttgttatcttcatattaatatataccttataaaatgtactactcacaaatctatatgtatcagtttcgcttatgttcagctgcatattgcagaaatagtatttaaaacaaatagtagtgtattaaactagatggaattgtatctcttttccatgtgaaatctgtagattgacagttaaagactggtaggtctctgatcatcagggagaaaagctctctctttattgaatgtctgttctcaacatgggtctgctccctcgtggtacaaagcagcagccggatctctagccatyacattcacattctaattagcaggaagaaagaaaggagaaaaaaggccatgcttccctttgaggaagttttctatatggcacttacattatttctgattgcatataggggccaaaacttagctagaaataggtccaggaaataataacttttcgttctaagtgacaacatattgagctaacagtcagggttctgttactaagtgagaagagtgctacagactgaatgcttcttttccaccaatttcatagggtgttaaatcctaacacccatggtgatatttggacatggggcctttaggagatgattaggtcatgagggtggagccttcacaaatgagattagtgccctcataaaaaaggccccagggagttttctttccctttcctccatgtgaggctatattggtcggtgcaaaaataattgcagttttgccattacttttaaaaatggcaaaaactgcaattctttttacactaacctaatctcaggatttctgtaaaccaggaattgggcccttaccaaacgccaaatatgttggtaccttgaacttggacttcttggccttcataacagtgagaaatacatttctgttgtttttaaactacttagtctatggcatgtttgttttaatagccaagaaggactaagacataaagaatggatattgcagtaggcaaatagcagtctctacacactatgtgttaaataattgcgaggcctaattactttcttagttattctataaaaactaaatataagcaagagtcttaatattttctttctgcatacaaatgaatcatctcatttaccaaagtatggatcactcacttcagaggcagaagcagcagggagagtgagcttcctttgccaactccttggctattcctagagagctgcaaccagcaaacactcctctccttcctctatttttttctcctgaaggttgttaattgggtggaagaggggtgatcaccatacctgcatgtgcaaatagggtatgcaaacctattgaggtccaaaaaaataatgcatgtaaacctgtgtatgctatacagtgagctacagaaacctgtccttaaagagggaacttccaggccagatgcagtggctcacgcctataatcccagcactttgggaggctgaggctggtggatcacctgaggtcaggagttcgagaccagcctgaccaatatggtgaaaccccatctctactaaaattacaaaaattagccaggcatggtggcgtgcacctgtaatcccagctgcttgggaggctgaggcaggagaatcgcttgaacctcagaggcagagcttgcagtgagccgagatcacaccaccacactccagcctgggtgacacagccagactccagcctgggtgacacagccagactccatctcaaaaaaaaaaaaaaaaaaaaaaaagaaaaaagaaaaaacagaacttccagaaggaaaattaagtgtttgaaaagccaatttattttttgcacacaaataatttttttttttacaaacgaaaaaataaaagatatatgtattttaatgttaggccagataaaagtgtttaattcatagttatgagtatgttatatacttaccattacttacttttccttgaagctaacaaaacaaaacaaacaaacatgaaatattacagatgcttataaataccagcatatattctggtatggttcgtgtctgtgtccttgcccagatctcacatcgaattgtaacacccagtgttggaggcggaacctggctggaggtgattggattatgggtgtagatttctcatgaatggtttagcaccatcccttggtgctgttctcctgagagtaagtcagttcttgcaagacatgattgtttaaaagtgtttagcacctctcctctttctctcttgctcctcctcctgccatgtaagacgtgccatgcctgcttcccctttgccttttgccatgattgaaagtttcctgaggcctccctggaagccaggtggataccagcatcattctttctgtatatcctgcagaactgtgagcaaactaaatctcttttctttataaattactcagtctcaggtatgtttttgtagcagtgcaagaatggactaatacatattttgtggtggtccaagaaagcttttgaactaaggtttcagcatcaaaatcctagtagatttaaaaattggtgaacctgaatcttatttttttaaaaaatgatgcttccattggcatgcaacttttcagtttgtaatgtgtgggtgtgtgtgtacacatacatatatatatttctcagttaattttcaaaaatattctcagggtaataagtttaagatcaatatagaatcaaataatttcaaagttggtgatcacgtgttctaaacttttgaggtccataaaaataatgcagtttttctaataccacacaactaattaggwgtatagctataaacatagatatagggaacactctgtctaaatttttttaatttacaaatatgaaaagcatatgctgttaaartaaatgtcattttattctgagtcttatttatttatcctcttaatttttattaaatatacaatcttaacagtgttggttatattaaaattacaccatctaatgcagtagtcactaccctcagatggctatttgaggttaaattaatatattattctgttctcacactgctaataaagacatagccaagactgagtaatttataaaggaaagaggtttaatggattcacagttctacatggctgggaggcctcacaatcattgtggaaggcaaaggataagcaaaggcacgtcttacatggtggcaggcaagagggcttgtgcagaactcccattaataaaaccattagatctcgtgagacttatttactaccatgagaacagtatggaggaaactgcccccctgattcaattatctccacctggccccacccttgacacatggggactgttgcaattcaaggtgagatttgggtggggacacagccaagccatatcaattgactaacataaaaaaatctatatcctcaatcccattagctaaatttcaagtgctcagtagccagatatgggtagtggctaccatatccaccagtgcaaattatacatatccatcatctagaaagtgctatgttagaaggctattctattcactacttcttaggaaattataattacattctgtttcagctggtgcctgggagtgttatgaacagtgagcaagcaaactagcagtatcaaaagggctgagaaaacagttgactcttcaagaaacagttttcctattcaagagaaaatgagtatgtgtgaaattagaataataagtgcaactaagcagataagtggtttttaggaagtcagcatcatggatatttatagatggtatcttagataagctttttttggagaaacattttgaatcataatttttatcagtgataaagccttttggagacaatattagaagtattcatttcagggacctatcagtaaagttttaaagactttgaattgatatgatatccaccaatgtgaggctaacatggtaatcttttgagaaaaggggaaagggaagtatcccagagaaacaggagagataacttttttttttcttttaggataaaaactcacatttacttatgtgcacagaatcacatacttaaaacctctgttctttttgagctgaaacattcaaattgattttggctgatgaattaaatgagcctctcagcaattagtaggcaacctcagcatgctctgatccttccatatgcagccttttggtcttagtgttaattacaataaacataaataagtatttatgtttaaatataaataaatatttatatttaatartattttccattactggaaaattattcggagctgtaagcagggaatctaactgaagagagaaacctcagaaaacaataagagaacaaaattattaggaaatatggattcaaagaaaggaaatatcattatagagtaagaagaaaaaggcacttcatgtagcgagactgaacttcctttgaagcataataagagtttgagatgggaaaaaggaagggaggctcctctaaatcgaggatgagcagtcctgaagattcaaatatacacataatatgacaagagtggagattggggaacagacactgaggaagcatgatgggaacagaaagtgtgtgtttgaagttagtatagcagcactggctagaaaggtgagatacagtgaagacagagaggatcttgaaagtaacagttaatggctgtgcatgcagttgtcaaaggcagcagactctgttgagattttggttggagagggactcaacgaaactggtctttccagatgataagtcttggagggtgttgtacagagtaggtcagagggagagcaagtggagaccaaagggtacttctgtaacctaggaagtccacaaatatttaatgagcacctactatcttccaagtattgttctaggcattctaggcattggcaatacagtagagaatatgacagagatggatttcaagtgcaatgggtggaagattatagggtattaagaaagaaaaatgtagttagaagctatagaaaactcataaatcctgcatattccagaatgttggtgtcaagaaaagatattttttaggccattgacattatcatgtttgtttttaatacattttcttccaactcactataatgccaaaggtgtggtattttcatgaaggtgagagagtaattgcctttattattgacttttgtcctatgcaaaagagtcaataaaggaaagaagtcctggtaattctgccagaaaactccaaaaggaaacctctgccttcatttttaggaaatcattaactaatggcaggtgcagcagtcactctactgtttataattagaagacaataggcccttgatgattcattcatttatttaaaacaaaaaaccaaacaacttctttaatgcttgtgctctgaaaatatagcagtaaatatgtcagataatggaaaatctttggggtggcagagtgcctgcgaagcatagaacaaggttggatgcagatgtcctgggaaggtttcatggtgtctttgtccatagaggaagctattgccatttgccccatagaacaggaatataaccattcatgttgagaaactgatttattgaggaattaagggcaatagtggaaaggtcttgtcttttcttcatccctagcaggctttatgacttcaactctcttgatcctggaagctataagtgttcttcttttttaaaaaagtatattgtctgtcttaatttgtatatcttctctataattgccctgtaaaacaaggctaatgtgaatgtgcaaaataaaattgaaagtactataaatctgtacacagagcattaatatattattaattttaaacttgttttgtacatagacatctggaaaaaatagtgttatatttttattttggatcagctggacagaccagcatccaaatccaatatatattctctagagaccaagaggtttggatgcagactaataacgatggtatcaagctttatgtcagccaggactagagcacttaagcaacatgtaaagctacatatacatataaataggtggcaatttctagatgcctcttattaacttacctaactagaggatgttcagagtgtatagtaatgaaaaagctactgctatagcctttaatagagtaattcatttaaacatttgcatatatttgactacttttatatgtaaataaaatcttatctgctttccatatagtaccacaacattcaacaaaaagggaatgattaatttaattattgaatatctacatgatagattttacacagcattaaagtttgtctttctattttttgttgaaagatatgaggatatatttatgcaaaaaatgttgagcaaacaaatttggatatagtattatattttcattataataccatatatgtaaaatagaaaacagtattaccaaatataagttaataatcatattgacataatgttatatagatttatttatagtttagatttatttatttgtatatttaggtttctaattattctataatgattatgcattattgtttaataagtaaaaaagcaaaagtaaaatttaaacaatttgttacctttctttgtgttttaaaaaatttgcctttgattttcaaatgcttaaaagacatatatgcaccacagataattgaaattgtcatttgcagtgattcttacttgatctgagtccggagaaaattgattttagtatttttctctaatgaaacagaaacattgccagcagcttcctcatggaattttagcactttcaaggccagagtgttgcatatgaaaagactgaaaaattcctttaggcaaacattcttaaggatccaaaatatttgaaaatatgtatttgaacagctgtgttttaatctgatattttaaaattgtttaatgcttctttttttacccttttattgatatataaaaatttacacatgtatagggtacatgtgagtgtttttatatgcaaagaatgtgtaatgatcaagtcagggtaattggggtttatcatgagtgataaaccttgagttgcttattatttttttatgttggtatcgtttcaagtcctctcttctagttgctttgaaatatatgtaatattgttgctagtaccttgatctgctgtcaaacatttgaacttatttcttctatctaactgtatgtttgtactcataactgacctcccttcatatatcccttccccacccttcccagtctctgatatctatcattctagttctattctccatgtctatgagattaaagttttttagtgcccacaaaggaatgagaatacacactgtttgtctttctgtgcctggcttatttcacttaacttaatgacttccagttccatccatgttgctgcaaatgacatgatttcatcctcttttaattgcccaatagtattctattgcatatgtataccacattttctttatccatttgtccactgatgggcacttagattgattcagtatctttgctattctgaatagtactgcaataaacatgtaagtacaggcagttctttgatatattgacagatatttggatagataatagtgggattgctgggtggtgcagtagttctatttttttgttttyttgagaaatctgcatactgttttccatagtggttgtactaatttagattcccaccagcagtatataagttttctttcctctgcattatcacctgtcttgtstaactggagtgagatgatgtctcactgtaattttgatttgtgtttcccagatgattaatgatgttgaacattttctcatatatctttgacaattcatatgccccctttttttttgaaaaatgtgcattcatgaccgatgctaactttttagtaggattacttgtttttgtactattgagatgtttgagttctttatatattttgaagagcagtcccctgttggataagtaatttgcaaatattttctctcattcaagaggttgtctcttcaacgtgtcaattgtttcttttgctgtgtagaagctttttagtttaatatagtcccatttgtctatttctgtttttattgcctgtgtgttttaggtcttagccataaaacctttacctagccaatgtcctgaagagttttccttgtgttttcttctactagttttacagtttcttctagttttacagttacatgtcttctatttaagtctttaatccatcttgagttgacttttgtatatggtgagagatagtgatttagtttcagttttctgcatatggttattcagttttcccagcaccgtttattgataataggtcaggtcacaatttttgtttatttggagtcagtcttggtaggttgactccaaatacatgttcctggtgactttgccaaagatcagttggctataaatatgtggatttatttctggctcctctgttctgttccatttgtctatgtgtctgtttttataccaatagtgtgctgttttggttactgcaggcttctaataggttttgaaattaggtagtgtgatgcctccagctttgttctttttgcttaggatttgtttggctattcaggctctattttggttctatatgaagtttaggattgttttttctaattctgtgaaaaatgacattggtgttttgatagagattgcattgaatttgtagatggcttgggaagtatggccatttcaacaatgttaatccttccaattcatgagcatgggatgtctttctatttgtttacgttcgcttcaatttctttcatcagtgttttgtagttctccttgtagagacatttcacctctttggttaaatttattttcaagtatttttttgtagctattatatatgggattattttcttgatttcttttttgacaatttcagtattggtgtatagaaacattactgatttttgcacattgattttacatcctgcaactttacagaatttatttgcagttctaggagttttctgttggagtcttttggtttttctaaatataagatcatgtcatctggaaagagacaaatttaacttcctcttttccaatttggatgctttttatttcttttccttgcctgattgctctgctagaacttacagtattatgataaataggagtagtaaatttgggcatccttgtcttgttccagttcttagaggaaaagctttcaactttttccattcagcatgatgttagctatgggtttgtaatatatggcttttattatttgaaactatggttcatctatacctagtttgttgagaagtttttatcatgaacaggtgttgaattttgtcaaatgccttttctgcatctattgatatgatcataagatttttgccctttattctgttgatgttatatatcacatttattgatttgcgtgtattgaaccatccttgcatttctgggataaattcaacttgatcatgttgtattatcttctagacatgctgttgaattcagtttactagtacttcattgaggattttttgcacctatgttcagcaggggtattggcctstactttktgtgtgtgtgtgtgtgtgtgtgttcttgtctggttttggtattaggataattctgttcttataaaatgagctagggagaattccctctctttcaatttttttggaatagtttgaggagaactggtatcagttcttctttatatattttgtagaatattacactgaatccatctgttcttgggcttctctttctttggagacttttttgttactgatttcagtcttgctactcattattggtctgcttaggatttctgtttctttctgattttattttggtaagttttatgtttcctggaatttgtccatttcttctaggttttccagtttgttctcatatagttgttcataatagtctctgatgatctttttttcatttctgtggtatcagttgtaatatcaccttttttaatttctgattttttttgtctcttatctcttcttaaatgagttagcattttataaattttgtttatcttttcaaagaatcagcttttagttttgttgatccttagtattttttttctttttttcaacttttattttaagtttggggtatatgtgcagatgtgcaggtttcttacataggtaaatgtgtgccatggtggtttgctacatggaccatcccatcacctaggtattaagcccagaatcctttagctatttttcctgatgttctccctccccccacacccctctctgacaggccccaatgtgtgttgttcccccaatgtgtccatgtgttctcatcattcagctcccacttataagtgagaacatgcagtatttgtttttccttttctgcataggtttgctgaggataatggcttccagctccatccatgtccctgcaaaggacatgatcttgttcctttttatggctgtgtagtattccatggtgtatatttaacattttctttatccagtctatcattttctttgtccagtctatcattgatgggcttttaggtcgattcatgtctttgctattgtaaatagcactgcaaggaacatattcatgcatatatctttataatagaatgatctatattcctttgggtatatacccagtaatgggattgctgggtcaaatgatctttctgcctctaggtctttgaggagtcaccacactctcttccacaatggttgaactaatttacactcccaccaacgtgcaaaagtgttccttatttgcaatgtcaccagcatctattattttttgactttttaatcatagccattctgactggtgtgagatgatatctcattgtggttttgattcacatttttctaatgatcagtgatgttgagctttttttcatatgtttgttggctgcatctatgtcttcttttgaaaagtgtctgttcatgtcctctggcctgctttttaatggggttgtttgtttttcttgtaaatttgtttaaattccatgtagaataaattttaaaatagttttttctaattctcggaagaatgtcaatggtagtttcgtgggaatagcattgaatccataaattattttggaaagtattgccatttttacaatattgattctttctatccatgagcatggaatgtttttctatttgtgtcctctctgatttctttgagtagtggtttgtttttctgcttgaagggatccttcacttcccatgttagctgtatccctaggtattttatcattttagtagcaattgtgaatgagagttcattcatgatttggctctctgcttgcctgttattgatgtataggaatgctagcgatttctgcacattgatttttttatcctgagactttgctgaatttgcttatcagcttaagaagcttttgggttgagacaatgaggtgctctagawgtagatccttagtattttttaaatctctgttttatttagttcttctccgatctttattatttcctttcttttgttaatttttttttttttttttttgagatggagtcttgctctgtcacccacgctggagtgcagtggtgcaatcttggcttactgcaagctccgcctcccgggttcacgccattctcctgcctcagcctcccaagtagctaggactataggcccccgccaccacacctggctaattttttatattttcggtagagatggggtttcaccatgttagccaggatggtcttgatctcctgacctcatgatctgcgcacctcagcctcccaaagtgctgggattacaggcatgagccaccatgcccagctatcttttgctaatttggaatttgttttgtttttgtttttctaattccttgaggtgcatcattaggttgtatatttgaaatctttctggtcttttttttttttttttgacataggagtttattgctataaacttgtctctgcttttgctgtgtcccgtaggtattggtatgtcatgtttccatttttatttaataatttttttgattttcatcttaatttctttattgccccaatagttgttcaggagcatgttgtttaattgccatgtttttgcatagtttccaaaactgctcttggtattgattttaattttataccatactgttatgaaaattacttgatatgattttaattttttgaaaatttgttgaaacttgttttgtggcctaacatatagtctatcctggagaatgttccatgtgcttataagaatrtgtattcttcagttgttggatgaaatgttctgtaaatgtttgttagtcttatttgatctaaagtccggtttttcttgcttaagtgcaatgtttctttgtttattttctcttctgataatctgtctaatgctgaaagtatgatgtggaaattcacccattatgattgtataaaagtctctctctctctagatctggtaagatttgttttatgaatctgggtgtcccagttttcagtgcctatatatatatttagaatttttgtattgtcttggtagattgatctctttattattatataatgcccttttttgcctttttttcctgctgttagtccttaaaagtctgctttatctgatttaaatatagctagtcttgcctgtttttggtttcagtttgtgtggcagtatacttctccaaccttttactttatatgtgcctctattggtaaaatatgtttcttgtaggcagcatctagttggatcattcttaatctaatcagtttgtctatatcttttcagttgaaagtttaatcaatttatattcaagagttgttattgatatgtgaggttttgttcctgttgtattattaattgttttctggtggcttagtatagtcttttttctttttctcttgatcgtccttgtgatatgctttttctgtggtagtaactatcatttgagtcttttttattacttatttgtatgtacttaacagtgagttttatattttcatgtgttttcatgatgatgactattatcctttaacttccaagtttaggattctcctgagcatttcttgtaagtcaggtctagtggtattgaattacctcagcatttgctcatctgtgaaagagtatttctttttatgtgtgaaggataattttgcttgatatagtacccttgggtattaragtttttatcagccttttgaatatatcctcccattctctcctgtcctgtaaggtttatgctgagaaagagatccaartgggcaacttgaagaaaaagtgcctatcattgattttagacagtttgactataatgtaccgtggagaagatttgtggcattgtgtctgattgaggattgctgggcctcctgaatctgggtgtctagatctcttcctagatttgagaaattatcttctattatgttgttgaatagttttttgaacccttctctctttgctttgggggatatcaataattcatatattttgtcacttaatagtttctcatatatcatgaggactttgttcattctttttattcttttttatttttatttgactgggttacttcaaaaaaacatgtctttaggttttgaaattctttcttctgcttggtctagtctatcattgagtgtaccttgtatttcattaaaggaattcttcagctccagaattctatttggttctttttaagatatatatctctggtaaatttctcactcgtagtataaattgtttttttctgatttctttgtattatttttcacaattttttatcttactgagatttttttgtatgataagtttgaattctttttctgagattttgcaatttttcttttattaggatctgttgctaagaaattcttatattcctttggaggtgttattattttcttgctttttaatgcttcctgtgtctttatgttgctgtctgtgcttctggtgtaacagtggcttcttctagattttcgactttacttatatagaggaagactttttcctgaagttctaaaaattgtgttgtttgggtagggttctttggctttgattttggctgtgtgccatagcatattctctgtatgattttttgtggctgtaaatagcatcagtagtatctgtgatttcctcagtagtttagggtacagttattaatgaaggctatggtgaatctttgctgaagacaaagatgccaactaggacagtctttgggccccaattggtggcagcagtgggctaatattggatggcttatgttggcactggtgttagcagacagtcagactgatgctgagcttacctggatttcagtagtggcagcagtgggttgggtggctaagagggtactcaggaacctgggaaccattgtggtgtaggtgatggaagtagctgtggcaagatgatcaactgggtcccaagacatacttactggtattggyagtggctgtggtatggcgtcactactgacagccccagacacacaattatcaggctctctcactctctgtggcagcaatatcacaacactatacaaagtaggggatggatcccacctttcacatgcaagcctgagcatggaggccatgcaaccagcaagggtgcacttggcactcccagccccaaacaggcagccctctgattcacctacctcagcctctagcagcagcggtagtggtaggcctgcagtgctgtgtggaggggcagaaggggttctgctctctgtgcatgagtctgagcacagaggcagctcacagtgggaggggctctcattctctgcttacaaggccaagcacaaaagttgtgctgctgctgaggttggggttgcttgtctcagccccaaagggagctcctgggctctagaaacatgtgctttggtttcctttgccctaggggctgcaattttgggcatttacactgtcatttccatgaggaatagtactccctgtgggctggagtactgggggctctccagcatccttgggtctagccagtgctgtgccactgtagtcctttggtgggaatgggaaatgtcaatggggacttacaggatgtggatatatgggggatgttcccaggctggattctgtcctgtgatggctattttctcaaaatggtgcccagttgcagctgcttaagtctcagaggtgaggaagtgaatgacctagtgtgagttccctgtctggtataatgcccttgtggtgtctctgaatcatcatccacagtagtgtcaggggtttatgtgagtaaaagaactctgcttggttgggattgcagcaggctgcagtggggatgtggaccactgaagttctctcacttaccctttccctgtaataccaagcccctgggggctcctggccaatatcaactgagctggctgcatgcttccctctccttctgtgcctctagtggtccccatgagttctctgttggactctagtgtcctctcctaggtgttctattcatggtatgattattcataattttggtttttctttctggggaggacaggtgtgcaatgtttctagttagccatcttgaactagaattgcttcacttttcttgatgcaggaagactgtcttcatttttttgtttgttttgttttgttttttatactagaatagtgacaattctacaataaattttctgtggagttgggaacgttttgttttcaaactgtaaatttttgtttataaaagggaattagctcccagcttggaggtattttagttgctgttgcctattatagatcttgttgtttcagaaaaagacacagtagtcttaaagataaatagatattctatcacagtgtatataaactgttaatgagttaccacagattcttaaatgacttatgatagtcattaagcttctccaaatagaaaggagcttacagattcatggatttatatgcagcatgtctgattttgaaacctgctgacaaccaccttccagaatttaatcctacctaagaggggattttctagtttaggataaagaagagttctgagtgattcaaggagtcattcaagtgaaaaatcacctagtaggcttcactcatctaaggcctacttacctcattatttatctcaattattatttttctgacattatctgaaaagcatagacaatttattatgaaatgtttaagaacacctaatccctacccccagtaactggtgtcaccgttgatccacatagttaagatagttctgttagttcattgttgtccatgtgtggaaacatgaaatctgcagatcttaaagactctttgaagaaatcagaaccttcttcatttgaacattaagacagaataataataaacaggaactcctacaagttccrggggtaagatagtccttgaattgcagtcctggtcctgacagttactatttgggaaaatctgggcaaggaatttattttctccaatgtcacttatatctctgtgttttgagagttggataagattatgtaaatcctctagtccaatacttagtccatcataattgtagcttttactacataacagtggctgtggagcctaggcaggaaaagatgttgctcgtttgagggtaactgagatgacagtaactttggaggtcaaaacaaaaagcagaaaataaaacacttcaatctgcgtattgtgaagcctgcagggatatgagcatggtccctgacttgttacaaactaagccttctactttattgatttccacaaagaactggccagggcaagcatgctgctttagctgatagcagagaggccatgtgctaaggattgtggtggttttaaaacctgcacagtctttaaaacttggtattttagatgaatcccaaatggctttattgttgttattaaactacaagtataaatgggaagttctctttcttaccttttttctccatttgcaattttaaacattgtttatcgcttattatataacaaattgaccaaaacatactggcttaaaacaaaatgtgagtcacttttctcacaggtttgtgggttttttggatggctcttctgctggccttacctgggcccagtcactcagctggtggtcagctagggctgatctttgctaggacaaattggcccagctactgaaggcttcattctgagcttcttcatatgtcattggtctcagggcagcattttaagaggataaaggaggaagctgcaaagtgcctggaggcctaggtcccaaacatcacataatatcacttcctccacatgtttctggccaaggcaagtcacaagaccagtccagattcaagggaagaatatagattttatctttaatggactaagtggaagaatcatatgacaagcagacatgggaataattattgtggtctttttttattaaaaaaaagaaatttggctgggcggtgtcgctcatgcctataatcccagcactttgggaagccgaggcaggcatttgaagccaggagattgagaccagcctggggcaatatggtggaaccttgtctctactaaaaatacaacaattagctgggcatggtggtgtgtggctgtaatcccagctactcaggaggctgaggtgggaggatggcttgagcccaggaggtggagttgcagtgagccaagatggtgccactgcactccacacaacaagactccatctcaaaaaataaaaataaataaataaataaatacatagaatctaccttggcttttcataaagaagtagtcaggtggatttataataaggaaaatgatgctaagtgaccaaaaatgcagggaaagctcctgctgtgaagagcaaagcaaaatttgttccctcaaatgactgcttaattacttgtaccttgccaagttgattgtttaccttggccagggtgactgtatgtccaggtttgttcagggcagttctgtttgtttactttcccaaagtaaaataaaaaatagtactctctcttcttctcaaaaaaaccaatttttgctggataaacataaaataagttttctgttcccattaagtatagttcaactgtatacatttgtactttgacattccatcatgctatgataaaaataattttgactagcctttgacctttatacactactgaggccattttcaaggacaggtgtattcacagaggggaaattttaaaaattccaccattctaggtcctctgtcattaatatattaattggtagctgtagaatcttttagcaagaaggtggctgttgagcccagactctctgtgggagctgcctaaggagtcacttcatccaagggcaagattcaggaacaaataggcagggagaggaaatascactaagagagtaaatgctcaacatctacctccctataactaaaaattaggtaatgtaccaaatttatgtaatttccactattacagaaaacttacgtaaataggcattttatgtaaaatacaaaaaaatgcaaaataatgacaataaccgaaacaatggaaaagtcattacagctaatagtcaaataaataaaaatgaagcaactttgagatagtgtttactgcattcatgctctgcctttctttttttttttttttttttttttgagacagagtctcaccctgtcgcccaggctggagtgcagtgacgcgatcttggctcacagcaacctcctcctcctggattcaagcagttctcctgcctcaacctcccgagtagctgggactacaggtgcccaccaccacactcggctaattttttgtatttttggtagagatggggtttcaccatgttagccaggatggtctcgatctcctgacctggtgatccaaccgcctcgggctcccaaagtgctgggattacaggtgtgagccaccatgcccggcctcatgttccccttttattgtcctccagaattataacatctaaatgtttgatataatacatgtagctaatcaatgagaggcaataataagtggtctagctccccaaagtcaggctgtctgtatttaaatccagtttcacaccttactaaccatgtaatttggagcaagctgctttctctctgtgtctgttttctcatctgaataaatggaattgaccataatatccaccttacagaatttttgtaagaaacaaatgagttaataaacacttgaaaaatattagctattattttattgctgtaggccttggacattgatgcaaaccttttaaaatgtaaaatggcaatgcatatcaagcactataaaaatgttctttactttgcctcagtaaacacatttctaaaaatttacctcaagaaataattcaacagaagaataaagatctacactgggaaatgtctggtgcaatgttatttcctttttatgacaaatgctgtcaattgtttcattttccaacattgtttacaatgcttgagttaaatggaattgttaatatttttattctcatgttacaaattagaaaacatgaattcagattctggtaaatttctaaatgttcaccaatcataactagttcaatttattatggcataccaataaaatgtatactatctagttattaaaaagaattaagaaaatctggttgtagagatatgaaaagatctaagatataataagcaataaaacaaatagttcaataccatttaaagtgtgatcctgtgcgtgtgtgtgtgtgtgtgtgtatttatgctgagaacattctgaaataatatataaataactatggagtaggaaatagagtgaagggattctttgactttttattttatatgctgcttattttcttaaatgaacatggaataattcaacgataataataatattgttataaaaggagaaaaataaattctatggagaaagagagaaagtggaagaatggaaagcatgctgtattctaggtcccattatggctaaaagtccatggagttttactggcaccaggctacagggtggtgatttttgccagccatatgcagtggcctagggtccagcaatgagaaagtagagagttgactgatacaggattgaaatttatatcaggaaagtgagatgagaaaattgaagatattggccagagagtcattaacatgatgggtaggtctgtagatgggaagaataaargtcaagtgggggctgataaggagaaaraaaaaggtcaagtggtgataaattctgagaaggttaaagaacagaagtataagaggtgactgagtgaggaaacttgcaggggagggtgaggaggtcagttgcaggcatagaatctttgaaataatcccttctaatctccctattttacctcatcatctgtgaggattaaacttcctctgactccctaatgcactattactgcctcacattttaaataaatggtaaaaatgatgcagactagtttttccctaaaatcctccctttcataatttaatttacactaccattttttttttttwwwaaaaacaggatckcactgtatcacccaggctggagtacagtggcgtgataatgtctcactgcagccttgaactccctagctcaagtgatcctcccgtctcagcctcctgagtagctgagagaacaggcatgcaccaccacacttggctaattttttgtttttattttgtagagatagggtctcactatgttgcccaggctggtcttgaactcctgacctcaagtgatcctcctacctcagcctcccaaagtgctgggattacaggcatgagccatcgcacccagcctacgacggtctttgatcctataaattcagcatttccttactccaatccaacaagaataaaatcagtcttatttcaaggtctttcctgaaaaaggcttgaattacttttccacactatgcttccacttaaaaagaaaaaaatgatgactgcctaagttcaaatctctcatacaatatttaaagaaaatatttctagtctatgggtagcaggaaccttgaactgattccatagaaatagaaagaagaaaacttaatatacactcatttacttaaatgtgtttattgaatgatggttatttaagatcctttgaacaaataacacagatctttgtcatttgttgctttttaaataactttcttattattagaaaaataagagttttttatttgaaagtatctgttgaattgtttcatttaccttaaaaaacaagagaagactgccaagtgtcaatgtgctaaatgctaattattatttttcaatcttaaaatagtgaagtcgaatatattaggaagcctttggagaaaccattctaaaagcaattgtatattggagttctaaagaatggttggtttacacacctacattcttgggctgtcacctgggaaaaattatttggaaaaacacatatttgctgcaactcagctttaaaataaacttttaattttagaaaaaaatttagattttcagaaaagttggacaggtattatgcaaagttcccatgtgtctcatataagccttcccctattattaacattttgtgcaagtgtggtacatttagtataattagtggactaatattgataccttatttttatctacagctcatacttcattcagattttcatagtttttacctttttgttccaggattctatccaggatagtacattttatttaatcatcatatatccctagtttcttcttggctatgacagtttctcacatttctttgtttttatgaccttgacagttttagtcaggctctttgtagaatgtctctctactggaatttgtctgggactttttgcataggtcaggctagtgttacatgtttttgaggaggacaattctcatcaacatcatatcgagggcacatattatcaacattacttagcgctgttgaggatcatgtggatcacttggataagacagtgtttgtcaggacctcccatgtaaatttactcttttttttcttcttgccatagtgctttttggaaggaaatcactgtacacagaccacatttaaggagtggggagttctgctccacctccttgagggctgagtttctacaaacattatttggaattcttgtgtactgaagatttgccctttctccatttatttattcaattatttatttatatcagtatggatgttaggttatttattttatactttgggttataatctattattgctctatttatttagttgctcaagtttttgtaacattggccactgggagcaccttcaattrttccctttcttcttttgaataaacctatcattaattttttttttgaggggtrtgtgagaacagggtcttgctctgttgctcaggctggagtgcggtggctcgatcttagctcactgcaacctcgacttctcagcccaccccagcctttcaagtagctgagactgcaggtgtgtgccaccacacctggccaaattttaaataytttgcaatgttgccaaggctggcttagaactcctgggctcaagtgatctgcccgcctcggcctctcaaagtgctgggattacaggtatgagccaccaggcctggcctgagtttttttctctttctttttttgattacttcttttctttctggaactaccagcctcaccttctatacttcttttcacatccagaaaattatctattcatctatttctctaagtatccctagttcttttgttttttttttttttttttggagaatgatattagaagaaccaagatctggcactggctgtgctttgctgctattgaggtgtcattgcaactagaccctgtttcattgctactagactgtgtccatggacaaagtaaggaaatgtatgtttttagagtaatctgtatatatatacacatttatgaatatctttttatataacctctatatattatatacaatattaagctaaatattagtttatacctattaatctaactctaatccattaacagatgagcattctagcctcctcctgttgctaatctgtaatctccctttccaacaatgagaaatctggcttccaacatatgtcatgtgtgtccttaatttttcaatttcggcatacacatgtatcagtattggaattgttaacctaaactcctatgggccaagcaattttatcaactagagtacagtgcttatgtacagatccttttgtcttcagtcttaatcactaaacacatttgcaaagttgcttggtcaataccttgtcctaccactctcttcagtgaagttgttttatacatttgtaatatataaattctgcattgtatcttgggattcccccgatctcctaattgattttataacaattctgcatacattaagtttcactttttgtgctgtgaatttttatgggttttgaaaaaggcatagtgtcatgtattcaccattatagtaccccacagaatagctatgtaaatactcctctaaaattcccctgtgcttcaccgattcagtccttcctgcttgtctcatcagttcctggcgactaatgatcattttgctatatttattgttttgtcttttttggaatatcatatgtagtcttttcagaaggggctcttccacttaataatatgtacttaagatttatctgtatccttccaaagtctaacagcttattttttaattgctgaatatctcattttatatttcatagatgtaccagtgtttgtttttctgtttttctrtcaaaggtcattttggttgtcttccagtttgggctgattacaaataaatgtgcaataaaaatttgcatgtagtttctagrtaaacrtgctttcaaatcagttgggtaaatatttggaagcacaattgctgggtcatatggtaaggttatctttagctttttagaaattgccaaattgtcttccaaggtagtggtaacattttgtattstcaccaacagtgagtgtaaactactgttgatctgcatccttactaggaattggtattgtcagtcttcttggattttagttattctaataggcatgtagaggtatcttgttgttttaatttgaaatttcttgaggaaaatttatgttgatcagtttttcatatgctgtttgacatctgtattcctttttttgatragctatctgtgcakatcttttgcccatttttaaaaatttcttactcttgacttttaagagttgtctgtatattttggatataagtcagatatgtgttctgcaaatattttattctagtctgtgtcttgtcttttgataccttaatagtgtcttttgcagaggaagtttttgattttaacaaagtccaatttatcacatttttatttcacagcttgaacttttatggttatatctaagaactcaccaccaaataaaaggacatcgagtatagcttttatattctacatttaggtctatgtttctttttgttatggaagccttgtgcttggttatttttatgtatatggatgtccggttgttctgacacattgttgaaaagactatcttttccctactgaattgtctgtttctttggaaaaaaatcaactggctatatttgtgtgggtctagttctgggttwtctatttgtttcattcttccatttttttyctactcttttgccattacaacacaatgttgataactgtagttttgtaataagtcttaaaatcagatagtatgagtcctataactttgttcatctttttcagtattgcgttgactattctatttctttgactcttccataaaaaatttacaatcrggttgctgttgctgatatctacaaaattaattgctgagatttttggggttttgtttaatctatagacctatttgagaagaattaacatcttgataatattgagtctttcaatctatgagcatgggatatcttttcatttatttagaacttcttrgatttatttcatcagatttttatagttttctkcatatagacctcatacatattttgttatatttattcttatttcattttttggaattaataattatataacataaaaattataaaatttatatattataaaattataaaatgtttaacatgaaattcaagttgttcattgctaatgtatagcaaagaaattgacttttgtatattaaccttgtatcttgcaccagtgccacacttccttatttgtctccatagtttattgttcttgtaattagttctttagtattttctacatataagtcatgtcatttacaacaaaaacaaaagacaaatttatttcttctctttacatttgtgtacattttatttccattttctaccttaactgtctaggaattccattatgaagttgaataggaatgggtaagaggatattcttgccttttccctgattttagaggaaaagtatctagtttcttatcattaaatataatgttaactgaaggttgtttgtagataagttaaataaattcttctctgttactactctgctgagagtttttattttgaatacatgttgaattttataaaaatgctttttctgtatttgataaaatcatatcgtttttcttatttttgcctgttcaggtagtgaattacatttattttcatatgttgacccagacttgcataactgaaataaatatcactttttcatacatagttagatatgatattctatatatttttgttgagcatttttgcatttatatttatgacagatattggtctatgctttacctttcttctagtgtctctatctagtttttatattaaagtaattctgtcataatagaataagaggaagtgttctttctgattctactttctggaaaggatggttaagaatgaataagatctaatatttgatagcacaacagggggactggagtcaaaataatttaattgtacatttaaaaataactaaaagagtataataggattgtttgtaatgcaaaggttaaatgcttgaggtgatggacatccaatttaccctgatgtgattattatgcattgcatgcatgtatcaaaatatctcatgtaacccataagtatatacacatactatttactcacaaaaatttttcttaaaaaagaattggtatcatttcttcttttaatgttttgtagcattcacaaatgagctaatctggaactggtacttttttttcagaaggttattaattattgattcaattttttaaatagaagacttttcagatagtaaaacccatttataaaagggcattcttyttcagcacaattttaaaatcactacaacccaggtaagatcaaacatcataaatatatacctaatcacaaccaccaaaaatggtaggtgttatggaaaccagtgatataaaaaaaatgacctcttaaaaatggatggggtgttatcttctttctttctctcattttctgtccttactgcccactggccgttacaggataaccctctgtgttccctgtggttagtttacttctatttaaaaaatcagttatttcatagtggaaaaagattccaccaactcaacacaaatatatccataaacttattcacagtttaccatgtgattcccatcaaagcctccccattttgaaaatagcattcaaggtcccatatgctctctggcctcagttctcaatatacctcttctcacatcctacacttccaccatatttcagaatttgtagtcttactaacaagcactgccctccttgactttcaggcttttgtacatgctatttctttacttgtaacactcacttgcctctttcctggctagttcaaatacattcttcagatatcaccctaaatatcactcctcagaagtcttccttgccttcccctttcattaattctctccttcctcctcacaaggtaaaataaatgcctcttctatatactttctcagtattatatattaatctctataacttaaaaatactgaaacttcttccttactagcaatacttactaccactagcctgtgtgttattctccgtttataatccccagcacctaactgttagccttgtgtgttgcaggtgcttgttaatgaaacagaatgttaaaatgtgagcctttacctgttttcaaaatgctgttgggaataatggagaaggcaagaatctaccacttttacagagtgttgttagttcatttatccaggacttggaaaatatatggttccaaataggttctgagaccctttgtctctctcttgcctctgggttgtacacaaggagacttagggattctattttgttgttgttgtcgttgttgttgttgtttttgttgttttgttttttttgagacagggtctagctctgtcgaccaggctggagtgcagtggtgagcgatcttggctcagtacaaactctgctccctgggctcaaacaatttccctgcattagcctcctgagtagatgggaccacaggtccggaagccattatgcccagctaatttttgcatttttagtggagacagcattttgtcttgttgcccaggctggtctccaacacctgagttcaagcaatctgcctgccttggcctctcaaggtgatgggattacaggcatgagccaccactcccggcccaatttaaggattctgtagaaaagtgtttagttatttctcctaatacctaatgtaaatgacgagttgaagggtgcagcaaaccaacatggcacacgtacacctatgaaacaaacctgcccgttgtgcacatgtaccccagaacttaaagtataataataataataataataataataataataataaagtgtttagtgtaattttttttgaggatagtcataatattgtctctaatctcttatactctctacctcctaactcaagtcatggaaagagatacttcaaagaaacaactcatggccctagagtatggaggacacatggaccactgcttgatttacatgtagtaaaatctaactgtgagcagctttctggaacttttcctgagagcgaagcaagaggaggggcacatgctggacttcctccaacagttgagcaagaatatatgacagtggatatgactacttgtcctgtgggcttgcatagctttgaaaatgcctcagacaagagatttgctgtcctggatgatcccacagagagagtttgtgtgggctgtcccaccagaarcaatatctaaaaggggaggtgtaggtgttaagccaagagaacatcaactgtgctaggaatgtgtggtagtagatttccaataggcacttctctgaataaatcataaaagcactccataaagaagaaagagcatcttccaaaaagtgagcatttgacagccaagatagaatcataggcagtattaaataactaaaaaacaaaacaaagatcttgttttctaacatcattcttgagtgaaaggaaccaagaacaactgaatttagctggagtctagggctaagacagtgaatgcacaaaataggccttaagcatctcctactyccagaaagtgagaaagtaataacactaccaatatcacacaacaacaacagcaatccyatcccttcattcctcccccaccaccacacacacagtgctaggggtgtgtcaaaggggtccaggagccaactgaaagaaytttcagtggtcaaagctggaagaattttagcaacaaaatgaagtaattggcttataactcaaagtttaaaataagtacccatgattctatacagttatgagtaaatgactgaataaataaacgtgggagagtagctaagtctctcatatagcaaaattctaaataatttctgtagatactctgccctcaaggaggtggaacataactcccactcttaaatatggtctgcacttactgactttttttttccccaaaaaactaccatagggaaaagagaaaagaaggataactttagagtagagaaaccagacaaaaagtgccttatccaggtgattaaggtcaaatcaatagtgatatgtcatatgtagataatatgtacctttgacatgatgtgatgagaatgatactccacttctgtggacttcctccccaaatcctggtttaattatgagaaaaacatcagacaaatctcaattgagagacactctacaaaataattgaccagtcctaaaacttgtcgtagaaaactggaaaagtctgagaaagtcagagacaagaggatcccaagragatacaatgtctaattgaaagaaggtgtgtgggatggaatcgtaaaacagaaaaatgaactaagaaaatctgcataaagtctgaactttagataataataatgtatcaatgttcatcaatgtagataataatgttcctaattataacatatgagccatatgaatgaaatatgttgataagactagaaactggccatgggatatatgggaactctctttactatcttaacaattattctgactatctagaactgctctaaaataagaagatatatttataaaaatgttgttgtaaagaaaagaaaaaaaaactcatattctcttttcctttatacttgttccctgttataaaaggagagtacagggcatatagaataagaagggccaaggacagaacctataccctccttttcccccataggtttctamggctgagaggcgagagctggagagggatgaagagaagatttaaacttactgagagattgaagttttaattttgattggaatagaattatttaatcattaaattaaattaattatttaatatctaataatgccactgttaataccagaaaaaaaatggaaaaggctatgggaactttctgagatataatttggggaaagaaaggattaccccagaaaaagtagaattgaaagttactttataagccaagtaatattgtttcttgattccactctacacatgtaggtagttcaatatacttgttaaattaaatattcattgagtaaatgagtgcatccacacataaacaggcatttcagcttcacacgctgtttgtatattgcacccaccttacagtcatcaccagtgtttgtttgcatttacatagttgctcaggacctgggtctggaaatcggaaaaccttgatgaggtttgcttgaggtgagggactggagaagccaaatggttggaagggatggaaggcatttcttctccattcagctccmtggcctgggttgataccttatggaaagagagagaaagctcaaaataattgctgcaacagtgcgggcaaggctaccttttcctagcgggatttagccagcaggagaggtaagtggggcaggaaagaaaagggagaataactgcagttggtaaagtcccttttctagactctcaaaacatagttgacagcatctgtgacagggactattttcttgggtaggcaggtaaggtctcaaagttactgtagttttgacctaaagataaatttgaccccatttgaaatgtaaaattggtatgactagcaacactggggatacacatgtattttatttgatccctgggtgtaagagatccaatgttattcttatatccatttttatgacaaagaaactggggttcagagttcggatttccttgaggtcacacaggtrataaactagtaaaagtgagactcagtcttagcaatgcattctctgcatttcatatataaaactcaatataaattgtcattaatttttggttagacaaaattatacattggttgagcatcaataacaggacatgcagtaagcaaaatgccaaactttcagtgtgttaccacatgctcatagggactgtattaatcattttggttttatagggaacttatgggggcagytgttcagttgtttgtttctgacttgaatttagcagccacagatcagcaagtgtggaaaatgccagatggggaagctgcactgtgcttccagtgagtggcctggcccatgcccatttcatgagagtttgatttcacacccaccaaactcgttattgcaaggtttttacaaaagacctcctttcctctttggttagaccattttctttatagattgattaagctgctattcatagctagcaccatccccttcatgagtcattgaattctttctggaacatcttgagttccaggtgacataaatttcaatttgcatcttttctgcccaacttctcccacacacatgagaaaatattgttcaagcatattactgaaagtttcatagacctctagttacctgggtttttaccacccacttgaacagaacctaggtagaggaaaaataaaactgcctatgctcctttctcttatatatttttgtggcttcacttgacagctttaataaatgtaggatacaaattccaggtccactcttggacctttgaaaactaatttatactttagtaacatttacttttttacaacctatagccatttgtgagtagattttttttttttttgtatccattagatgattatgttttcagcagattagggaaatgagtggagaaggtgttcaagaccacttgggtttttacagtaagaacaaattggcagcagcaggtgtaatgtgtttgggaagagaagcagcatgtacagcatgtgcatgccaaattgctagctaatacagcagttgctggctcctacaatgcacagttgtagcacatatatattttttaagtaggtttttttccacgctgtgattaattttcttccatgtaacacaattgaacaagaytgtgagcctctctcatgccagccattacctcttgtactttctaaatagcatctacagccccattccctgcccctgtgaattcaggatcagatggtataggagtcttatcattacaggtctctgggataatctcatatgcaaaatgatatgcctatactgatgctcaatttagaatagttgtggtgctctgtttcaggtaatctgaaggaaaatgaattattggaaataatgataatagaaagaatagaacttctatctatttctaatagaaatggaacttctatctatttctaatagatagaaatggaacttctatctatttctaatagatagaaatggaacttctatctatttccaaagttcatgaataattgttgtccactgaccttgatgatttgaaagctagtatatcaatcaataacctattaatttgacagtaacttgggtagtttgtttgcttgcccttggtttccaataggacttgggaagctggatctgagagataacagctgtgtagaaatacttgagtgcttttcttgtatagcacaaaacttggagaaacagcctctaaagctttttgagaaatataaaatatgtacttatttttgtccttctggatcttatatcctttctgcaaagagtaaacaaaagtatatttttttaacctgatgcatttttctctgctatgttatttttggtccttttctttatacccccaaataatgacaaaagatggcactcttttgccccttcaagaaataagtccacatgtatttctgacatatttcttccagaaatctcacaaagacaaagtgagagaagagttctaagttacactttgctctaaggataaatcctatacatattgtacaattaggacatgtcctgcacctgggccagagttcatgtaataagatatagttccatataacaatgcatgtatcaagcctgttgagttatgaaacagcaccttgcaatctactacagaagctgaaattgtgtgggaagtggattaaatgattttgacccaatttatttaatgtatctccctctgtcaggtttaactttatccagtaaaatagaatagattctgccttttctaagtcttcaaaaatgtctcaggcattttgggggtggaggtgaagctaatgagaaaatctgattttcaatacatattttgtcttcttgtaatatttgaacaccaaaaatggaccacataaacacgttctttgtaacctgtgttgggttcatttttctgagtagaactaacacctagattttcaccacagctgtcgtgtgaagtctttaattctcagttctctcaaattaactatatctcttaattagagattcctaagaaaaatttaactattagaattatctcttcagatgcatgtttaaaacaggaagtaacataaagagagaaaattgtgtgttgggttgtttcakgttaagactgctaakatttgctgagcacaatgtgacagatactaagtacctaacattgtttaactcatgtaatctacaaatgcaataaccctttgctgcttttgaagttagaaaattgaatcttagctagcacaactagtaagtggcaaagatgggatttgaacccaagtattttctccccacccagtcttctagtcctggggcctactttcttaaccacaatgctctcctgggtaattcctctatgtgtcagctactagatggcatcaaaaagagctggactattttcattccacagctccctccaccccattgcctctgtaccatattttcaagtcctcaaatagagcgaagtctgcgtatcttcccttgggggtctctgcatttgctggtttctatgtattagagtttcccagagaaacagaagcaataggatatctatctatctatctatctatctatctatctatctatctatctatctathtacctacctatctatctatctatctatccattcatccaatctatctaatttattataaggaattggctcatgtgatttggagtctggcaagtcccacgattatctgagtgagtcagcaagcaggagacacaagagagctaagagtttaattctagtctgaaggctggcagtcacgagacccaggaagaaacatgtttccattcatgtctgaaggggagaaaaagccaatgtcccattcagaggcagtcaggcagaaagaatcctccattacttgagggagggtctaacattttattctattcacttcctcaactgattagatgaggcccactcacattacaaagggcaatctgctttactaagcctaccaatttaaatgttaatctcatcaaaagccagctgtatagaaacacccagaataatatttaactaaatatctgggcactccatggcttagtcaagttgacacataaaattaactatcatagtttgattcggaaccactcttctttccttctttgcacacttgtctctttcttatgctttgaatgagatatttctaactctgaaaggccatctttgaccactctgtataaaacaagtttcttctccccttaatccactgacattatctccttcacagcatttatcactttttataactcacattacaaatgagatatgcatttatttgtttacctatttaacacttgcttccctccctacttcccccatttaaatgttggctgtatgaaagtagagaacatgtagactttgttttaggaactctattctattaaataaatgaacgcagaygttcaatacaatatttaacatgttaggtttagcaaaattgtggttatggtttgtatgtgtgtttgtcttttttggtagaaataggcaataaaacatattcactttttagttacaagagaccacagtaacagattccctgggaacttaaatttaagaggactataatttctctctgagactaaaatttacatgaaaatgtaatagatcacagtcaagatggttaaatcactttaaaaagttgtagcagtaaagtgaggtccaattgtaagctcattcgtgttgtattatttctaaaggacagcatttgttaagggctgaaatatgtccccccattcatatattaaatccctaacccccagtaccttagaagatgactatatttggagataagggttgaaagaggtgattaagttaaaatgaagccatcagtgtggcccctaatccaatctgactcgtgtccttataagaagaggaaatttgaacacacaaagagagaccagggatgtctgtgctcacagaggaaataccatgtgaagatacatgaagaagacagccatctataagccaaggagagaggtctcaggagaaaaccaacctgccaactccttgattttggacttctagcgtccagaactatgagaggataaatttctgttaagtcatcccatatttgatattgtgttaggcagccctagcagactaatacagcatctaacaatcagagaaaagttggacattcatagaaaaataagatagtcacgaggcaaatctcatcattacgggtttaagcatcactcaaggaagaaagaccacagcgtgtgtgtatccatcttgttgacaagattttctgtgatgaagatgagatgaattcatcagccaatctcagcctgatgccctcacatcttcaatttttgtgtcattcacaaaataaacatcattatgtatatggcagacaaacttctcagaaggctcccataatcctcagctccggtatttgcacctttgtgtggtttttccctctcctagattgtgagtagaacctgtgactttcttccaaccaacagaaattggcagaaggacaggactcacatggttacatgagtgtaacatgttaagtaatatgtgtttatgttgcatgagatgatagcatccatcttgctggcatctcttttgctagttttgagaaagtaaacagccatgttagggaacccatgtaaaaaggaactgcagatgacctctagcagctgagggcatccgctgaccaacagccaaaaattggtgatttccaatcagaataagagagaaaaagccagcatttattaagttcaaggcactattctatatgacgcacaaaagcaaactcaattctaaaaatggatacatatattatgccccttttacatatgagaaaagctagcactgaaggctaaaataacatgtacgtttttataactggtaaatgataaggctgggactttktgctgactttcatatagcaaaatgtctttcacaatacaaccagtctcaatccacgactccatgaattattttcttctttctcttcccatttatatttcccctaatagacagaaaaactcttctaggacaggaactgtgttatgtgattgtatgttgtccatagagaatagcatagaactagacataaaaaatgaactaawtttttttgcagaaaatacatacaatggtatcttactgagtatctcttcctaattctgtcatcagtgatctcatgttggtaggcttgaaattggacatgataggaggattttcaccacagacactgaacactacacatcaaggcttgacttactgttttcttgattatctaggtttaagaaaatggtgaacaatatgttgatcatgcagattaaaggtaaaagggtttagcaacacaaaaaatgtacatatagttgaattgtagttataggttggtatggatacaagaataggcaaaaatctaggaaagcattattaagaaatcagtgactatatgaaatttaatagactattggatactttattacttgtaaattatgtgatacctttgtatctgtaagatttataataaacgtatatacatatttatgtttacatgcctatgtgcatgtgtacatggacacatcactcttattgcaagttactagtttctttatagctttttaagtaaaatgtttacaaatagcataaaccttaccgtggaaaatatagcacattctgtggatatctagaaggtttgttaaatactgttatgtttaaactgttccttgtatttgaacattctagatttggatttgatatttgtatcgtagtgggtgtagagggatcagatgataagttgtagtgcaaatccttgagtgtcattgcaaactacaggtgtgcttttggtttaaaaggtgtaactgaaagggccttataaatgactggtgctttttttcccccttggagatatgattatatgaatttcttttatggctttggtrtttctactttaagttatctgtaattattatctccaattgtcaatagatatttctcatactatatttttttatatattattttcaagtggaatccatggtgcagataaggaagttaaaaaacatgttaggaaaaaaaaattggtcataatgtagaaagacatatctatgatcttaccaggtagattgcataatgttgaggtaaaaggcaactttttatttaaaaaataccttttcttgaaatgtaagtgaagttgtactttgggcttagtagacaccatttccaaggaataaacacttttatttctgccctttacaattctggaacgttctgctactagaatgcaattctactagatcagggatgtttccctgcttttttcactgccatatcccagcatcatgtaaatatttggtgcatattagaagctcaataaatatttactaattaaatgaatcagccccaggtagatattgagtggaaatgcagctgtgttactcgtaggctattgggaaatcaataacgatatctaggctagttaaaacacatttgaacgtggactctacaacgtggtgtatttgtaacagctatgaaagggcacaggtgggaattcaatctcttaaatgtaacctgagcacagacaatatgtggttttgcacacagaaccttgagttacttgagtaactaggtaggtgatatttacagtaaccagagggtaaaaaggatgtaatggtagagtgtaattatcatagcttcttttttgtgacatagcattgtttatgtcatatttgtactacttctggtttcatgtcagcttttcaggaagatctgtattgacatgggcatgagattgaagcagatgatactagccaataatagtaatatttattgagtgtttccagtatgccatccctgtcctaagcactttacactcatctcattatctcatttaatacggacgaaggctttgtgaattacctattctgattatttcatcgtgttgatgagaagtgaggaactcagaggtgtttacattattatttttccttgtagagcttttacattcatgatatagcagcaacagaaatatatgagacagatagtaaggtatggtggagaaagtagaaggtttatagaattagctaattaatctttgtcaactcacaacccaccctggacctcagtcttctcatctgtaaaatgacaacaggtcttcaaaatcctccgtagtttgataaaacatttctatgactcttgttttgatttttttcttgagtgagtccatctattctttctgtccaatggaaacttttgttcttcatttcccctttttttttcttttttccttttgtttggcctctcatcatgatttcacggcactatgggtcaaattggatttgggactgaactgagagccaaataacgtggttaacatttcctaaggtcaaccatatttcacagtaaattttccttctttcgatccttataagaattgaaaatcagttcagctagtttaaggattcacagtgctcttgttggatagctcgagactctcagtgctagcgaaatgttatttagggaaactgttctggtttcaactaaacctacattttcattcattcatccatccaggcatttcctcacccagtcacataacaaacatgctctgaagcctgcctgtgtgaagcttcattcatagtgggtcacaacgagtgttacctgccttccctttagggagctgtgcagctgaaggcagggcaccactgtataaacaaacaaacaaaggtatgctagcatgttgaagtaagtgctgtataagaagcatgcactagttattatggcgatatgagaaaacttgctgaattcttactaaaagagtcagggaaactttattgaggagaagatatttgtgttcaattctgacaattttgaaaagtattctgttgacacattggtaattttctgtcccccagtgaaagcataacagaaagtgacgtgagaacatggtgtttccggagaaactcactctgtaagcttcaagtaactttctctggccagggtaaggctgaaagtgactcaagacagcatttaatgttagtaggtcctagtcataatgcccacatgagagagaaaataactgcacagaattctgaaggaagagagaccattacggtctgtggcagtgtgaggaagcttggagggagtgagggattttaattggaccttaagcagatagaggattgtcagagattttaggtcaggaaacagaataaggaggctgaagaatacaccatgttgagattgcagagtacagaggaggaaaccagttccctccatgagtttgtaactgtggaagactagctttactggagtggaaaacttagctggaaacagctggatataatgttggaaatggtgagtccaaattttgtaatgtcttgaaagtcttattaaggcttttggtattgatgaaagcaacagtccaagagttaaatggtttgagttagaattttagcaatggtactttttaccctttgacttctgtcatggataacatcatatttccccatcagtttatttcaggcaatcaagtaaaagaatatatataataaagtaatttgtatattatagaattctatgcaaataaataggtacataagtagccaagaagttttaagtagagagatatgagaaaattggagaatgtaaactgtcaatagaatgcaaggtagatttgataaggaagagattaaagtcaggaaaacaggcaatggtggcagtaatccaatattgcggaatgtgttcagtggtgtttttcgtgactgtgcttaagctaaacttggtcaatgtgtgatttagcacagggaacctgtaatgatgtgctaatttcccaccacgcaactgcatccttttaccaaactaatatggcccaatcgaaaggtaatagatggaggtttttaaaaatggaatttgagggtgggaagctgacagatactcttttttagcacagtaagatttagaaacaggcaatagagatcacttatgtctgagccaggtatatgattgattttttgaattttcttctttgagctagaaaaccatgatattctgactcaagaacaaaattctcctcttcctgctgtactattttatgtctctgatatggatgcaagacctaaatggttgtgggtccttgagtatggaagagaaggaacggttttttaaaagaaaaaaggaactgggtagcacaaagtgctgtgatgtggcttggctctgtgtccccacccaagtctcatgtccagtgttgggtaagtgacccggtgggaagtgaatggatcatgggggcggatttctcccttgctgttcttgtgatagcgagatctggttgtttaaaggtatgtggcactttcccccttagctcttgctctctctctctcccctgctccaccatggtaagatgtccttgcttccccttcacccctctgccatgattataagtttcctgaggtctcccagccatgcttcctgtagcctgtggaaatatgagtcaatttaacctctcttcttcataaattacccagtctcaggtagttctataaagaactattgtaatacatacaagataattgtggggagagaaggatatatatttatgtatttatacatctgtatatttatatataatatataaaagcatatatatgtatatgtattcacatctattgagtacctatttaatgcttgttagctattcattgaatacttactgaatctcaattatggtactcataaacatggaagataattattgtttttctcacattgtacaattaaagaggggtactgagagtgtaaggatctaatcaaagagttaataagacatcattaacttattatcttttatctgggagcattctcacccagataaaaaattccgttttctgaaaaatctcggatcactaaatccttattcatttctctctatccattccaatcctactacaaactgagaattaaagtcattttctataaataataacatgcaaatttctcactgatttgtgcttttttcaaaatatagtgttgtggttgttagaagcaatgttgtggttgtatttggtgtctttccaacttcccaccaactcttcagtatccttaagagacyactacaccagtgtcagtgtaacttctcacttcttactggagaagcattcaggaatgtagataccccacagctctctctgcaggtgcaccttgttctcaggttctttctgtgggtgacacaaatgtgccaatgctcagcacttctcaggaaacttgaggtaaaatcatatccttgcactttagctgttgagcagaatttcatagttttacatgccagtgatacagagctttatagacctaattgaattcaacagcagagcagtgtgacaagcaatcttcaaagacacaaacggctttggaaagagaagataaaagtaatgagacctactactgacaatccaagaaaygaatctttagcattggctgtctatggagcagcaatatgcaactgaagaatggaaaaaaatggcgaaatattcacaaacttattttagtaaccctggtacaaaccaaaaaagcaatttattcatttattcgctgatttatttaatttgcaaatatttactgagtgctttctatataccaggcactgctaaatactgaataacaatatagccttcaaaaataccaattggctaaaatatgggtctcaaaaawaaataaataacttgtgctctgtttacttttggaataatcttattcaaattgactctttgccattctttgccaaaaccctcaaaatatcattttatttaattctataattgttagcaaaacttactttttcattttttgggacaatgtttccagtctatagatagatgtgaaataaaattattttttgcttttttattgcaaggagataattatgctgcttatgcaagaatttataaagactgaggacatgtagtaagaataaagtattgttattaagtgaaactcagaacaaagtttctccggcatttatgattatatataatcattactggcctactttaaggataaatgttaatcagtatatgtgaataatgattagctgacttctttcatataaccaaattaaatggaagttaatggataggttaatttgcttgactacagtaatcatttcactgtatacatgtatatcaaaacatcaagttttacatctttacacaaatttaaaacatttttttaaattgctcaggataactaggttgctggggttgtaagtcaaggtgtgggatccagattaaaaatgagtgggaggaagagaagagaaaaataaaggcaggagctgggtggattggaagcttttctgggggtgccaaggccctcttcctcttttcctcttcaccttctgccccactccatgctcttttttttttttttttttttgagaaacatgaaaagactgagtgaggactcctggaattctttgggatagtctcatgaaagggtaatttcatgaggtaggggtagggtcatgaaaggatactttttaatgggagccagggagaaaaacagcaaggcaattataagatgcaaccttagaataagaaagaaggtctgatggtagactttgggtttttatagggtaaaatattaatatgtcttaggggtgaaagtggggttgatgagatgtagcaaaaaagaaattaggcttgacatgaaaggagaagggaagtaaaattcattaacattagggttgggtgtgctacaggtatgcaatgggtggtgaaatctatgattccgagttcatctgaggtctgtaaaagcattttgttatttgaaaaaaacagttaaaatgagttagattgtttaaaaattgctaacaaatttttttattcttctttaaatatactttaaatggcttaattatagagcatcttctgggtgttagatttcttatcaagttcagaatcaagtcagatcgtgccttcatgtagcttatagtcaattgtagggtattatctccccactcaaattaactaaaaattatttttcaaccaaactttccatttgtattttactccttccctacccaattaaaacactttaagaaatgttacccctattacttcccaatggaaaaaaaaatacagtaaaatattacttaatttttttattgtgctgaaaattttcagtggctataggaacaagtgtaataagagctgtaagttaattttcaaatgaatgttcagggatttaaaaaaagaggaagaatatgaggctcttgggatatggttgtttaccaagagaacatattattaatgtcattgaaactcactttattattgagtgtgaaatgaaatacataaagaagcaatgttagtttatttctgttggttcatagacacagaaaaatgatgtgacttcttaagtatatattgttattctcaatagggaggcacaaactaatttttctctttagttgtgtttattctctacttcctgcatttttggaagaggggttcttgttgattcttgcacctagctactcaactaagtcaataaattatattggaggaggaatggaagaaaaataatgttgattttattttattacctatgtattttgtacacacagaaaatttatgtatgagaggtggcatttgttaaatatatgaatttttaatgtatctaatcactgtattctttgtcagtggtaagaggaaagcatccttcatttttcatgcggacctttgttttatatgaaagcttttcagggaagaaagcacaaattcaatgagctatcagaatgcgaatttggatgttagtgataacttttacattgcaatgaatcttcttagaatataatcctcaattttgagttatctataccttagagaaatttttacaactacattgcagagaaaggagctaatcaccagcatacacggtgtcaagggtagagatcccgttagagactgcctgagtttcagtcctatctcttttgcccagtttctcccttctgtaaagtagtcatgataacagagttcacctcataggtttgtttgttatgcaaattcagtgatttaacatttatgaaacacttagaacagacttggcacatgcttagcactacatggttggctgttaataagcaaaagcaagcaaaccactcctttgtggggtagaaacatatttcaacatagagaggaatatgttgtttttagcaaaaaaaaaaaaaatccatgtttatttgcagtggtagatattttgcatattcatttgcttttcatttttgtgtactggtttccaataatgtgatatttttatattatatttcttagatgctgatattatccccaaaacttttgtttctacttttttgtaaggcagagagacagactgtgtatgtgtgtacaattgtgtgcaatgtagcaaatattatttcccattattattcatacaggctaaaaatttacatagtatatttaagtaatttgttaatcttatctctgatttatctaaaacattttargtaaacatcacaatgtttagtttaaattctagtctcagcagttacatttgaaaaggttaagtcttatgacttgtcagtattaataatccatttgcaattaccatactaatttgttccatatgcctataaaatatttctctgagctactaaattatcacctactgagaagttaaaaatatctatttgatactttttccaacagagaagcaattctgcttcaatcctgagtggcgctaaattgtatattgaaatatatcctatcaagtaatatcatctttgtagctgttaattatatccatgattatctaacaggattattaatgtatttttttctgctctcaatatatcagtgatggcaaagagaccttattttgagacttgtcacagttctaatttggatatttttggaaaaatacattaagtactcatgtttcattaacttctttggatacttagatatgtacatgatataaaataaagtgaataaggaaatggtgatgataacaatgaagtccaatatctaaatcttttccttatttcttcatttaattattgcttaaacatttctaaatcctatttgtatatgargaaaaacaagaagagttccatgccagcaagccgatatctgggtgattcaagccttcaggtagttctgtggcagactttggaccttggtaagttaccagaagtgatgaagtttcaggtcttacaaagtaaggccagagttgggaaacaccttgaaaacgaaagaaacgacttgagaaaaagaacttccttggtaagatcagactgctctttctccctgtaatttataattctgtccagcagcaagtggmaaaaaaaaaagaataaaaaaagaaaggaaaaggggaaagaataatcaaagccaaactagaatcagagggaaagaatgcagaggggaaaggttcagccttgagctcacagtctctcccagtttagctctggaactgtaatcctttaattgaagccttgctctgttccaaagcattcagctcttattaacaaatctcatgaactatttgaaaaatatgattgtttgagccaagcaatgtcttaggtaaatttgtgttttaattgcaagcagctagagtatgccttgagactacttgaattggaaatggttttctttttttcttattcatttacaggagygtaagtaaataaagagcaataatgaaaaaccttccttacagtatgtaatgaactcacattcttatttaagaatgtgattactttggctgtggtgatttacaaagtgctgtgtttatgtaggagatatgctttttaaagtgtaccttttcccatatgtatatatctatttcactgttattacaggtatcagaaataagaaaaaatatttattgagataaacttacttatttcagcatatatttattcaacattttcatgtattacctaaaatgaaggatacttctcttgttcattctaccttttctacagaggggctgagcctccctgcttcttttaacttcatcatcttcctttatcggaaggctgaagggggagataatgagctaaagaacaactttcaccacccactgggagggaactactggaagagtgactagttgtagttagtgatcagcgacatctgccctgcccctcctttcctgtcagggcagctgtgctctcggacccagtgtgtgaagtgatgggtcttctgcccaccctctgacctgacctcagttgtgttgctgtgtatggattcgaatttattcaaaggacgatgtacttctacagtatagttattcagaatgcaacacttttgccaatttatataggaaatgaagaccgaaaactctagctcctgactgctcttaaaataggctgagacctagtgaaaattaaattaattataccaatgtctttcccatctaacctacatataaatatttgaatgtgcaggatcagatacctgatgtgtaaaaggatagcgtttgaggggatggtctctgagatggaccaggctctgacagtcaatcacgtgactatcaaaaaccttacarggctctgaaygtagtccttacttctatataaagcccaatggaactcacagatgaaaagagagcttcacttattcttttgcttttttaaaaaatgagctggttataactttgcacrtaagtctaattgtgcacttagaaactgatagtaatagaggtttacagttcttttcaacctcctggagagtcccaatacacacagaacattatatgggccaaagaaacttctgaacctagaagtggggtttaaatactgattgtgccttttactggctttgtaacactggacaagttacatattctctgtaaaccaagtgtcacatcaaaggcaatcattcctatgtgttatccctctttcccagatagcaatctcaccttttctgctgcctactagacattctctttaggatatctcaataataccttcaaatatctgcctgaaacagaactcccttctttgaaagtacaggatcacattccttctgcttccattgactcaccttctgcatagacacccaggtgccctgtttagtaaataagactcttttttcccctccttttacatctccttcacattcaatgcaaaaatcattgccattattcttcatattatttctgtgttaactttccttttctccatttctatggccattactctggttgagattattatgactatgtgcctgaaataatgtaatagatcacttacaggcatcaatgccttccatagctttcatttccacccccttcattttgtatcctaccttctgcttccagtttaatctcctcgaggcacagttttcatcctgtcatttttcttctgtaaagtctttaaatggatctctttgtgaactgaatgaaggccaaactgaaagtgcctctaacacatatgagtgtacgtacgttgtaaagtctttaaatggatctctttgtgaactgaatgaatgccaaactgaaagtgcctctaacacatatgagtgtacgtacgttggtgtgtctcttatactaggtcgatgaggctctgacagtcaatgcacttcctctgatgttttctcatatttaaattcagttttgcatttttggcaaggataccagaaagtgaggttgtgaccttatcaacatgtcttatccgaagactcttgatgycaatttattccattactgaaaatgttaactttgatcacttggggagggtggtgtttgccagatttcttcactacaaaggcactatatttctttgtactctataagtatctcatgggaaaataatttgagagaatttaaatatcctgtaatttatcacacctttgccactaattttagtatccgttaatgattcttgcctgaaacaactattactgtggtgtttgccaaatggtaattttctggttcaataattccttaacttagaaacaagttgtagttttatagtaaggaaaagttttcttttctcctttacttattcattcattcatttgttcactcacttatttgtgttagtacagacacatgaacccttacgttattccacaggttataatcccttatgatcaagatttattctgttattcagtgtttctgtatttgacctttaggatcaccaatcaagttggctactttgtctttttgaaatgtgcctattctttctttctttctttttaactctttggtattttctagcacaaaatatttcaggctcatcttattttttctccttcagccctggattcagctgtttctccaaggagccatagttttcttatattggagagtggtatttagaaaccaaagtctgggaatcagctgggctcattggtgcaagggcatccagaatacctggccagtactcatgaaaatcgtcaaggtcataaaacacaaagaaagactgaggaactgtttcatattaaagaacgctaaggaaacatgacaactaaatgcgaagtgtgtgtttggattggatcctgatccaaaaaagagcattggtggaacaattggagaaatttgaatatgttctatagactaagtaatattccatattatattataaccttatatattttgtccataccagagactgatttaagaaaaatcagtcttaaatactgacctgaaaataatatgagagtgcctgagttactccatttttttaaaccactactggactcctcccattccctacagtaatatttttcaaagtgtggtccatgaacaacctgcatcagatactccaacattccatattaaaaatgtaaaatttaaaaatttaaagcccaaagtctgggctccatcaaaaacttgctgaatcttaatttatgggtaagagagtcctcaaaagttctattcagatcattttcatgtaccctactgtttgaggactactggcctaagcctttatcaatatacttcaatccaagatatttatgggagcctccagtcttccatggtctggttcttattaactgctgagtttctttttttytttctttctttctttcttttttttttttttttttgccattccttaagacactacrtttttctactataaattcctgtacctctctgcttatgccttgctattttacttctttatacctttatcatttcctctgcctgacataactgtcccaccttacttcacttgatccactcatcaatctattttaagccctcactgaggtgttctctgctccaagccttcctggcttccccaggtaaactgcaagcctcacattacacaccagggagttctgtttccccaaaggactatgaataagctttgttagcgtgcttgcacatagttcctattcagtaaagttttrgcaaaatgggttaataactaactgacttgcgggaagtttctatatggattctatctactatcttttgttgtgtgagaaatcattactaaacttagggtcttgaaataacaactgcttgtttggctcataaatccgtgggttggaaatttggtttggatcagctgggtagttcttctgttgatacaattggactaacccatgtgtaggtgggcagctgctggtcagtgaaaaggctctgcttcgggggattagctgactgttgggtagagccatagccatagctgtgccatgactcatccactggaaggctagactggacttgggcttgtgcaaatggaggtggcgggttctcagaaagagagagagggagaagtgagaaagaaactgcaagttattttcacgcttatgctcagagctagacaatatcatttctgccactttctttagccaaagcaagtcccaacaccaccccaaattcaagaatgggcaaatagactcaagttcttgattggagatactcaaatgtattatggccatttttgcaatcaactccatggctctaatatatatgaattgatgattgtaatttacagtgtaactataaactggattctaattttctatttctatcactgctattgccttatagataggcctcatttcattttaatcttcaaaccattctgttacaaaatgttgctgctgcttttccagccctgtcaccttattccttttcaatttgcctattctggagaaccctttgcatctgttttgggaaacacaggtaaggatgtaccattccattaaatacttggatttagttacatcttaaaatgaagccaacactctcaaacacagcaaactgtggactctaagtacgacagtggacatgttgccaataagaaaacacatcatttttgtaaccttgattttttcctttcattgtcagtttttctgccttaaaaaaattgacaaaatcctgctttcattctgtcatatcagttgacctattttctttgtaaaagcagtgttcatctttctgcctagcagaggtactcttcactgctaaacacagctgtctttaaaggcacagccatcttaggggcatgtcccttggcctctttactggtagggtgagaggtgttttgacttaagtttgtgtgttgaaccctagcatttattattgacgtctgtacctttgtatcccaatttccacagtcattctgggaaattcaactacaatggcatttagtctgattttcttatccaccttagaaaaaaaaatagcaatatctaacattttgcaagtaacatgagaagagagaatggcgtggaaattattaagaagaccttttggttttctaccctagggactttattttctctttatttctctttattwtattatctctctatttttttttcttatagattctaaataatactcttataaatcttttgttttctttaacacaaaatgggttttgtgcaacctgttgggaactggacaattttgttttcaaaaagcaataggatgtctttcttatttttcaaggacaccttgtccacaagtactttcctgctcttggtctccttgaagcttggcatccaatcctggtattcattgaggggaaaaagtcctagaatttgctttgtgacctgggctatatgggatgtaagcatatgttacaaaacttaatgcataaatctgctacttttgatacagtctggctcatggagagatgggatttagcttctcgtaatgagaatttgatgtgactggaaattgaacagaagcatctttttattgaaggtactgaggcttatarcaatcattcagtggcagaagttattgtttttcacattacttttcaactagaaaacctttcaaagcttcatgagaaaatacctatctttgttcaagcaagaaaacacttggtaacttttcctttacatccacttaaagcaaaatgatgtagtgagaacctcctactctactttaaagatatacctcagctttcctctatgttaaaaccttctttcctcttcctaggtcagaactgcccttttataaaatttcgcttttcctctttttccccctgtgagaagtgaggatcttaatcaaaagaaaaaaggaaaaaagaaaaagaaaaagagaacaaaaaaaaattctagatataatactgccaaaggtttgaaatgaacatagaaactctttgcaaaaaaaaattatttttcaggctttagacagaaccttttttacagtgcgcacataaacatttcagtcttacagatcttaaaagaagatgagcaccaaaaaaaatattgaattcgatattgaattgacattgcaagaaagacattctatttctttctccattcacaaatcaactttagaaactttaacaagtcagccaggcgtggtggctcaygcctgtaatcccagcactttgggaggccgaggcgggaggatcatgagttcaggagttcgagaccagcctggccaatatggtgaaaccccgtctctactaaaaatacaaaaatattagccaggtgtggtggctcacatttgtagtcccagctactccagaggctgaggcagaagaatcgattgaacctgggaggcagaggttgcagtgagctgagatcgcgccactacactccaacctgggcaacagagcaagactccgtctcaaaaaacaaacaaacaaacaaacaaaaaaacaaagaaactttaacaagtcatgtaacctttctccttcaatgtttccatttataaaatgcatatctagacaagtgaaataattttgtgaattaatttcttcctcaaaagtatttttttaatctcaagtatcttttaaaacagtattatattttattcttccataacagaggctacatccagaaaaatcagtgagtagagaattttataattattaatttggtcttctaccacattgaataaaaaaattaaattatgatcttttgcagaagtgtaaattatactattagtgagtttagctctaacatatattttctgttatatttaagtgctgtcttattaaatacttttttggggaattcatgatatggatttggcagtaattccctgtggaaaaaacaaatgataataaaaaggtcttttaattttcaccaaaatgacagtcaagattttatcaacctatgtgagactggttttttaaaaattagtagttgtgatggttaatattgagtgtcaacttgactgcattgaaggatgcaaagtattgttcctgggtgtgtctgtgggagtgttgccaaaagagatacatttgagtcggtggactgggaggggcagacacacgttcaatctgggtaggcaccgtctaatcagctgtcagtgcagctaggataaagcaggcagaagatgttggaaagagcagacttgctgagtcttctgagcttcatctttctcctgtgctggatgtttcctgccctcgaacatcagaatccatgtttttcagcttttgggctcttggacttacaccagtggtttgccagggccccccagccttcgaccacagattgaakgctacactgttggcctccctacttttgaggttttggaacttggactggcttccttgctcctcagtttkcagacagcctattgtggaacttcaccttgtgatcgtgtgagtcaattctcctaataaactccccttcatatgtacatctatcctattagttctgtccctctagagaactctgactaatacagtagtagtagtatttgtgagctttcagaattaagaagtatcttaaattccacagaggagcctgattgtcttgtgcccatgcagtgtcacagctttagaaaagagggccatgtctaggctgacccttttccggctcagcatgcttaggagaggcacatggctgaggcggggaaggaaagcgcaggctgttagcattgaggattagatctcactatagcgcctcacttccatagcaatctcaatagagaaaacatgtcttgataaacccccttctgtgaaattggagaggaactatttgtttatgtttatttcctgctgcttatctgatgtgatgtcctgagatgtgatgaggcttttagagataccagtcctcatataccacttagatgcctctaggcaagtgagagggacagaatggcattagctctattcttatcgtagatttttaaagtgtataaaaactatttcatgartgaaatgtaaataagtaactgaaactttttttcaacataataataggaagaagatcaagcaagaataaagggaaattcaatggctttctcttcttattatttttagtatactcttggcagaatgttcaatttatacattgagagtttaaagtattttaatgacatgtctagttaaactagtgacataaataatatatatagttatcataggtttgtttttaaagggctatgattacaagataaatatgtgtagaagtgtgggtgacactctaaaattaaatcacaatattgataaaaacttatgcatatgattttgctgtttgcaaacttgctgtcatgttgaaataataaaaatagcaagacatccttgctatttgatgcttttgaatgttatatgctattacatgtaaaaatgagaggtaagtgccccattttgcctctcattttttaaatgaatttcaagtgagtctcaaatgaatctcaagtttcattttttaatgaatcttgattcattaaatacaaggtacrtattaagaattaaatttgaataattctcaagccacaaagataaacaaaagcataacagtgaaaaaaacttgcaacagcaccaccactctctgacatcttaggttctctcagcttttgatgaatgcactgccattttatgaccctattagtccatattcattcctttttatcacatttattgcaaatcactttgtttaccaccaactaaaactgagaagcactataacaactgagagtgcattaatcctttaactgacacagttgcaaaaattccagagttgtgtcgactgaaatcattgtgcaccagacatttttagcattcctgacctacagttctccacttttggctgcatggagaagttgggcttcgcagcgttctaacagatgggtgggactctgtgtctacttctagttaatgagctgagacagaaggggatatatatcagttccaggctgaggcagtaaaaaccccatgtgattgttcagtcttcacctgacaggcgatcaaggacacatactcctgatgaagcttcaaaaaattgagcttctttttttttttttttttttttttttttttttagagggagtcttgctctgtcgcccaggctgtagtgcaatggcgtgatctctgctcactgcaagctctgaattgaggcttcctttaacccaggcctccagtttctacacatagtagatttttccccacactgcccccccaacacccactgaattataccaagaaggagaaataaatgtatcttgtgttaacccactgagatttccagatgaatttgttaacagtggcacaccatagcctgaataatacctatggattatagaatttcttcacttttaggctttatatttagatatattagtaataactttttctaaaagaagatctatttcctccctaacttttggtttttgtctttcttttttcctttttttttgctgccaaaaccaaattgtcaaagtcttatttggggcagtcaggatgattaaatttggaagtcaatgggaatgtaaggaattgggtgcaggacaaataagtgctatgaatccagagaacagagcaagataagactggatatctgtcaagccacaacagacaaaatggacaataagtgacctgagtacacagactgagctcaaaatctagcggtcaaggttttgaaaagagcttggactgaggaatgataccatgatgagaacttgtgggctcttccagaagtttgagatgataggtacagtacagaatttaaaatgaaagaatgggacccgtgtcttaggatggaaattggcaaataggattaccatggttggcaccagagatgcaggtcaagagctgcaaaggaagtaaagccttagatatagaactaggagtgaggtcaaaacagagtttagaaacaggattgactttgtcgttgaacagttcgttttgtggcagccttatggccctcaggggcaggaccagaacgtagaaggggwaataggtgaatgagcccatagatagaactagaaactctgcaagaacagacagctcattagagtggggaaccctaccctttctgatagacctattttagggggctcaattcctttttatatggaatataaattattttagttgcaccttatatttcatcactggtattacttattgttacctctaatattttttctattttttagatatctataacaacttccgacatgttggggttaatgtttaccaaggctgtatcttaaacaggttttgcactgtagtgtggaactgtgcctggacatcgggagcatgtgtctgcaatcctgagtgtattcccagattctgccactaactcttgcccatggactgccagctggacaggtggcctctctggcctcagtttcttctttgtggaggctgtgtgtctgtgtgtgagtgggaggtgggagatggtagactaggtgaacttcaaggtctgtgcgtctctccaggtctttgaagtaattctttacagtgagtctgactttcatagaagtttcatttctgggaactaaaggagcttttacatactcttcttgttctcctcttattcatgttgctcttaacatccgaatctaaatttagttcaatttttatccattctttatgttctcctctctacaactgtttccccgaatttcccatcagctgccctaccctggagaactgccggccttccttctccagcattgtcatcagttgtgagtgcttaaaagacgctcactcctgcaccagcaaacctctccaggcagcctatttgaaagcatctcttaggtgcagctgtgtgaaaagttggctagggatataatattggaggttggctactggtcctccggtggtcacgacagggcagctttgaggagcagctttgtgctgtatcggttttgatgtatctaataaagagaagataaagcctcttccagacctctgtcttctattctcctgactgaatatatgaggagatagcgaggtttcctaggtatcagcttagatgataaaaactgcaatcgatactttcccctgcaatttgcgtgcttcttttaggcccctatccctgctactgcaactgctaaccttgtctttctgactcaaattggaaataaaactgtcttaggtgatttaaaacattttttttcctaaataacacatcagcaggaaatcatcacatgcatacctccccctcttctcaaggttaacatccaaggctggactaatggtctttttctctctgacctgagctgactttccttcccaggggaccccattttggtcattggtgcccactttcatcccagcctccaagcctcagattctttctttatgcctctttctcctttattcccaaaactacccaagtattaaactatctttttctttccccaaacttccttttcttctatttaaattaccataattctaacccatgtcctcattttaaaaataacagtttttcttcacttacatataattagaactcctgtctggagtcagggacccagtaatgacttaccttcrttaccaaggagtgatgtggtgttgttcccacacagttggtgacagtgggaacacagtgtacttgcaccaaagaagtttcttggtcttgctagtataaaaagaagagactcatgtgactcatgctcaggagccacacctttgaccaaccatagaagataggacagagtcttcctctacctggctaaagatctgggttctgattgcagctttggctcttagtttgtaacacaatgaagttctgagcctcagtttcttacctgtcaattaaaaggttgaaatttatcccatctttacaatcttgtgtctgtatcctcataagttacccacagctaagaactctcctcgcttgctgaaaagatacatataaatctatatctgtatatacacacacacacagcatgcactttctgctagtagacagaaacatagaaatgctttttaatttttttttttttttttgagacagagtcttgctctgttgcccaggctggagtgcagtggcatgatcttggctcactgcaagctctgcctcccgggttcacgccattctcctgcctcagcctcctgagtagctgggactacaggcgcccactaccacgcccggctaatttttttttgtatttttagtagagactgggtttcaccgtgttagccaggatgatctcaatctcctaatctcgtgatccacccgcctcggcctcccaaagtgctgggattacaggcatgagccaccacgcctggccgaaatgctttttaaatttttttaaccagtttcaaagtcctcaccctatgaaagttagctctggagtctgtataaatcaactgtaaaatacccatttacaactattcagtgtctaataaatacatgagatagactgcattgtagccaaatcttatagattctccctccttaacatctttcatgtttgcctcttttctccaatgctatagctgctctccttacaaataaatatgcttacacctctgaccagggctgctgaactagctttctaaatatggtatctttgccaaagctttttcagtctacaatttgcccttcacagtgtgcccgagtgacctgtagaagtcccagtggctacactctgatggcttgaagcacatctgcaggttctatttcccactctgtctcataacccatctcttttgggttgctatggttcacagccatcctgcaggctgatatttggattcttcatggcttttacttttaactttctccaattggatgtgttggattctcctcagctacatgtggtgcttcctgggggccagtcttttaamtcctgatcgcttgccatcccccaggcccttaggaccccagcatggatgcagttgatgttaagagagtatataggaatttgtaggcaaagagtttggggcacagcttttcccacagagggaatagcatccgctgaagctcattggtgggaaaaacatggtatgtttaatgcatcatttttcaaactctttttggatgtggtctttgattacaaatatgttgttcatcatgaatgcagtacacaaacatttgaaagaaaagttctaacaaataacactcttttttctcccattacattaaaatgaaattctgactttgacaaactaaattgctttcacaccttactaaaatccattagtgaggttgaaaacacaaagacactagtttaaggttcagagtgggtagagcccagggtatgaggggtagtttgatgtaaggtgaagccagaaagggaagcgaaaacaaatctcacagtaccttgtccagtagttaagcttgcctttcattagcctgaaatccactaaaaggtttaaatagggggcacttggagggtgtgacatgagcagagttgctttatattcctactgatttgaggagatcaagagtaggtatgggagaccaattagaggaatttcttttttttccttttttttttttttttttactattgcaagtgagaaaataatagtactggactatggagttggtggaggagatggaaaggtgggcaatttgaagctttttaatagaaaacatttgtcattctgggtgatggtggatctggagtggaaggaagtggatgactctggcttttttctttttctttttttttttttttttgagatggagtttcactcttgttgcccaggctggagtgcastgggcaatatcggctcactgcaacctcctccttcaggattcaaacaattctcctgcctcaccctccagagtagctgggattacaggcgctggccaccatgcccagctaatttttatatttttagtagagacagagtttcagcatgttggccaggctggtctcaatctcctgacctcgtgatctgcccacttcggcctcccaaagtgctgggattacaggtgtgagccaccgctcccagccaacctggctgtttagctagtggaataagactgacggtgcagccattcattgagaaatgaacacataagaaaatcaaggggaaggtatgtcttgacctggtctttttccagaagcagaccccaagacaggtttaagggcaaatgttttatttgggggttgggaccaggaaacaccaatggggagtaaggaagtaggactgagaagggaagaacagcaatacaagttacattatcaaggtatttaccactgtggagtacagtagctcatgcctgttggggaaccctagaagccagcatggactatgtctcagcatatcccatctgaaggaaaagagaactggggtatttattccacagctcctctcctgtcaactatgagttgactagcaggcaacaattctctagccctttggcttgtcatgtggggtaatcacaaaatcataaagccaaggggatatgaargggcatagaaagcaatcttttctacaagctgctttgtggaaggtgaagatggagccagcatcttgaacttagttttagatttattgcacttgacctaacttttcagacatataaatagagacatcaagttggatacataagtctaggtttcaaaagagagtgggaatgtggagtcttctgtgtagaggtgataatgaaagcagtggttaatattgtttattggaagaaactacagggtgaggaaacaagagcttctgactctgctctgagaaatctgggcattgaagggccaagtaagggaatatagtactaaaaaaaagctgagaggagttttagaaaaacagaacagaaaccagaaaaattcaaaccttaaaaaccaagggaagataatagggtaatacttagagaaggaaggagaggtcttcagcatacagtgttgtttagaggaccaaaaatgtctattgtgtcttgcataatggaaatttattgatctccaaaacaaaagctattttggtggtgcaatgaaggtaggagatatagagagcataatgattatgactggactatagagcaggactgcctgtgttcaaatgtctgtccaaagctgtaagactttgggcaagtaacttgccctctctgagttttagttttctcatctctaaaattgggatgacaattattcctacctgtggagctgctgtaatattaagacataatgtaataaaatacttacagcagtgtctggcagatggtaaatattaaatggtagcaattgttaactttattctttatattctcagagatcaatgttgcctctttctccaaattctctctgatccttggtattgcactttccaagaatattcttaggttttggtgatatgagactcctacaaaagactcaaaaacctacctaatcaccaatctgatgtaggaattcatttctctaagcctgtgctcagataggcagtgcagggtcccagtaagtaacttcttcttctttttgtttttttttttaagacttcaagttttaaggaattctctatataattaggttagtttacttaataaacttcaaggttctatattatgaggatcccagattagcagcctcagcatcattggggagccagttagaaatgcataatctcaggttctacccagacctactaatcagaatcttcccttcagcaagaattctagttgattcacacgcacatcaaaatttaaaaagcattgcttttgagagctcatttagtatttcttacacttggttttctgccaaaagcattcaatttcaaagagcctccttactcaaattctgtaagagtgatttcagagtactttccacagctttcctgtgactttgtggtagaaatcccaggactctggttgatgctgagtcaattgctacttctctgaaataggtcccccgccacttgacatttatatgcgtctagttcagaactacagcagggatttaaacaaggtgcgactgtctattgcatcagagttcaaatgaaccacaacaggactaaaatatagccttagtgtcagctagagtatttctaacctcaaaaatagatagaattggctcaaattactattccataccctagggaagtcttatgccttcttgccatccaattttttaaagttttctatatgtaattgacattctgttggccatatgtcactctgagcttctgcttccactgagttggtttagtttatgtatcagtttgccagtctagcatcctgctacagttctactgcgtgataacacagaacagaactcaacacttatctcactttccagaaaaacaaataaacagaaacactcacacgagacctttgtgtatatcacaaattataataagtttgaggagatggaaggggtttacatcactgaaatttaaacagtttaatagtaaaacatttaggcaatcattgttttaaaatgtgcttttggacatttttacaccttgagacccaggttcctgccttgtctctttaccctccctctctcctcccttttatttctgtgcagtcctagaaaggaaatcacaaaaggaaaatggccccacaagttctttccatcttttagttcactttaatttagtatttaggctccctttgtaagcccagactctgctgaagctttgaaaaggcttcttgccatgccatgtaaccaaaaatggagtcaactccctcagaaacacatggattgagtatggggacaagggcgtcgtccaaggaaattggatgctgttgccagagaaagaatgtgtgcttgctgggcagccataaaacaacaaatggccacttcataaaaccacaaatggttgcttcttctgggcagagtcgcctcctctttcctttgtttccatgactctttacgattccttggttagaatatctactagtttgtgttatcgcttcctattttgtatcaagttatttcatatgtgccaagcaaattacttgtgatttatgtactttaactctttcatactcacaacaccatcagcaaggtaagtagtatttttgtcattttatacttgaggagactggaattatggaatttaagttttacccatagcgacacagccagataattacccagataatttatttgcatatctctctccctaactagactgggcttttgtggaaataagaaccacattttaatatgtggctttgaagtacttggtcccctagtactttgcagggcctcagtaattgtttgaattgaatgaacacttcaaaggtacaagggatgagagaaaaatccagtttcttgccagtaaagtaaaaaawatatatawatatatatatatgtgtgtgtgtgtgtgtgtgtatatattacatatataatgatgaaagtgagagatcaagagataggagagaaaaaacttgaaaagaatttctattctggataagttcccttatctcagagaagttgaactctcctacctcaaagagattaaaataaagaataaggtatgcctgccctcttgagccacttctctaccaagattactaacatcctggtttgctcattttgagttcacagaccttaattatgtaccacacagcatgaatcatcctgtctgttcctatggagaatatcaatttgtcttccagactatgcagcagagcaaagcttccttctggcactacaggaaagaatgaggaagaaagcacaatagaatctcctgtgcccaccacatagtgagcattttccaccctgagatgataataacctgacctatgaccaccacttggagcactaggctctaatacttgactgttttaatcagaggcaatatccttgttgttgtggcaccctagacaggtcatttaccccctgggagcctcattcatcattttaaacaaaaggacagttgttcctgacagtgaaaattcaccaacctgctagaacaggctcaaatgcacctggcttttaaaatgccatttccccctcctcctaatacacgaggctattgccttatctatttattcacatggaaaccaaagcataaagtaacatctcacctacctggaatttaattgttctgaaacctcagagagctctggaacaaagccagaaagagatatttaccaggaaataagcaaagatttctgaactgccataggcccctgcctcataacccatgcctattacctgaatgtaagcccatcaggttacttaccagatctcaatgacacccctgtgtaaccatccaaggaatgagttcttttccaagccagaattaaaataggatagttgaggggccataaaaaaggcacacagtctctgcccctttcgttgtacttatttttaatatatgatcaccctggagaaggtaaagacatcttagtcattggaattcacccagatcacttcccatggcttgctccttccagcaactcatacctggtgttttggtttctgcacctacccctcactttggctctgtaccttcaactccagcatttggttagactccttgactggggagccaggttagatcactctcctaaatcttctctggacatgctccagaaactgacatctagtcattaccgtctgatggtcatgggctcccgtgccctcccacattccagaactaccccacctatcattacagtgcacagtatgggaggatgagatttcatcaccaacaacagtgatgggggtgaacatagaccctaaccagggagaagagaaaaaaacttcaaaaggcagcagaagaacaaatgaaagcataggtgatgatgctgtgcagtgcgggttaagtgaaaggactctggataagaagttgggagacctggggtagataactgttgtgtccgcttaattaaatcacatcactcttctcttgatgttagtgtcccatctgtaattgggaatgctggacaagctctcaggtcccatttcattctgacattgtgtaattctagagkcaatagagcgtacccatttttgagggcctcacagacataattttattatagcacagtataataattaatattcacaatggtgactttgggccatcaaagaaaattgcattatgtttaatgtgcttttaaggaagccttataaaatttaatacattttagaatgattttctgtcaaaatgttaaattaatatatatatatgtatmcacacacacacacacacacacacagacacatctgtatgcactatatttggtacttaaataggtaacccctctgttattctgaagacatgtcatctttaatgactcacatttcaaggattctgtagagtgaagctctattgtatctacaaaacaattgagcaaaatgactgtttcatactgaggtgtttaccagtaccagaaaaaaaatgttccaaattaaataatttaggtgagttgttatggaggcaattaagttttaatatgttaacttcatgtcatatttcttccctctatacgacaagagcactcgaattagctagcctcttctaggaatttatatattgatcttttcatttgtatttcagaaagtagacttttcctttcatgaccttttttgtgtctctgtttggatgtttatattctttgaatactttcattgttgttccattactaacagaagggcttaaaactctcaggtcactacttgcagtttctacacattagccattgagtctgtgactctctcaacattctctcatgctggaaacattgctctgtcatgactagtacttggcaacttggttcttccaccatttaagctttccaaagagatgtctgcctctattgtacagaagttggagagattgtctactttcaaagctgttcatttgggcttctctccaagcttaaygttggccagagtcacagcctattttcccrcctcaagtgtaacctctattaataacaagccttagcttgtagctgtcttgaagaaaaatgttttagcttttctctyaatctttaagagttcaagctctcaaataaaacatggtggcaataaattcataaacttgcattgtttttgcctgaatattccagggccaatgatttcttatgaattcccataatattttagtcttaagaagagaccaaggtataatacatgaggttctaaactggtccctaaatttgttttccacagataagaaaatagaatacaataaaaagtgaggagtcattttttcaatgtaaattattagagatgacattttcctttcaggaaatgtaaaagcagtatttttctactagccagtgtttgagcctcattcaacacgctgtcacttcagccaagtcacttaaccttcatggtcttcagttttcctgagacataaaatggggcataaactctctgamctcccatggtccatttggctcttttactgtctgatttgctagtgatccacaaggtgaaggacacttttctcttgccaaattttgctaattgggttgcagaaaattagtgcagggttttggagccactcataaatatttatgtctaggtattgctcaggcagtatttcaagacttgaggggtcagaagctgaaggatccttcattaaatctgtgagatccccagagcttggtgagagggtcagggcatgctctgttttgtcaggatgttttattcttaaaaaaataaaatctcagtagcatacttagagacctcagactccagaaatactacttgtatacaaaacacttatttggggatatgctctatgaatttgtaggatgtaattgtctagctttttgcaaccttatttaccatcctcattgccatgggaaagtaaaaaaaaaaaaaagcactgggatcaggaagaggggaataaacaacatatgtattgctatacagtaggaaatgtgcagagaatcaaaagtacgatttcaaagaatcttgaatgaaacaaatggtcaaaatattaagttaactgaaataatctaggtaaaataatttatattatcataattttgaaaaagagcataaaatattgcttacatctggatggtaaagttatagatactttctatattctttatgtttatctgtagtttcttaatattactcagcaagcatgttttacttttataaatgggaaagttagttgtattaggaattcagcatccctctcaaccacttctactacatcctcaaatatgtattttgtccaagttgcgttaatgttgaatggtgggactttttaaattaaccgacaatatgaagactctactttgaaatattgctttggtattcccatatttcaaattaacaatattactaaacaacatttaagcactggcactttcactatcaggcttgactcttagaatatctccgtgttgayaygtaatcataattctcctaacttattagtggcatatcaagacaaagaacctgggattctgacatctgttcttcatgatgctatctaaggctccaggtttctcaattttggacatgtactatggttgaaagtcattccttagtggtatcttactctatcaaatatacaatttctagataaggcacatgcatgctatgttcattgtgtattattcacaataacaaagacatgaaataatcctaaatgcccatcaatgatagactgaataaagtaaatgtggtacatatacacaatggaatactatgcagccataaaaaacaatgagatcatgttctttgcagggagatagatagagctggaggccattatccttagcaaacttacacaggaacagaaaaacaaatactacatgttctcatttacaagtgggaactaaatgatgagaacacacagacacatagagaggaacgacacacacattgggtcctttcaaaggttagagagtgggaggaggaaggggataaggaaaaatcactaatcggtactaggcttaatacctaggtgataaaataatctatacaaaaaacacccatgacacaagtttacctgtgtaacaaatctgagcttgtactgctgaactaaaaataaaaattaaaaaaatgtataaaaaagaaactgattcttgaaagatgaatgtcccagtcatgtttttctgaaatttgcatcctcaattatttgaacaacagaccattttatatatatatatacacacatatatatgtgtatatatatacacacatatatatgtgtatatatatacacacatatacatgtgtatatatatacacacatatgtgtatatacacacatatacacacatatgtgtatatacacacatatacacacacatatatatgtgtatattaaatctaatatctcttgttctttgcacaggctagataaaatagtatgtgaaaattgaacatatttgcatacaaaggaggctttctgagaactagaggatggataagtaattgttggcataagaacttacctttttggtaaaaatttaaaaaagagctctatgatggacttagcctcgttttctctttggttatcatagatattggttgagtttcatctctgaatctatctgtcacatagtactagctcagtgaccctcagtgagtcactcagttaccttttctgtgttatagttaccttctctgtacaatgggtatgatagcattacctacctcatagggttaattgcagcattatgaaaattctcaatataaagtactcacaatagtcagtgtttggcacaaaataaatgcatagcacatgttaaatattattaagtttaaaactgctgtacagtaactacattaaatctttgcctcattgtgtcttgaactaatataagtgccattttccttgatatattttattataatactgtataccaattactcttggaacattaacacagatacatttaaataaaacaattatttctgtttttttcttacacacatgtaatcagcatccctccaatttaaaatgtagatttgtgtgaacaatgtaagtaactgaacatgtacaactcttagaatgtaaccataaaatttacatggttttgtttctcagtgtctatataaaatatattttcgyaagagaaattttttccccattactggttgaawacttcaacaggtttattactcttgagtaataggaagttctaaggtcactttctacacaaaatacagtaacaattcagaaaataggttgtctagtccaatttattagtcaacactcaatcttcctttagtcccctcctctggcaggcgcagtctcaatcgaccacctgtctgtggggaatcaagtatggtcagcctgccctgtctcatacaggcctctccctccctctctggagttgctgcttccaaccctccagagtcacaatatgatggtaggaaggaatataaagcatgaaggttgttctttcttgagtgtaacatcataatctgctttattctttctgttctagaaaatatttttaaaatattttttctctcatgtatgcttctgatggttctttggaaggtctcatgtgatggcaacccygtgacttgggaaatgcactgcatcctccagctgcagcaaccagctcagctgtctgtaggcccttcagggtggtctctttccatgctctttcctgtgtttttccactgagaagaagcacctctagaacagctttctctcatgggtttccacatcttatccacaatcaaacactcatgaatttgttccaatgcactttgagagccagattgattctaacacaatagtaacgcttctggttattctgcttcttagtcatggcatctcttatcctgtagactttacaggaagaagtcagatctcagtccactatgttcctacacacacacacacacacacacacacacacacacacacacacacacacacaccatgcagtatttgtgcattatacttcctgagtaggccccagagtctctaactaggttttagttgtgtagctcagctttctccaaagaaaacttccacacatattcctctccataaaaatccacttcttctgcctttttaaacctacatgtaggatgaaggctatatcagccaagcagcaagcttttgggatcttgttctgagacttacttctgggtggacattcctgtacttactttgatatctcttttcattagtatcttggtatcttaatttaaaatcagatgtaaaatatatttataaggaacagctaggactttttaatacagttttaaaatatttcagaaacatttcactaactatatacaatatatattctgttgagattccaggttaaaaattaccagggccacaataagtcttatggaattcaaactttgggtaatagttaagatttaaaaaggaaaaatgctgtgcaatgaagaacagcaaacattactgaacgtcattagaaggatttttttaaatgctgactctacaattgaattttaagattaagaaaaaaccacttatattacaatgaagtaaaatgaccttttagctacacagtttgaaattttactaatggatttagctccgtcagaaagtaaagtttygtttcattttctgcctattatccacaaatataatagattattaagctaaaggggaattaatcctgtgacagtggaaatgcttttgcataaagttcatttacttggaaacagaagcactcatatttaccaaatgtgcagtagctaagaagtagaatggtaacaggacagttaaacctcagttagaacaagcacaccactaaacttaattggaaacagcatttatttagtgattaaaatagagagactgaaaatgtgagccacagtaatgcaatgatttctcttgggattaatacatttaaatgtaagaatattgtgctttaatttgtatgtgtaaacaaggtgcattctaaattgtgcacatacatcaatactttgagaaataggttccaattctgttaatgtaattttagaacctggaagtatgatatttccagagggtgttttcactaataataataagaaagataccgctttaagcatacatatacattttttttctttctctgaacatctaccttttttccattacatgatcaaaccggttgatgttgattttgaacacagaagatttacagtgttgccactrtaaaaaaggcagtttctttcagttaattgtcattggtatatgtagcatcttatttaatcttactgagttatgagtattaggagatgacaatctagttattgrtttgacaaaatggctttattgctttatagtatttctaatgtgagaaggaaatgagcttcatatgaaattggttattgaaaaaaacaagtgtcaaagagcaatggctctggacatcaagattaatttgcagtccaagaaggaaaaactacttcatattttattctttaataatcaactccataatcctggaataaatttcagatactattctaagcaattgcttcatgtgtattaattaagtaaaagcaagaaagattatttaaagattagcagaaatttaaatgttgtatcagacacataaaatttgctagtttttctcaaatagtttttatataatgagatgatttattcactttctgacaaataatgccttattttcctataacrgggaagaatgtttttgattattgtatcaatgagtttctaatcagaacataggaaccatgcattaatttgaacacagcaagtctaatacaagaactgtatctataaaaggggatcagattaacgaataaaaaggactctaagaaatataagaataatatttgtaagtatcaaccactattatccaataatagatgtaaggagatagagcatccaaagggtttcatctctgcctcctccaggcctgagatccagaactttttggagagggacagccatggtcatgggatgacagagaagttaccatggtgccatgcaggcagaacttgctggaaatgtgcactctggaacttgcaggaaatccaccctctagggttcttggggaaactgttcacagggaagcagtatccccagaggcactcttctataaaatctcttgagagttttgccgggagaagctagtgggtggtggrtagtggtggccatcgtgatcttcacgagctggtccctggagaagcagccaataatgcaggagctgggcactggggaagccacatgcactgcagaaataagctggagctgagaacgttacatgtgctccaggaactgggtgctggggaagccaagcatgatataggagttgagtgtgtgagaagccagcattcatgctgcaggagctgagcaagcacacaggaaccaagaagaaaaagtctgcagcgctctctaccaacaaagcctagcatcttactcactggcaaagaagaaaaatacatttcaagagctcagcttcatttctgcaaagcaagcattgaagggtagatttggagttgtgargcaataaattgataagcagcacaaatatttaaagaaaaaaagtgcctagtcttttggcctcaaattggacagattcttttaatccctaggggtttgtgcattggggccaacccctgtcttttctgggctccagtgtacaaagggatttagtgaagagtagtagccaaccagaacccttgcagacatttgctagtacctaacatcttcctctggaaagatgttaattttctacttattgccaattgcctggatttaaatctgacttacagctatgtraagatttctctacacctcagtttctttattcataaaagagtaataattgtggcacctacttactgtttttacttctttgaggattacatgagctagttaattcaaactatttgagactttaattctctttaaatatcatctgtttaagataatctcaatattagttattgatacttgttatgacaaaatcaaatcagcttttgtcctgaagggatgctgtctttaggaagtctctgctaatagttccataggatgtggactgctagcatcccaaacaatgtgacgaccatgtctttctgtctaacatagtggtaaatcatctttcttactttaaatatatgcaagaagtgaaaaaagcacaataaaaatatatttgtttgtggccagaacatctggttttcaatctgtaactattattggtgtgattgatctttaactatttaaccccaatgttttcttctataaagtgaaatagtgtgtgtgtgtttatgtgtgtgtgcatgtagaatatgccttctctctctctcacacacacatacacaccttacagtgcataaaataaaatgatgtatttaaagcactatgcatgattcctagaatattcgtagcacaacaaagacgttcaatccatattaattacttttagtataaagtaaaaccttctgtagacacacagactgcctcaggacttcatctggatggcagatgagtatttctattcccaagttactcttacactctagaatagttggagaaaacagagaaatgagggtaagctcaatgtggaagaaataaaaactagaagtaggattgctagatattttaactcaggttcagcatcttcacacacagaatcttcagatgtgatagctcctgagagttaccattttcagtatcaccctatgaagcctccacaggaaggtttcattgagcctgggtgaaaaaaaaaaaccccaraaaacttcctccttttyatacaaatgtgaccatactatttggagattaaatagtttggcctcagtaaatgaaagaaaattttcctttttggtctggattttattattcaaggtctccactttaatctctgtgacattcagggtgatatgataaagtagtgtttttttctgatcttcaaatgataaaatggttttggagttctttttatttcattccacttgtattaaaataataactgaagcttgtctggtatttaatagaggaactgtgtaaaaaagtatttctccctaaaaaagtgatttggagttaaaaaggacagaaaaagaggaacttcaagttgaaatgttgaaaaagatatgtgtttccagtaactagcatgaacattttattttcatattcagtttcctcctgcaattgttcgtttcactaaaaacttagtaatttttttccctacrtattgatagtacttctaaaagtcatctaaagtacgctaattcattttatcataattacatagcccatctcttgctgtcagttcctgtttgtcccaaggaacyctttaatttaataatatattaaataaaataacaaaatatagaacagattcagaacaacaaaatatgtaacatcagagctggtgaatgatgtttattcggtttaaccaatgtcctactcaacagtttttcacaggcttccgtggagaaccacagaagaaactttgaacattggtgaaggttttgttctcacaacagcaagattcagtataagaaataataaactaaggcaaaaggaagggagcggcaaagggaagaacaccttaaattgtgttctttgctaagaccattgatgaaatatttagattgaaccatgtggtcagttcaataagtcaatgcagttgagctcaagtaatgtgacttccatggaattgatgagctattagaattaacctaattgatgggttggttgactaaacacagataaatctttaatgatgaatagttcttcctagcaaaattcstcagtcaaatataccttgaagcatattctgcttcactaaggaacatttttsttgttgttatattgtcatgttgatatgcaaaataaatgccatctgactgtttttgactttctcagacactcaggtatctggcagtatatatatatatatattttattatctcaaagaaaaaaatttgctacttagagggaaataaaatcctaaattgtttwtatatatatatataaaataacaattttgtaattatatataatcacaaaaaaaggcctgaaaagggccaggatcaagtctaaacaatttttttcattgtcttgtacaaatatttgaggtttacttttatcttttttgaggtataattgataaaatttccagcctcaccatygtcactaattttatctctctctttctttttttaaatggattctctcttttttaccgcattggcaagaaaatgcatggttcataattataagttgagggaagtcttatttcaataggacacatgttttgttaaaacaattttgggaaaaatatttttactttccttaaccttcrcatccatgcctgcaatatgaacatgtaaatacccactacttatattcaaaatagaatttcaaagtggtttcttcaccagggtgcaatttctgtacttctcagtgttcataagagaacacttcaaattactttaagataatatttagcatgagttatattttcttcaactggcatagacaacgaaggtatccttttatgatatcacaaagaatatcatatctagtgttattggcatttagcataaatgtgagtttgcttaaaatattatggttgaagtataaaggttcatggttgttttaattcccgttactacatctgtgttttagtatatatatactcacatgcatataattctgatgaatttactatatcatagttacaatatcaacattattttgatacatttctgccctgtcacagaatttgcaagaaattattgtcaatgtcttaccacttttgccacactccagattgttggctgcccttcttgccatgtggatttaaccaatttagcaatcagtgttgaatatgttctgtgtttaaaaataatgcttacaaagaaggagtatgggaaaccacttacatgaggatttaggtggataattagcaatcaaaaccatgctgtgctatttagtgcctgctctataaaggtcatgcataatgagcatgattgttttccaaaatcctcaggtctaggtaagggttttgttgttgttattttttaaggtataaaagttctccaacactttttaaagttaaggtattaaaaatgatattcttgaaaaagagtttttacatcctgaactccagcttacttcagttttccattgcttactctagcttacttcggttttccattgcttcctctttgaaacccagatttgaaaaattcaaagtaagttttgcaataattattaaatatttctggggttcctgtggtaagttgctttttatattttccccctccataaatgcagtcacacacacacacacacacacacacacacacacactcatatacacatacatactcacagacacacatatataagcaaagtgtttaatgaaaccaattttttatctctcaccgttaaaatgaaatgaggctgcaaaaaacattattcaaggacctgttgtccatcattttgcttaaagttgcaacttctgaaaacctataacctgtcaacaacattaggtgaggacttactttacgtgtgtgtatgtgattgtgtgtgttgtgaggactcactttatgtgtttgtgtatgtatgtgtatgtgtatctctctctctctctctctctctctctctctctctctctatctatatatatatatatatatatatatatatatatatactgtatgtaaaatctctggtctctgataactggttttttttctgttttgttcatttcagtaacatcttagacacaggtactcagcctctatctaaggtatacactttgatctccctttaagagccctgtccatccattctcacattttacccaggtcctacttctcccacttccagtaccatctctagaagcctatatttactggccactcaggactctgaagctttcagtttgaatatatatcaccaaagttttctcttgctacctatgaatcacacttgctgtcctgttaagaacagttgtcctggccgggggcagtggctcatgcctgtaatcccagcactttgggaggctgaggcgggtggatcacaaggtcaagagatcaagaccatcctggccaacatggtgaaaccctgtctctactaaaaatacaaaacttagctgggtatgctagcacgtgcctgtagccccagctacttgggaggctgaggcagaagaatcgcttgaacccgggaggcagaggttgcagtgagccgagccaagatcacaccactgcactccagcctggygacagagtaagactccgtctcgaaaaagaaaaaaagaacggttgtcctgatcattcccctggtgattctgcccgtttagagtcaagttcattgataatcaaaggggcaggctaccagggaagtttcaagccttctgggtrctgagatggccccttcccatctttagtgtcattgcctagattccttaagttctgataggaactgtttggtgaagtgcaggaagagacaacttcagctctaaaaatgccagggcacaccactctacgtgcagctgccacttctttttctttgagaaaataacaattttgctacttagtgggaaataaaatcctaaattgtagaaagacagaaaatgatgatgatatagccttttgttgattttcaggtggttaattatcagctgaattaatggtcatttatcttttccctgcttagaaatgtttcggtttcaatttttagaagttaaaatcagaaatgctttctgaagcagagaatggagaaatggagagcagctaattatcaaggcacacagagaaaagagagattaagcaaatcagtcagcattgtttatagaaatattaaatataagactgttcaatttcatgaaccaagtattgaatgttaattttaattcttatacagataattgggaaatttatttctatgctattaatctatcaacaatcttacttaccccctaaaaattgggcaattgtgctatgattatatagtgatgagacctcttggtcctgcagagtcttgctctgtggggagaaatgcagtcaaattaaggatagagcagaaccctctaaataggtccctaatgcaaaggccctccttgcctaagtctaaggccagtactgggctggggatataatgcatgatgtagacatagggagtctgagaaaaggatgggacatccagttggaaatgttctagagggaactgaagatatcagcctggaaattagaagtacatatgtaaatttgggaaacttattttagagttgataactgaagactgaagattggatgagatttctatggaaaagagtatggagtggaaaaaaaagagaatgatgattgaatttaggaaatatgcacacacatattattaattgatttaaatagtcattatcataacaataattataatgtrttgagcccctaccatgcaccaaacartttgtgtggattagaacatcccatcctcacaatcccttgaagtaagtgatattataagccatttattacatgtgagagattcgctatagctcaattagtgttcttgcatttatttttgataaatcaggaatagcaaccgtggccaagcaaactgctcacttttgctacactgccatagagttagttcttacttatgtgcagatcctcccaaggaaagtctaaggatctgccatgggcacagaaataggtagtgaattgcccaaagtacaggaagtattaaatctctgctcggaattttgtttttgtgaaaaggacataaaaattgttgacatttatctgcaagcaagaaaagcagatgtacccagctctgtgtaggaggataaactaaactctcagcttttctgtctctgagttgttacttaactcaagggacaacatcagacaaaagatgtgtctctagatgctcagggacttttgttgaatcatcaactgactcatgaagtgcctaatgtttggcattgctgaacaaattatacataaatatagtcatttatatagtccctcaagataatgtttacttccttttgataatgtatgataattgatgttatttcagatattgttaatataagcatgagactggaacatgctgtagaataaactcttacttccccagggaacatattttaataacaaattgtattattttcagtaacaagtaaattgtgctatacctgtaataaagagtaaaacaaatgttttacttactcttagataattatagaaatacatgcagattttcttcttaggtcataaaaacgtaaaaaggaaatttaagagcaaggaaattaaagaattttgagtacagagagtacagaaaggaattctaatgaattgaaatctgatgacactctccaaactttgcatcattagtcttttattctgtttatttaaatatttattataattatataatttattaataatatatcctatttgtaccataagtaattatacttataaatatataggcatttgtcatagtccatttatgctgttgtaagagaataccatggactgggtaatttagaaagaacagaaatttatttctcacagttctggagggtgagaagttcaagatcaagtcatcaggctctctgcttccaagatggcccgtgtttctgtgtccttacatggcagaaggtggaaagtaagagaatgctccttccaaccttgagccccttgataagggtgctaatctcattcacaagggcagcaccttcatgacttagtcacatcccaaaggcaacatctcttaatactgttgcactggggattaagtttcaacgtaaattttgaaggtgtcaccatcatccaaaccataacaccaccatagcacagcaattgaaattatttttcatgacttgaggttccatatatatatataaattcaggatgggctaggttatgctagagaaatgaaccccttcaactttaaagggcataaaacacgaaaggcattaattgtcaatcaagatacatatccacaatgggttggctggggctctgatccatgtctctaaaattagatacccgggatcaatgagtttctgccatctgcagcaatgccagtgcaatggcaatgagaacagaacttggcaaattgtccactggctgttaaagcttctatctaaaaatgacacccataaattctactaacatttcattggccaaagcaagtttatgaccatggcatcctaatcaatgcagtcccaccatgttcccagaacttgcactgatgactaccacattagttgtcctaactgtatattcaaagacacagatgtgggattttggatttgggtgttcatgaattgccttcacaacttttcagggtgggtcatattcttataaacatgtttctttatttgcttaagaattttgctaatgcagtcaaggtaacatttttattacgtttttgccctgattcactaactttgttcctgaatctcgaactgtttttagtctaatcttttataaagtgtgatacagtaattatgatgagtaattgagaatagatttactccttaaaaatgtcaacagcagttcctactatgttcttggggtgttgttgagtcatcctgtattataaagctcagcattatttttaaaaaaaaaataaatattttttatacattttagaatccagggtaacagtaattcctctttcttaaaaatcaaaagaagtggttgagagcttattgagttgaatctttataccaagcaaagatcagatgaagactcaccatacaatcttcctaaaaggaagtaccttttttcctcacactgatggcagagtagactctgtcttttaagtagagctttgcgattgctacagagcagtggaaacatttgtcttttgtataatgcatacaactgagattgagctctttcacattgtgagactgatgatatatttatagtatattttgaattttgacctccgaagataaaatgaatgccataatcacatttcagacctataattttgggcactatagtactggaatgtttttctgattcacttattttaactgagaccgtatttttgacatgcctttcatttgctttctaatgcattagtggcatctgaatctctctcagcattaatatttaaaaactctaattcttggcrttgtgatttacaagtgctaacataaagcaaaacaaaattgtaaggttttctaaaagtccacaaggcagtaggtgagcagatgaatgaactttgaataagatttaaaaaatctgaatttacccagcctgtctttttacaagtatccatttcataattacagtttataatttaaatatctacatgttgagcatagtttttactttaagtattttgtcatattccayttttatactcattcttcttttgatagatgttttacttattctgtttttgaataatttacatatatatttgttattcatcaagtagttactgaggtcctatcttaatctggcgggctattgtggttccttctcttttgaagcttgaaggccagtagtgagggaggcagccattactcaaataatcacacagattggttgaaagttgctatcttgatgagtgctatgaaaaagggaagccagggatgatcagagcatgtaatggaaagatttcacctccttggatggaggttaggaaaatgttccctgaaaaagtaaagcagaacgaccagagacttgaaggataaagatgaggggatgagagtaaaaggtgtcccggcagagaaacagcccctgcaaagatcttcgactgggagggagcagggctattcctggaaaggccaaggtgaagaataatgagagcagggggtgctgctgctgaagtggatggagaggccaactgcaggcatatgcaggccctcaagtggttttttcattatcttaggaacaactggaatcctttgaaagtgtttaagcggagggaaatgttacctgatttgcgtttctaagaggatccttcctactactttgttgagaaaaagcagagcaggataaaagtgaatgcagaaatcaatttgaaaaatattgcagcagcctgggctacagatgattatctgaaccaggatggtggtggcaaagaacaggacaagtcaatatgtcttaataataattagaaaataaaattaacatggtgaaattggatattaaaaagtaaatcaataatgtttatatttatcagttatattcagcttagtcaatattttaaaattagtattttgagaagcaactaagaactggcctttgtaaatgtcattaacaaattctggctcctttgttgagaaatagtctaccactgacttgtattttactatatttggtagggtctttccccttagtcggagactgtggaattgacagcaaatatgaccttcacgcaggcttgttaaaaaaaaaatctactcaaaagaaattttattccattcagagaataactgtcattttactaaagtgtggattatataataaatcatgttataataatgtcgaaagctacatcatcaacatrgactcagaaaagagaaattatttctcatagacgacacaaatgtccacaggcagctacatgtggcagcttttccaataccatttcaagtttttgatgctagataagcatgttttgattacatatgattcattattctactgactgatatctaacacttccctaaatcacagaattaattttccagtaaaacctattcattctggtacaaacatatttcaactgaaaagttaagcagagacttcccctccctgtctcccctcccttctttcctttctttcttccttcttttttttttaatcatctcttcttctcttcctgttaagagtgaccccttttaagtcatgactattagtaatgactttcacacccacatcaatctattagtatatctattgactttattttcaaactgtatccagaatctagacaattctccgccccctaccttaaagctctagtccaaaccaacatctgctccttcctttgttattatagttaccttccaactactcttctggcttctacccttgcccccagggttatattcttcccacagcagtcagtgacctttaaacatataacctgtgtcataacacttcttttggttaatgactttgtggctgcccatctcagagtaaaggccatgtccttattgtcatcctgatagctcaatctctgacctgttctcctcctcccctcctcccctgctccctagcccacactggccttcttgctcgctcagacatttcaaacattctcccactttaaggcctcttcagttgctgttttcaatgcctgaatgtacttcctccagatattttgatttgttccttcactttattcaggcatctactcgatcatagtctgatcagagagacctatgatgaacaccctatctaaaacagcagccatcaaattgttctcaattatttttttctgccttaattttcttccttatgtgtatgtatgtgcgtctgtgtgtgtgtgtatatatatatatatatatatatatatgcacacacatatatatgtatatcactctcctaatatatgcatgtatatttgtttactagtttattccatttttccttccactgaaatgtaagctctatgacaattgggacttcaacttttcattcagctcagtatccacagtggttcttaacgaatagtgtctcatacctcacagatgctcaattaatgttagtttaaagaatgaatgttataagaattgatgttttctagaagctggaaaaaacagagaattgattctctcctagggcttgcagaaggaataaagccatgctgacacactgagtttaggatacctgaccttcagaattgtaagatcaaatatttgggtttttaaaagacaggacatttctgacaatttgcttcagcagcaacaaaaactaatgtactttcagacctcagaatacttttcaactcagtgcttcagccatctatccattggagttgacatatgtagtagtcagtagtattattcactaaacatttacggttttcctttattgcatgttcctgccccctgcatgttcctatgtagctttcagaagactatgaacagtgatggaagtagcatacgtaacttctagatatagctttataacctttgcaaattttaacatacctctgtttctcttttttatttttttgtgagtgcagaactttggtgagatgtagtctccatgattctggcttcctaaacaaacattctctcacccattaccagttaatatgaaatgtgaatgagaagtaaatctatctgctcaagctgctaagattctggggttatctggtcaaaaaaatcaaaatttaaaccagtagttctcaaatatttttgtctgaggaccccttttttacactcttaatatttgttgaagacccccaaaaagcttttgtttatggatattatattcatcaatatttatcatgctaggaattaaaatacayattttaaagtaatttatttaaaaataataaatccattttatgttcacataaaatatatttttatgaaaatagctacatttttaaaagcattcttcatgagaagaatcatgattagatayatgcccctargtatctttaatgtttgacttaatagaagatacctgaattrtcttatctgcttctactacattcaaacagttgcaatttgttgtggttaaagtataagtaaaagatctagcttcatatagttgaaaataaaaaagtattttaatatcattttctgataatcatggatattatcctttgatactacacaagaattctgtgatagtttcccaaaggttaatagcaatgtagaatctgaaaccatatcaacaaacttttcatattgttatatcagatccactggtcttgcactttaaatggatacatgcatgattccataaaagcatccgttggtcatttttaaaacattggctcactgtggtttcatggataggagaaatgccaacacatttcattttgcgacatcgaaaacccacattctttaatattgctatcaatttccttagaaaaaatttttcttttgaaaaattgtttagacactgctgccagttacaggttttccaaaattctaatattcattcaaatattcaaattctgtaattggcaacaaacacagtccattattttccttgaagtgacaaaactcacttttttcattttcaagaaatactcaattctgcacatatctgcaaatacccaagcctgaataactatagcttgtctgttaattatgttttcaggtaaaaacaggtttaaataagaagagcagctagttcagcttgcaacacggtcacacaagtgctttgcttagagatgactattgtgggaggggaattctgacttggtctcactgatcctggttcatgatcttgtgtaatttcctctccttcagtatgggctgggcctagtgacttgctgctaacaaatagaatatgacaaaagtaagaaggtgtcacttctatgattagactataaaagactgtgatttctgtcctgctggacttctccctctagctcttcctcattcttgcctggatagagggcaatttgcaaggaatagagagtggtctccagccaataggcagcaaggaactgaggtcctcggacctaaaacctgcaaggaactgaatcctacaacaactacatgagtagattggaagtgtgttcctctctatttaggccttaagatgactctcgccccaattaacaccttgattacagccttgtaagcacttgagccagataagaagtgtatgaattcctgatccacagaaactgagataataaatgtatgttgttttaagctgctgtgtgttggggtaatttgttacacagcaatagataactaatacagttctctacttcaccatgtagtagaagtactttatatactttatacatactttcaactcttgtcatataaaatagtaaaatgtgtgtttaagggccaagacaataaaagcaataattttattgtttcatcaaagatagtcttaagtgaaactagcattttagtgcatgatagtaaattatgcaaggtctactagtacatcttggttctattgccttgatttattctaaggcaattttacgtaccattttatttgtaccaccagtgcaaatgcatatcaacaaagtgaaaaagaacacgttaacacagtttaaaaaaaaaggaaaagaggaaaattttaagacaaataatgaaaaaaacagtcaatgtagtaagaattgccttgacttcacagacctcctgaaaaaaattctaggacccctacagatctgagtattacactttcagaactgctaatctagatgatctcaattattacatcagatgaattgttaatttcctatccctagtctatatgttacaacatagtaaaattaccctagggaaaggcaattaatgctcaattttcttcattttaaaaaagaaaactggattttataatgttttgaaattctcgctataattaacgttgcttatcaattcatgactgttgaaacgttgcttcacctcagtgttcactgtccactagtccaagatcaaacatatcgaagaacagttttgactctcactgttacttgctgctaatgctttctgcatcgtattaactatcaagaaatatattgtaaatatgtttttggtatatgcatatatgtgtgtgtgtatgtatatgtgtttgatttttattttgtataaattctataaaaaggttctggtatgaatttgaatatgatttaaatatacttacaaatacatattttatttatattttattattaatattggcataattaataatattacttatgatggggaatttagaaaataactatgtttaaatgaaaaattatatattatcttttcaccaagataaaatcattgctagctgttttgtctttcatgcagtcgaatttcgtattgggcatattttaaattttctattacaaaattaataggcagtttcaactttagaacttgtttcaaaacttctagctgtggttgtagatgaattaaataatacaagtaaattgattgtattgtgaagaatcataatttcacatcacagacagcattatctgtctaaaatatttgaaattttaaagctttttcattgcagattaattttgtctatatcgttaaacacgttacataaattgagaattttaaaataggttttattggcctgctttttacatgacatcayatattttatagattttgtttcacatgtatgcatgcatgcaatacagaaattataaagcaaaaggaaaagcatatgagaaacactaaagaactatctcatatttataaatagtaggagtgacatgtttcaaacctctgaagattgattttgttttattaaacatggatttacggatgttacaaagaagttcacactagtttaaaatccaggtgatatctccgtgtgcatcctgctccagagcatgccatggtcgattaacttatctctgatgtctatacaattgatcctgtagccacggctcaactgatcctttacagctggaattgatgcattatggccaaaattaactcactggtctggtctctgacaggttattgaagggagagctctcatttcgccacctccacttccaccacagaatcaatacaactaaagaaatactgtggagaaatctgaaaatagatagcacaacagggtgactatagcaagtattttgtgtggctggctactgctctactctttgtgcacttttacacctattggatacaagatgaaatttgtttttaagataaaagggcttttaaatagtatagatacagcatgttctttgcagactgctgtctttctggtgccagaaagggaagtcactagatacacatgtattgataactattttatatttaatggccagggattcctactattaaaatctgggttctaggctattattactttcatttattattgataaagcactgtaaatgcacatggtatttaatgttacatgaaatcgtgccagacaaattaccttccctgcagatacttaaagctaaaagcagaaattttctcccattttgtaggttgcctgttcactctgatggtagtttcttttgctgtacagaagttctttagtttaattagatcccatttgtcarttttgtcttttgttgccattgcttttggtgttttagacatgaagtccttgcccatgcctatgtcctgaatggtattgcctaggttttcttctagggtttttatggttttaggtctaacrtttaagtctttaatccatcttgaattgatttttgtataaggtgtaaggaagggatccagtttcagctttctacatatggctagccagttttcccagcaccatttattaaatagggaatcctttccccattgcttgtttttctcaggtttgtcaaagatcagatagttgtagatatgcggtgttatttctgagggctctgttctgttccattgatctatatctctgttttggtaccagtaccatgctgttttgcttactgtagccttgtagtatagtttgaagtcaggtagtgtgatgcctccagctttgttcttttggcttagaattgacttggcaatgtgggctcttttttggttccatatgaactttaaagtagttttttccaattctgtgaagaaaggcattggtagcttgatggggatggcattgaatctgtaaattaccttgggcagtatggccattttcacgatattgattcttcctacccatgagcatggaatgttcttccatttctttctatcctcttttatttcagtgagcagtggtttgtagttctccttgaagaggtccttcacatcccttgtaagttggattcctaggtattttattctctttgaagcaattgtgaatgggagttcactcatgatttggctctctgtttgtctgttattggtgtataagaatgcttgtgatttttgcacattgattttgtatcctgagactttgctgaagttgcttatcagcttaaggagattttgggctgagacaatggggttttctagatatacaatcatgtcgtctgcaaacagggagaatttgacttcctcttttccaaattgaatgccctttatttccttctcctgcctgattgccctggccagaacttccaacactatgttgaataggagtggtgagagagggcatccctgtcttgtgccagttttcaaagggaatgcttccagtttttgcccattcagtatgatattggctgtgggtttgtcatagatagctcttattattttgaaatacgtcccgtcaatacctaatttattgagagtttttagcatgaagtgttgttgaattttgtcaaaggccttttctgcatctattgagataatcatgtggtttttgtctttggctctgtttatatgctggattacatttattgatttgcgtatattggaccagccttgcatcccagggctaatatccagaatctacaatgaactcaaacaaatttacaagaaaaaaacaaacaaccccatcaaaaagtgggcaaaggacatgaacagacacttctcaaaagaagacatttatgcagccaaaaaacacatgaaaaaatgctcatcatcactggccatcagagaaatgcaaatcaaaaccacagtgagataccatctcacaccagttagaatggcaatcattaaaaaatcaggaaacaacaggtgctggagaggatgtggagaaataggaacacttttacactgttggtgggactgtaaactagttcaaccattgtggaagtcggtgcggcgattcctcaggatctagaactagaaataccatttgacccagccatcccattactgggtatatacccaaaggactataaatcatgctgctataaagacacatgcacacatatgtttattgcggcactattcacaatagcaaagacttggaaccatcccaaatgtccaacaatgatagactggattaagaaaatgtggcacatatacaccatggaatactatgcagccataaaaaatgatgagttcatgtcctttgtagggacatggatgaaattggaaatcatcattctcagtaaactatcgcaagaacaaaaaaccaaacaccgcatattctcactcataggtgggaattgaacaatgagatcacatggactcaggaaggggaacatcacactctggggactgttgtggggtggggggaggggggagggatagcattgggagatatacctaatgctagatgacgagttagtgggtgcagcgcaccagcgtggcacatgtatacatatgtaactaacctgcacaatgtgcacatgtaccctaaaacttaaagtataataataaaagaaaaaataatacatacttttattgaaaaaagaaaagctaaaagcaggaggagagcaatgcaggagggacattgtgggaagagtggagactgattaagggttacaaccctggccttgctttgccaagtaggtggattgcaaggagaatttgaaagctgagaaattattctgagattgggaagcttttcagcaaaataaaacctataactgaaagcaagtaaaggcatcagaaaagaagaatttcagccctttgcatgacaagtgtacatcttcagttctgataatcctcttacatcatgttcaccttgtgtctcagcatcacctcccactcatcatactccaaacatgctccatcacattctcaaacctgagtatgcattcgaattatctgggggctagttaaaacatgaattgttggtccacacgtcagagtcagagtttctgatttagtaggtctggggtttgtatttgcgtttgtaataaattttcagtaattgttgttgctgttcatgctggaacaactttgagaacctctgtcctaaactactaccttcaatttttgttatatcttgtcctccaaaccacagcttggaatcaactctaattctcatctttctagtcaagcgatgctccagtttacctttgctttccttggaattccatcttttcttttcaaactcacagctactaatcagacatgactgctactagcaacaagaaatcacatgatttcaataccactattttgaacaccctttacatgcaagttactgtggtagccactttaaaatatagtagcttgttaaataatactattagataagttgtattagcttcatttataggtgaagaaattcatttgtagtaagattaattcacttgtaatgggtattacagaaaggatataaatgaaggtcagtctgacatgaaaacccatgttcttattgtgtccaacctatattcagatgccacctgaggccaccacttctttcaggcagcccttcttgtatgattaagcaggtgatatagtaaaccgtctcccttctctcatctactaatgatatcccctttattatacagacttggcatatgatgatatagcattggaactcagtaccaaagggatagattaaccaagaaatatcactggaaaggccaggagtggtgttgattacctgtagtcccagctgcccaggaggttgatgcatgaggatgtcttgaggccaattcaaagctgcagtgctctgtgatcatgcctgtgaataaccacttcactccagcctgggcaacatagggaaatctcatgtctcggggtggggggcgggggcgggaaagaaggaaagaaatgttcctgggacaagtaaatgtctacatgacacaatagtagatggaataaaattctcaatttgaaaaataaaactgaaaattttagaagaaaacataagatactgaaatacaaactttaaaamttgataaacataaaaacctttaaaaatgcaacaaaagaaatggtaaataaaatcaaaggtaaatcataaagaaaaaaagttggcaatattgtcattgttttacatatatgcatattgaatccagtagaggagaaataacttgcccaaagcacacagccagtcaagtgacagggcaagattctaatccactgttgtgatayagatattaggatgaagaatgttttagttaattcaccactctgtgyttttaaattatttctcaataccaaacaaattaacttgtattttgtggactctatttatacaaatacaatttctcagttaaagcagatgaactaattctatatgcattatcatagatataccacataaatgtaaatattgaataagactagtaagactagttaattcacaatgtgtacaaaatgatattttttaagtttaaaacacagaaatcttatgtattatttgtaaatacaaatatatgaatcgaaagtataaaatcatggacaagaagaatacataccaatttcagactactggtaatctctgaagaaggaagaaggaaacagaaggggtcagggtggccttaattgtataagtgatgtttcattattatgtagctttaaaaatctgaaccaaatatggcaaagtgctaatgcctgttagattaatgtggccagtacttgttttagttttttctcttcacttttcaggatttttgaaattttttatggctaaaaatagaaaatttaacaaaggtttttcatgggttgaaataaattttggatattcttggttaaaacacaagaattttctttgctgcaaaacttttccatcattaatatgctaatggaaatatgaattgccaagaggataatgtgctatgaaatatttcccaatcttattttaccatggaatccttttatttttgtcttaatgaaacatctattaacaactcatggatattttgggaaatgctgttatacatcacagcacttaattttccctaattgtttcatgtaatttaacttaattttcctgattatatttttcatctctttgataccgagaccaaagtcttattcccttttaggtagacatataatggatataaaagtaatactttgatgggtttgtttgatttttctgagaaattattgtgtaggtcatcatacttaatgtaggtttggggtcaagggagagaagtaataaaaattgcccttgcacacagttttatatggcactaaaaagcaaatctaaggaacacaaagatcataaggtcaatggtatttattttcaaacaaatggaatatatttatgccaaaactttgccagacctgtttctgtagacatctgtccttcatttattcattcatttatttcaacaaatattttcaaataatctgaggagaaattatactttaataatatatgggtagtagataaaattcagtgcatcagatttctcagaattatatcatcaataatttctcagagtaaaataacttaacccttttaaaactatattaagtgtaagtccaatttaccattgtatttaaataattgattcatttaaatatttttgaatgctatacacatcttaaattcattggttagcaagggtacaattttaatacaataataaataaagtaaatagaattgactaagcaaaaatttattgacttgaaattttatttcttacgtattgccacacatataaggctcccttagccaagttaatgtcagaagcaaacacctctcatccctactccttcaataatttataaatgtattaatatgggtattaaatgaaaatatcaaatttttaaagttatgtgtaaagatctagtacctatgatgaatagctaacccttgtctatcttaatgtttcagaagagcagtttgtgattctcatttcctaatgattaccttttataccattttgtatttggtaaaattatgctgctatttgttgaaggataaaacatttaaatctcattttttataaattttattttgctgtaattcatgccgctctaaaagctgtttcatggacttatacaaaagaaaacatctgtgctttgcagaaatataatttgtatagagttgaaatcttattgtaatataatttaatacctttaatattgtttaggttaatttagaacccagattttcatagaagaaatttacatcaatactaataaaataatctgtgttttcaaaccattattgtattggaaactaatactgaaaacagtttttaatcaattctattacagagattattcagstatccaaaagttttcaaagatatgatctttcatcygctttgtcgttttagtcttggaaatatagtgatataaagagtaaatgtttatcttctcaaattttatcatattttaacattgatctgaaatgttaatgataaattaattttatgtaagacaaaggacagatggaatgaataatagattatgtgctttgagtgcttctggtaatgttagtactttagcatttttatataatgtgatcatgactcacagtgaagttacagttaataattgtgtaaaaattttctgctgctgaaggaattcatatttgctttaaactgtcctgctacagcttatcagtatttcaggcagatgtccctcttaactgtgtaactcatttatctcactgccagctgaaatagtatgaaacaactcaattctgccagttagcagaagtcaatgacaagacattaactcaatgcttataaccacctgggtaataaaattatatcagcagtagtctgcttatgctactgtaagaaaatggaatgatgtattgtgctacaaattaattagcatatatatattaatgaagattaaacatgtgatatttaattttgtgaataatttcttgtatgaggaaattttacagatgggcctcattatgtatgcaggtatagcaatggacacaaataacttagagttttaattccttaaaagtgtgtgattatcaaagtgtacacgcccacctattgctcctggatattttcctgtgctcctatacggaggacttgcttgaaagatggttgtgtgtatgttagggggtggcagaaaggatatatacacatacgacataaaccttgtatagagtaaaaacttagaatgaagaatgtcttaattatctattgctttgtaccaagtggcctcaaacctttgtggcttataacaatgracatttattatctcacacagactctggggatccagaattcaggagtggcttggctgagtgattctagcttggcagctctcatagggttacagtggagttgtcagctggggttccagtcatctgaaggcttgaccggagcaagaaggtctgctaccaagcttgcttaattatgtgatgggcagttgacgctggctctcagtttctcatcatgtgggccattccactgagctacttgagtgtcttttttacattgcaacaggctctcctagagtgaatgatatgagagagtaaggtagaagcaacagtgagttttataaactaaccttggaagtcatacactctcatttctgcatatcatattgggtatgcaggttagctctgatcagtgttggggagagttatgtgagtgtgtgtgtaacagaatgtgacaatcattagaggaagtcaccttagagattggctaccactggtggggagggaaagacatagcatgtatataattttaaagaactgctgtatcttaattataattcagggtaatgaaaatatcaatcactaaaaataatttgactgatttctgctaggtgaagtgtcacatgcttttttatattaatgtttgtgcttataagtcacttgttcatgccaataactgtcaatcaggttatgtggatagaactgtcattttatactgggaaaactctggtgtcacacatcaagatggtgccagagttataattagaggaatgatatttagggtttctgacttttaatctttggtcattgcatcctactagcccaggagtgcccccaagagattatttaaatgctaattgctgaaatagatcaatatattatggattcatttccagccattgctctatgaaattgtaattcaggaagatgtcaacttattgtatctattctgctggtacatgttatgtgctcctacattttaagacctttgtgacacattgtgataatgaaacaataagatttattagtaaagacagtgagtaatttacctctacatacatttcactataaatatcaagatatggtaaaaggaaatacatccatcaataccagacctgctgaattttagctatgaatctgtactttcaatatagaaaccagaagtggaggtgtgaagagctattagcactattaaggtatattaggggagagggagggattgatggccatgttttttaaaaattgtggctcagggtattgttcttacatctctttcaatggaaatagactccattctcatcactaggtgggctgctaaagtaaatggcaagagcaacttaagacgttttgaagaggagatgttaaggtcagtttagaagctcactttctttgtttaaggctaagacatattcataagatgcactgtttctgatgaatggctaatttgattgaagggagtgcaaggatgcacctggtatctctttgctccataggattacatttcctggatgtattttactacccagttccgggaagccaactgtctagtattgtcagctgcgtaacattagatatttttgtatttaattaggctaagtgtctgatttacaacacctgaaccaaggcttcagcatggtcattcaactcaaagagaccaacacccaacatgaataactctgttactgccctgctgcttgacactcatggtgctttaatagacccaatgactattattagaataaaaatactgttctacttgcaaacctcaattactggaaaaaaatttgaagaataattttcacatatgcttgttgtgggagcaaggaactcctttttgactgctgtagaatttatttcctgggcctggtatgcagagggtggaaggtgggaattgtgaaggttatgctgcatttttttttgtctagtcatatgcaaactagatcaagaaattaatgctttgcccagattcttggaatggtgagtagggaaaagtttaataaaacaagtatttacaaagatgtggttagagtttagggaaaataatagaccgtggtgcaatgcctctgtgagtgtaacagtagcgagctgttgctatctctgggtgattaggggcagaggaagggagaagtactagagtccagggtggactgtgtcatttgacaggagctgtagctttcaacagagggatgcagccaaccagtagtaacctgactgggggaaaaaaaaaaacaaaacaggaaaatgaatgccctgacctcactgtcctttcacctctaactgattctgtccacacaggctccagggcacagagcaatgtgtggatccaaagggacaaaaggaagataccaaggacaaaagcatacttaaaattggcaggattaatatctaaatgtctttgtttgccttatttcactgaaactaaacattgtgtgttgatctctggagctggattgtctgggtttgaattctagctccaacactgactttgggctggtgacttactctctctgtcccacaactgtgaaagaagatgattatggggctaagctgacagggttggagtaatgaataaatgaacctatgtgtataaatacttgaactaatgcctggcccatagtaagcattatacctctttactgttattattaaatcccgtatcctgtagttgtttgctcctrtttaagacaaataatgtacattgaattaagttggatttctgttcatagtgactatttttcagtattcctttggtattgggctatatcctgggattaaatatccagtttgcagtaatagaattgagatcctcagagtcctcactttcagcaaaaaaagagatcttttgctgaaaaccttcccctgaatatcttcatgacaaccaagaaatctggtgaatttcttttctggaaaagttgactgactggattgmccctttgagaattaaatttttggatggaaaaatttagtcaactgctcctgctttctccaataaatgaatcccttcaggagcagcattttaaatgtgtttattgcacataatggtagaaaaaacaaaaatgaatctttgacttagaacaatgccttttcatgggatttattgtctaattaagcaatttccaataaaacaagcatttaaattttttcaagaacaaacatccataataatattaaaaagtagaatgagaaaatcacactatagtttagaaggcctgcattcacatcactggctctgtggttttcagactttggttttagccatggaaccctttgaacatcatatccttacacatatgaattatatgaaagaaggagccttctggctcaagcccacctgatgagccctgtttcccactgctctgagttaactccaatggccgggggctaggttgctgaggaggacagtgtgaaggctaccttatgagtctctgaattcccttacacccttgggtgcaggacttagtcacccccttgtcttttggagtcctttttcaagtgcagagttctggacttcaagacagtcttctctgaaaatatttgtgttagtgtgaaaaaaaaggcatttaatgagggctttaagaacagaaggaaacaccagagagaatttaaataagacgatcagcatttcgttttcatgacccaccatgattgcattggaaacttgacaagaagtctgtgaccaagagttagtgggtttcaggagttcaggctccccacatcccatgttaaacaattcatctgagtgaaagttgacgaatagcccttcttagatgaccacacacagtcttccaggcaagagtttcaggaggccattcaaagagtaatttggcataactaaattaaaccttgtttttgctactactaagatctttatatacatacaatatttaaaacaatctcaaggccaggcatggtggctcatgcctgtaatcccagcactttgggaggctgaggcatgcrgatttcctgaggtcaggagtttaagaccagcctggccaacgtggtgaaatcccatctctactaaaaacacaaaaattagccaggcatggtggtgggtgcctgtagtcccagctactcaggaggctgaggcagaagaatcacttgaacttgggaggcaaaggttgaggtgagccaggatcgcgccactgcattccagcctgggtgacagagtgagacttcgtctcaaaaaaaaaaaaaaaaaaaaaagaaatcatggtgtgtgcaggggatggcagtgtatacctctctttctcactcttactattaatttattggaagcttgtttttgtcaggctctaagctgagttctctacatcatcttttataaaactaataatattattattgtgataagaaaattgaagctgacctaagtagcttcagtaagatcttaccattagcatccattcatagcccatgctcttaactacagcgctaaatgcattatacaaacttgacaaacttcagctctacaaattatcacaaaaaataataacagcaatataaatttgaaatgtcaaggatcatagtaaatttatggtaaacatttakggcaraaaacaaaagmcaacacagattttattcaggattatatgtttctacacctttggttggaagtttagggaggaatttggtcatagcagttctcattgtgattggtgaatgatgtaacaaaggcattggcttctaagtggctttcaaagaaaggataaattaaagtcgagatggacctgaggaagaccacatgagggctgatggggaagaggcatttgaaggtttgcttattcttttcctgtaccttcatgaagatgtctgtttcaggcaattaggaattttcaggaaggtagcattattccacttttcccacatttgcatatgcttgagagtttcatatggctgatttctacttaccactccattctcatatcaaacattgcctacttggagatggacatttggcaagcacttccccctttctcctctctagccagcccctctcaagatgttggaatctcatgactatttttctttctccaaaacaggaatcactatctgaaattacctggttgatttttttaaattgtctgtttctacaaaatagaatataaaatccacaaagcaggcatcttgttgctgtggcctaagtgcttgtgctcccctagaattcatatgtttaaatcctaatccccaatgtgatggtattaggcgttgggggcctttggaaggtaatttaatcatgaaggcaaagccctcctggatcggattagtgcccttttataaaagagacccccaggccaggtgcagtggctcatgcctgtaatcccagcacttgggaggccgaggcaagtggatcacctgaggtcaggagttctagactagcctggccaacatggtgaaaccctgtctctaccaaaaatacaaaaactagctgggaatggtggcaggcgcctgtaatcccagctactcaggaggctgagccaggagaatcacttgaacccaggaggtggaggttgcagtgagccgagactgtgccatcacactccagcctgggggacaagagggagagttcgtctcaaaaaaaaaaagagagagaccccagagagcggccttgcccctcctaccatgtgaggacacagccacagtttaccagacaccaaatctcctggcactttgattatgtacttcccagctttccccctaacacaccccagaactgtgagaagtaaatttgttttttcataagccacccagtatatggtattctggtaaagcagcctgaatgggctaagacacttgtctttgtttctttcagtgtccgcagaatctagaatagtgtccagtacatagaaggcagtgcatacatatttgctcattaaattaatattctgaagctcttgaagtgccctgtcatattatgaatttcagccacataccattttaaatgaagtttataaagagttcttaatgacattttaagattcttaatatatgatgtgaaaaaattaaaaagctatatgtcaaatttttaattcagcatgattttgtgtacatatttgatagagaaaagcttagagtaatatcaaaaaatatagttaccgtggtggtgggttttgggtaattttctcttgtgcttttactacagtataatgagcacaaattacttttacaaggaaaatgtaaaataatcaggaactaaaaaaagtttgaaatagatcaacaattttccaatgccacagtttttgctttcagatacctttttgagttgcacattagaggctctgcttaggtagttgtgacaattacaataatggtatgatgatgatgatgacgacgactaaagtgagacataataaaagacagcaaagaaaggaacagaaaattttggggaggtggggatataagaatcgtctgctacatttttttcctcataaacttgcccaagctcaagtagtaatgtttacattatcagtcttttcttggtcttttagaagatgggatatagaaaaaggtatagaaaaatcaaccaagacaatctgaaaatgttatattatttggacaaatggtgattcacttggaacttgatgtattactaatgttttagtaatatcgggtttatagtgagtatgtagatgagatcataatctttgacctgacttacaaaatcagctagctggactgtaagttgatgagggtaggaactgtgattttttcagttacaactgtatcctcagggtctagcatggtgctgtatacctaaaaggtacttagctattttttaatgagtaataaactggtcatgggattttatttcaagatatgaagactgaagttattttcctgctgtattacgatattcttatactaaattttatactactatcctgcttttgagtaactaagattgagcaatgactgatttctttatttcacctagagtcaattgaattgggttagcaaagtttaccttcatattttagtgtcttataaatggctatggcagatcaaattgccccaacttagatatataaatgtatcaaacaaatctcaaagttttgctggagtattgcaagaaaagtacaaaaatttaaaaatcaattttagaagtaactttaaagctcatcttaaatgttatattaagggtgtagaggaaattgttttattgtagccatcagttatgaaaatatatgcaaatattcttttaactctatcctatagtggtaattgttatgaagacttctattttttaaagcattggttctcaaaatggttgcatattggaatcacgtgagagagcaataaacaatactaacgcctgagtcccagcctaagtattctgatttagttgatctggggggcagtctggggattggagtgtttcaaagctccataggtgattctaatgcccgaccaaaggtaagaaccactgatttaaactcttaacacactatctacttatactatagtattgttttccaaaaaaatacttacttttgttagctcacgacctgtaatgtgttctgatttacagggagtgtccttccaaacaatgtctacagaggatttctagatgataaaaaatttctcttttagatagaatgacaagcagattatttgccttcctgttaggattactgtcaagggtaattctgtagcttctgtagctatgctgctctttataataatwtttttttagttcttcttagcattatgtcctgatctgtacctcactgaagttacacctaatgtcctccttttcaaaagtacattagggaggactggcacattagagattttattctttgacttgaaattttagaataaaattgaaaaaaatgaatgtatgagaaagttaaaataggaatagtatattgaacaaaccaaaatgtgccctgtggagctcataaagagaaaaagaaatttgaaaattttaatacaactctgctttatagaggaataaaaaatgaggtgaaacatccttcatttcccaggaattcagaaacttaagtcacattcaatttggaactgacaagtctatctgaagaaacaattagtttagaaaatttggaagtaaaaaatccattgtatttgatctttargtttattttagtttggtgatttaaaaacattctttgcctattgttttaaaaattaattgttgagtgaaaactaatgggatttcataattttacttctcatacactaatgcrttttaaagtttcaactatagttcttgaggaaactcaggtaatcttgaacacactgaaaataaggagtaagacaaatacaagtaatagaagctctaaatgtgggacaaataaaaacataaggcatgatatttaaggtctattactcaatacgtaggtgatgaaaatgcaatagaactctacattacataataagccaaattaatttgcatctgagctacctacaaatattttgagccagcttatcctgatacaggttttcaagctatgtgcaaaagaggcgtttaattattttattgtgtatttgccaaataaaatgagatcaatgtgccacaagtgaattaaatttatgtttgttctttattattgctataataacttcttttttagtaaatgaaaatgaaatcaggtaacctgctaaagttttcttgccagctactgaaagagcatctgcaaatttagtaattcctctagggagagtataggctaactgaagagctattcctttgtcagtgatatatgatagctggtggcattctgtgttggattaatcagttattattgtgtaagtaaatgaactgatatgaacctctaaagcagataatggcaaagtggcagttaattattctatatagaaaaattaaacatctaattagattcttactaggaaataccttcatgttgattatgaatccaaagtgactcagcatgtctacaaactggattatctggatctaaagttatcataaaaataatggtgttggaagagatagtttgctctcaaaatattaaatgataggcctagacttaattagatgccatttatttcctcattatttattaagtagtaaattcttaggtttcccattttcgcctcttaatgttgctttgtatgatcatatattgagtgcttactgtaagtcagatactgggttaagcagtgagcatgcatcatattattgaatctttacaaacatgctaagaggcaggggccatgattcctcctttatactcatgagaaaactgagcctgagagttaaataactggtccatggttttaggccttacatttaagtctttaatccatcatatttaagtctttaatccatctttagttaacttttgtataaggtgtaaggaaggggatcagtttcagttttctgcatatggctagccagttttcccaaaatgtggcacatatacaccatggagtactatgcagccctaaaaaaggatgagttcatgtcgtttgcagggacatggatgaagctggaaaccgtcattctcagcaaactaacacaggaacagaaaaccaaacactgcatgttctcactcacatgtgggggttgaacaatgagaacacatggacacagagaggggaacatcacacactggggcctgtcaggggatggggggcaaggggagggatagtattaggagaaatacctatgtagatgacgggttgatgggtgcagcaaaccaccatagcacatgtatacctatgtaacaaacctgcacgtttggcacatttatcccagaacttaaatttaaaaaataaaaattaaaaataactggtccacgttgctaccgtcaggaagtgacagaacccgcacggtgtcagcaagtggaacacattctaaatcattcaagacatggacttgtttggtgttaacatcatttgatactctgtaaattgtattggttccactcatgtttctcaatggtattctcttcaaaagttatttatcagttgctggcttttgttgtgttttggtgtgggctttttggcacaacctcatttccttgaccaggatgaagcctaggaagagtgctcttaggagtctaattatttatagccgagtttcccaaccatggctttaacatttggattaaattattcttcatagtgaggggctgccctgtgcattttaaaatgtttaacagcatccctagactttacccactaggtgccaaacttcctcctttttttgggagaaccaagaatgtcttcagagagtttgccagatgtcctgtaaggggcaaaattggccttggttgagaaccactggtttatataatcaagaaaggctattggataattttgcctaatcacaactatcacaccactatgccatggttgaaacactataaagtgttgtcaaagaaaacttgaactgtgtggagttaaacaggcagcaaaactttttacaagactattgtaagccgggcgcagtggttcatgcccgtaaacccagcactttgggaggccgagggggcagaccactcaaggtcaggggttcgagaccagcctggccaacatggtgaaaacccatctgtactaaaaatacaaaaattagccaggcatggtagcatgcacctgtaagtcccagctacctcgggaggctgaggcaggagaatcacttgaatctsggagcagaggttacagggagccaattgcgccactgcactctagccttggagagtgattaaattcaactctgctgaaacaagaggcagaggggtttttaaacactggactagctagtggaaatgtgctaaaggattgtaggggcaaggctggtcaaagtgattaggccatctgtgtttattactaattggagctcgtggaagttaggctcctaccctcatttcttgatgcttccatgccaaaaagatggcccctagatccttgaggatgttccttggttgtaaaactggcaacagactgaaagaagatctatatctcaaagtggtagcaaaagaatttacaaccttaagttttctaaggttgtaatgctttaagaaaaggggggtcaggggcctataatctgtaaaaacctgtctgaaatttagtctagctgaagggaatgttaaggccattttgggttatgataatacttacataattagaatgaatctggatatgtcattaagtcaatagtcaggttgggacttatggaatcatcatgtactctcagcaaagaaagtctatggaggggtctggtgttgaagccaaggcctgctttattgccctgagactattcctacctcagtttctgtatctttatcttgtagagctggcaactcacatccagagttctgctaactccaagttcaagctgctgatactctcagcaaatgatgatcatgcatttcccaaactgagattcattttaaacaattgcaaattgtttaaaggaatagggtagatgctgtgtctttttttatctttcatttccaaggcctgacacgtagtaggaactttatctagttgcttgcttcatgaacagatgatacctaggtctcaaatttcctgaatatttatctatattaatcttgcctcttacctgttaaatcacaagaaagcagaaatagtagtcccctgcccaggagacgttttctggatttatccaccagaggcattggagcacagcagatacaacaaagttctggagtctctgactgatttcaacaatcaatttattccatggcaatttaatgagctagtactgagtatttagcttgagcaaaatactgtgctaaattctggaaataaaacacaaataagacaccatgcccatcctgaaggatctcactgtttcagaggagtctgactatcctcgtggctataatactgtatgatcaatgggctttaagggctataggagcacaaaagaaaatacgaattcatctggagacattatcaaagacattatggtagcaggatcatggaagttgagactagaatgctgggaagaatttcaaaagagaacaatgtacatgaacaatgtcagccacagcagatgggagaagtactgtttcttaagttaccagtcaataaggcataattatgaaataggctcatcttttctccaaccactgtcctccaacaggctttgttggatctcccttctctgcccctggagaatatctcagaaagatcacagagctttttcagaaataataatagagcaatcattggatattaggactgtcattttcaaatattaaaagtatagtataatcatatatcataactttcacctctaatcctatttaaggtatctccccatstttctagctcggttctgacacaagaattcccctgacccacagtaagaaaggaggggccttgtcttttttcactcttcctccacttcgctcttgtgttccttttccctcatactccaggatggaactaggaaacagaagtaatgagacaatgtctccctgtctggtgctcttgtaagtcggtacggtgccatgtgcttcagatgcccagttgcttggattttctataacaggctgctgcttgagcatgatctgaaagtgaggaggtgaaaagcctaacccttctttcttctaggctaataagttttctagaaaactccattacctaatcaactttatattcattatatagttggtgataggtgaggaagaaaggaggaaaggacatgtttagatttatctcaacaggtctgggtgggagtgtctggcacctctctatagaatgtgtgaacatttatcacttgttgtcctcaattttaggacctctgccaagactcttatggcaatggaaatttcccattaaatatcctgctacatttaaatttgtagaatatttattgtttgtgggacacttgtatacattgatggcagccagctttattagacaaagtctagggtttggaactagccatacctaacattaaaacaaacttcgacactcattaaactatgataatattaatttctttatcttcaaaatggggaaaatagaacatacattttagtgttaatgcacataacacagagcctggcatgtggtgggtgaaaaaaagaaatgcctcaacctcttcactaatagcaactctttgagtaggcattgcaggaattgtttggaaaataaatacaatatctgggtataggagaattgttgaaattagatgaaagacagattttgaagatcttgaatgccatgctaaggattttaactttcttggataccaaaacaaaacctaagaaggaggatttaaacatagtagcatggtttccaatcacttatgcttgaacctcaaaatcatcttgctctccacctttccatctcctctaaccaggacccaaatctggctaatttgcaataactacaataagaatgatagtattaatgaaatatttattgagctcttactatgtggcaggcagtgtgctaaacagtttaattacattgttgcattttattttcacaatcttacttcgtggatgaggacattttgagcctgaaaaagtgaaaaatgcattgggagtcttacctccagttggtgacagggctgggatctgaactccagctatccagcaccaaagcccgtgggcccactcccttccttttatctcctaaacatagccagagaaattttcctagccactgaggaaaaagcttttaaaacaacagtcatcaccatttttattgataaaaattatattcacatatgtaattatattcacacacataattttgcatacttgcacagttttctttttttttttttttaatagacagagtctctctctgtcacccaggctggagttcagtgacacaatcatggctcactgcaacctcgaattcctgggctcaagggatcctcttgcctcagcaccttgagtagctgggactacaggcataccactatacccagctaatttaaaaaagaattatttttgtagacattgggtctcactatgttgtccagactggtctcaaataaaactcgcacctcagactcctgagtatcagttttttaatacagtatttttcctatttcttcttggcctgatttctccctgtcctccatcttcaacacaaatctccataccaatcacatcacatcacgtcacgtcatgcaagcaaggtaayacttgcttgtgttgtcctaatgttcattcttccatgtttctcttcatttcatatactattaataatataaatatgtttatgtgatttgtaatcatttacattgcacatataggtgatgttttacacatttttctgtatctttcttttctgattcaacaatatagtatgaaaatacttctagatcaactggtaaagctctcattcattctctttaatggctgaataatctcctattgtgtagtatatcatcactctctcagccattcttctatatatgagcatttgcttaacaaggttttgtctttgtgtttatttttggtcaaatgaacagaagaacaataatcatctcctaggtaactattaatgcactaggacttttattctatagggcatatagaaaagtatatgtatttataattctaacagatgttgctagatggctttccaaaaaacaagtcatcttcacacttcacactcctggaagtgtattagagtttcttttttcctacatccctgccattatttggtgttagagcttttttaatttttggaagtctgttaggtataaagtgacatttcactgtgttttatttgaatttccctcttggtaaatttaagcatctttttttcctctgtgaactgttctttcatagtcctttgcccctatttctattgagttgtcttcttattaattttaatagtattttgcatattgtggataattaacccttagtataccatttgcttggcaaatatatttttctaaatccatcatttgtctattgacttgtttgcctcagaaaataccatgtaatcaaatagatgtataagttatgggattccaattttgtctagattttcttttctgtttatcatagatgctgtctcctaatgtttttgttttgtttataattaagtttataacaaatatggaatttgttttttgtgtatggtgaaggatgggaataaataatttttagatacctagttgtgccagcatatttatttaataatatgttctttctctactgatcttatatagcaagatctatttctaggtattttctctttccattgatctgtttatttctataccagtgcatattgatttggtaataatacagtggctgtattataagttttaattacctccttattggtcttctattacatgattttattggctatgattaggcacctattcttcttgtaaatcccagattatattattccaatctgctttaagtcctgttggaactctaattgcaattccattggatgtatgtgctaatttaggggaaagatattattttcatactatgtcttcccaactaaagaccttcttatttggtttagatattgtttaataacttacaatacaattgtatggttttgttccatatagcatatgtctcattctgtttttattaatttctcagtattttgtaatgtttataagtgctgtaattattatatttttctcattttaaagtttattattgctaaagaagataaaggctttttaaaaaatatttatcttgcttcaaactgccctactgtactctttcattaactcttactttttactgtcccagcattcatgatctggtacatttgacccaactatttcagcccactcacaagtatttgattgattcatcttccctcattttgagatttctgatttggttgtttggttagagtatttttacaagcattttctttatacacagtacatgaatgacactctatatattattgcaaatacataaatattgttatttcactctagtgagtaatggatatctcggctggtaaaacaattctattgttgccaggcttgtctctcaatttattataaattttattccaatgtcttatagcttccaaggcttcatatgagaaatctcagttattatcgaaccaaactagggttccacttgcctggcagagtaaagtcagatatccatgctgagttttgcagtaggagaaagggaggtatttatttgcaaggcatggagcaaggagaattggagaactgatgcttaagttctgaccttcctgatggcttgaaagtaagggtttttaaaggcatggatagccaggcatgggctcacacctgtaatcccagcactttgggagaatggggcaggtggatcacctgaggttgggagttcaagaccagcctggccaatatggtgaaaacccatctctactaaaaatacaaaaattagccgggcgcccacctgtaatcccagctacttgggaggttgaggcaggagaatctcttgaacccaggagatggaggttgcagtgagctgaaattacgtcattgcattccagcctgggtgacaagagcgaaactctatcttaataaataaataaataataaaggcagaggtaaattcaggaaaacagaagttgcagacaaaattataaatcaataatacatggagtttacatgttggttttggcccaaaagggtgggacatcttgaagcaggagattacaattcataagtacattcaaagattttctggctttcaaggctaaggctaaaaatttgggttcagcagaaaagaatgttagctctgggtcctgggtgtgacctcctccaggtgcctcaggaagaggtttagaacaagaaacagtggtcagagttcaatcctcagtttctccttatctgaagcttagacaccagaggatctgtttggtgggatcttgagtttctgaaaaacaactcggggacatatattaagatgttatctttagtttttataaggaaccaaacatctgacaaatctgatgtccttagctactgtttttaactgttattttaccttcttgcttatcaaatcacttacttacttctcagagctagctaggtgcctggaacttcccttgaaggaagtggagattttccttgacttccatgctcacgggtggaggtggagggggacttcgtggggagcacaaaggcttctaaaagggattcctactccatttcatggtccggtattmttttttcttaggkaactttttctttgtgtttttaagctcatacagtattttctttgttttccaacttctggacttttaattgcacaggcccaggaatatatatattatttttatcatgaagtctggaacttagtgaaccacttcaattgcttatttagatttttttcttcacctcaagaaaattctctctattatttaattgtcactttgccttcattagttcttttttctcttcttaaaattcctcttatttggatattagatacattgtatttatttttcaaatcttttatttttttcctcatgttttcatctcaattgctttttgttctggattttataactcttgatcttgatcttctaagacactgtttttgtttctggcagtgataattcacttcttcacttcatttaataaagtctttagtttggaaatcaagtgggattttattccaatttccatttgtcttttccagaaatactacttctctgggcagatttctctttctaattttcctgttacctctggctgctaatcagttaaaatggtttgtgagtcttctttgttgtctcagttcttgttattaggatatttcacaaagggttaagggcgctggcttccgtatttgtaggcctgttataaatgagccaacaactggcagtcacctgatgacctagtgaacattagtagaggttggcaaatgtgattaggcaatctgtgtttactaattgatgcttacggaagttaggcactcacccttctacagagactgggagattggggcactatctttttactgttagtattttttattgtggtaaatatatataacatgagatttactcttttaacaaatgtttaattttacaatatagtattgttaaccattagcagaatattgtatggcagatctctagaacttttttatcttgtataactgaaactttgtatttattgaacaactccctatctctttcttaccctaacccctggcaactaccattctactttctaattctatgagtttgtctactttgagtagatcatataggtggaatcatgcagtatttgtccttctgtgcctggcttatctaacttagtaaattgtcctccagatccatctatgttgttgcatatgacagaatttccttcttttctaatgatcttgaagagatattagcagtcccatgttcattgcagcattatcacaatagccaaggtgtggaaacaacctaaatgccctccgtgggtgaacagataaagaaaatgttgtatatacatgcaatggaatgttattcagcttttataaagaacacactacttttcctgatgcttacatttcaaagggatggctcccaggttcttgagaaaggcattcctgagttataaaactagcaagaagctaaaagagacttacatctcaaaggagtagagaaagaatttacaggctagaatcyacaattactattgctcctgataaaacctctcagttttcaagtctctagttttcaagcctcttgtaatgtcctggcctcaggggcaaggagtctcacccacctgatggagctactctatctgacagatgttcaggagacccagcagtcagccttcttaggaatatataggatttaagtgccaagtttatcctcaaaakcagtttattgggcttaagtgaagttcctcagaattttgccaagctcttccctctagagagaaaagttcattagcctccctagcttgtgatagtcctagccattagtttgactcagaattggccaaatgtttagagcttgttgtggaggaaaagggagctcctggatttattttggtgtayttttagaatcctctctatttctcttacatttctaaggctgggaccaggcaggggatttggcctcaggctgtcattagtgttttcagcgacggttgtattacggagtgatagtgwtagggttttgatcagattgcaaggtgggttaggaacaaagaagtaaaggtagggagtttatagattactctttgtagaygtaagaggttttaaataatttcttaacaatctgggaggtctgatattttctactggttaaagggaaggatacttggaggattattgaattagtaattggtatctttcagcaataatgactcctgtgggttgatggatgacaacatcctcagaattactctagtttcatgttatgtctgaacagtcacatattcagtttcttgataaaacaattcttatttctgttcagtatgtcttagacaaaaaaatagtttgtaaatgtaatcacaagaaaatgcaaaattatctcataatttgagtaacacattaaaatcttaatcgcctcaatgagtctgtccaataaggcatactgtagtttatatatacaaacacaattttaacctattctaaattgtgttttgaattattttgtgacttcgtgagtttcttgttaaaatcccttctaatcaaatgggatatgctaacaataactccttgttttcagatatttggttattatcattttrcatgattgaggccttaattacatattttttttctctgagtgctgtattatttgcttcttgataagtcaaatgaacaacaagagcagttccccagtggcattaaaactcagtttcagctccctagatagaaaaaatgtttttatggagtattttttctttatctttgcagatccaaggcagatcacaggaatgaaggagtgttttctgctttacctaactacaaaggtcctgataaccagtccctacagggaaaagtctttccaaataactttttggaatgctttccacattttggaaaattgcattccactcttaaactctgaaagtaaatatttacagagtcacacagattgcatctatatttgacaatactaactcataattgtgtcttccagtattcaaagaatacattgtaaagagtatcttctaagctaaatcatagtatttcaaattaattcctttttaattttttaatcaattaattatttatttttaattgccagtataagacacattttattatttattttcttttgagacaggatctccgtctgtcacccaggttggagcagtggtgcagtctcagctcactgcaacctccccatcctgggctcaagcaatcttccaatctcaacctctcgagtaggtgctactacaggcagatgccaccatacccggctaatttttgtgtgtttttttcagagatggggttttgccatgttgcttaggctggtctcgaactcctggactcaagcaatcctcccacctccacctcccaaaatgctgggattacaggtgtgagccaccacacctggcctaaattagctccttttttaataatactttttaataggaagattctttgtaatgacagttgactgtctcacaaaatcacagtcatcttcaacttttaaggtagctctaattatctcagtttatttccatcacagtgctttgtggtaaatgacttttacctgttagaggaattatgggtaggggttggtagatctgagttgtgatcatgtgttgcttgggttcgcatttttgacactgacttattccccctgatgaactctcccaagaaaagtttatatgtaagtatatgtgtatatatatatatacacacacgcacacacatacatatgtatgtatacatacatatatatgtatacacatatgtatgtatacatatatgtgtgtgtgtatatatatatacacacacacacacaaaatacattgcaagattgaaataaggtagttgtgctataatttcaagttcctttaaaggctcataaaaacaaattatatatgcataacatatgctttgactgcagttttttcttttcattcacaaatacctttctcattttctgggccaaatgaggcacagaccacacaattccaggtagtcatctacttcagctttttttgaaatgatttttttcatgttctctacttgtttcagatgtgtagagggtggactccttaatggaggttaagccatggcattttgcaggtggcagtatgccaagaatgctacaggctttctatgcaatgactgaagctagtgacaatatactggtaggagaaaattaggactactactgggaaatattgttgttttaggataattttgaaaaagtcmatgaaattaaaatcaaaccaataatttagacatagttttacttatgtttaagtgtactgctgtttattgatttaattatttataactttgatgcttttagcctgtgtttccccaataaagcatttgcttaaattttaggtgaggaaaasaytaaacactatgaaacatcttktggatttatgaacctacttggaagtattggagatcataattgcctctgtataaatttgaggttttcattattaacagatgtagctttgattctgtattatacttttttgggaaaatgatttggttatgggaacatattagactaaaaattggttttaatgaatgtcaagataactataatttatcatattgcattgctggttggcttggctttgttattctaataattttcgtgaggctaggagagctggggctcagcatcatttctcacctcacattagttacaaccagagtaatgggatgtgacgtggctaataaagtgtcaggtaaaaaggcctattttatgtgggcatgctagagaaacagggtggccacaaacattcagatgtggctttttatgagagccaatgtgatgcagaaaatcacaactctaacgaatcccctaaaacaaacaaaaagcctcatcatcctactaatgatagattcatcttattctgattayacagcatgaaacagcatttatacagatatcctttttttcttcccccccctttttttttagctatttgccagtttataattctgtctcctcaaagagtgtgagtgaatctacattagtcctactttgcttcataaatcccagtcttaaagtatatcttttgataaaccattcactgttgtgatgaagttaagacgattatttactctaatgaactgaagcagagatgtgaataattgaaagyatgagtaatccaaagtcatttcacattatgtttcctatagctggagttaaaacacaaataaccaaatatataggaatacatttgctgcaagtatggcagaattaatacctttattacataaataatttatctaaagcaataggaaacaatactctcacaaagaaaggaaagaggtctgagagaaaatacagccaatggaatacatacaaatggaaagtctcatatgctaatggtagaaatgtaaataaaaactaccattttggaatcttgtttgactgtagctactaaagataaaaatatgtgcgtgccccataatccagaaattttactactgtatacatttaataaacatgtatttacatattcacgaaatacatttatgataatgttcaaagcagcactattcctcatagccacaatgtgaaagtttctcagatactaacagtagaatacataaataaattttggtgtaatcatacaatggactaattacagtaatgaatatgaacatgcaaaagatagatgaatatataaaaagaacaatattgagcaaaattaaccaggaagaaaaaaaatacatactttgtaattctacttataaaaaattaaaaacaggcaaaactaaacttctgcttcaaagtagactgtagtaagtaatgtgaggccaagaawactgctgattaaactacaaaaactgaataaattacaaaaatcatattgttaaagataacagaaaactgaggaatcaagcagtactagatgcactaaaagttcagacaggcgaaaacatttcagaagttgctgaggatcagcagcttttgtttccctggggcatttgcctatatgggctgaagcatgaggattcggtattcacctaagcaaagcatcactcctgggagaaagagatcagcaatgttttggtgcccactcagcaaagaagtaacaaaatcagagaacacatagctggtttataattcaatacattctgaggttttgaatgaaactaaagtgctaaagcaaaagcctctgaaagtcacagtaaaattattctcacctttatcatgattaaaagtctgaaaatcctggtggtaaaatcggtaatggtgaaatgacaatgcagagtgctggcacctttttcttaaggatgcttaaggatttgggagtcagctggaggataagaatccaaggtaaccacaggcagaaggtggctaccagaggacagagaaaccagaagaatatatatatatatatttgccatttatcaactcactattttactatttatatgattaacacattgtcataatgtttaccataacattgatataactgttgtggaaatagtttggatatatatttatctaaagatatatatgtgtttgtgtgtgcatgtatatgtgtgcgtgtgtgtgcgtttcatatgtgtatatctagagagaattattttttctcaaaaccgattagatttgagaagagtcgttttttggtatttttatgaatcagaaatattgtcctatttattaatttttctgggaatcaatcccaaggaaatgttactaaagtttttaagaactaattttatagtttcacgtataatagataaagatgcttaactaacatatgtattaattaatacagaaaagtttaatgaaagtactacattggaactttgtagaatattagtcattaagatgcctgtagaagatttcttcgatccttaaaaaaacaactgctttccaagctatccttccactgtacaaaactacaaaactggacaaaatatagtgactgcctacagttgttgggcaacagacattgcacgaatttatgctgttaaatggggaaaaaatgaggctcatctcacattgttttaagttctctgacttggagcaaaagaagagatattaagcagagagtggagatctaattgaggaggtagagcaaagactgaatttgggacggaggtgtcctatgcaaagatagaatgagatttwtgtgggactaacaataaaatttttaaaagatgaagaaaaaatattgagagcagctagggaaaaatgcatattacctagaggacaattattgtccaaagataataacagccaggaaacaatagaaccatatctttaaagttttggaaagaaaacaaaagctatcaatcagagttctatatttaatgaatgtatgcaagaaaactgagagtaaaatagaaacattttccaatttgagggaattctttgtctgcagaattgcacacaaggaaagctaaagtaggttctgctagctgaagagaataatagttgtattgatgggaaagaatgaagaacacaagaaatcataaatctctcttggtaaatttaaaagcctgtattttatggttttattatttttcaactgaaaactgtttagaataaaaataatattatctatagtgtttataacatatggcaagaacagcacattaataacaattagaagtagacaattctaaattaagggtgcaaattgcaatcttcagagtcatgtattagtctgttttcatgctgctaataaagatatgagagactgggcaatttataaatgaaagaagtttaattgactcacagttcagcatgactggggaggcctcaggaaacttacaatcatggtggaaggggaagcaaacatgttcttcttcaaatggcagcagtaagaagaagttctgagcaaaggcagaaaagctccatataaaaccatcagaccttgtgaaaactcactgtcccaagaasagcatggaagtaaccacccctatgattcgattatctctcaccagttccctcccatgacacatggggattgtgggaactataattcaggataagatttgtgtgggaacacagccaaaccatatcattccaaccccctggtccctcccagttctcatttccttacatttcaaaacacaatcatgacttaccaacagtcccccaaagtcttagctcattcaagcattaacccaaaggtacaagtccaaagtctcatctgagacaaagtaagtcccttccacctgagcctgtaaaatcaaagcaacttagttacttcctataaaatggagttacaagcattgagtaaatacagacctttcaaaggggagattggctaaatcaaaggggctacaggcttcatgcaagtctgaaatccaatagggtagtcattaaactttaaagttccaaaatgatctcctttgattctgtgtctcacatcaaggtcacactgatgcaagagatgggctcccacagccttgggcagctctgcccctgtaggtacagctcccctactggctgctttcacaggctagtattgagtgtctgtggcttttctaggtgcatagtgcaaggtggygatggatctaccattctggggtctggaggataatggcccatttctcacagctccaccaagcagtgctgcagtggggactgtatgtgtgggctccaaccccacatttcccttccacaggggttctccatgccctagcagaggttctccatgagggttccacccctgcagcagacttctrcctggacattcaggcatttccatacaccctctgaaatctaggtagaggttcccaaatctcaattcttgacttctgtgcacccacaggtccaacaccctatgtaagccaccaagtcttggggcttgcatcctctgaagcaatgccctgagctgtacattggcatcttttagccacagctgaagctgaagcagctgggatatagggcaccatgtgccaaggctgcatagagcaggggtgccctgggactagcccaagaaaccatttttccctcctaggtctccagggctgtgatgggacaggctgctgtgaaggtctctgacatgcccttgagacattttcctcattgtcttggtgattaacatttggcttctcattacttatgcaaatttctgcagcaagcttggatttctccccagaaaatgtggttttcttttctattgcatcctgaggctgcaaattttccaaacttttatgcccttcctccttttctatgctttgcctcttagaaatttcttccttagataccctaaattatctctctcaagttcaaagttccacagatctctagggcaggggcaaaatgccaccagtctctttgcatagcaagagtgacctttactccagttcttaacaagttccttctgtccatctgagaccacctcagcctgaacttctttgtccatatcactattcgcattttggtcaaagccattcaacaagtctctaggaagttccaaattttctcacatcttcctgtcttctgaaccctccaagtctctaggaagttccaaactttcccacatttttctatcttcttctgagccctgcaaaaggtttcaacctctgcctgttacccagttccaaagtcgcttccacatttttgggtgtctttagagcagtgcccctctctctgtggtaccaatctcacactgctcattaagacatacccaagaatgggtagtttataaaggaaagaggtttagttgactcacaattcaacatgtctggagaggcctcaggaaactgacaatcatggcagaagtggaagcaaacacatccttctactcatggtggcagcaaggagaagtgccaagcaaagggtgaaaagccctttataaaaccatcagatgtcatgagaactcacatgaacagcatgggattaactgctcccatgattcagttacctcccaccaggtccctcccaagacacatggggattatgggaactacaattcaagatgagatttgggtggggacacagccaaaccatgtcaagttactatttttaaaattgtataaaaaggtataaaaataatttaaaagcaacaaaagaaatagaatatatgctggtctgtcctccagtacttgttaccttttgcctttttggcaatagccatcctaatgtgaagtgatatcttactgtgttkttaacttgcattgccctagcaactagtgatggtgagcatttttttcatatasctgttgttcatttgtatgtcttcttttaaaaaatatatattcacactcttggcccattttgtttttctttgacatgaagtctcactctgttgcccaggctggagtgcaatggcacaatcttggctcactgcaacctccacctcccgggttcaagcaattctcctgtctcaggctcccaagtagctgggattgccactgtgtgccaccatgtctggctaattttttttgtctttttaatagagacgggatttcaccatgttggtcaggctggtcttgaactcctgacctcagatgatycacctgccttggcctcttaaagtgctgtggcccatttttcaatgaggctttagttgcctgtgttttgggctcacgtataaaaaatgtttgttcagattaatgtcaataagcattttccctatgttttcttctagtagttttatagtttcagatcttatgtttaagtttttaatccattttgagttgatttttatataaaaggtgagataaagatacaattttattcttttgccttgtacagtgttgatggcaatgtaaattattataacacagccattgtagagaacagtgtgggggcccccaaaaaattaaaaatagaactaccttatgatccagaaattcacttctgagtatatatctaaagtgtttgaaatgagtatgttgaagagatatttgcactgccatgttcattgcagtattattcacaatagtcaagatatgaaagcaacctaagtgatcatcaatgaatgaatggtaaagaaaatgtatatatacacaatgaartattatactattcagccttaaaaagtaggaaatcctgtcatttgcaatagcatggatgaacctggaggataatatgctaagtgaaataagtcagacacagaaagacaaatattgcatgcatgatctcttttatatgtgaaatctaaaaaagttataaagtcataaaagcagagagtagaatggtggttaccaggggtttgggtggtaggctggagtagaggcattgtggaaatgttggtccaaggatacaaaatttcatttagacagcaggaataaattcaagaggtgtattgtataatattgtgactatagttaataacaatatattatattcttgaaaattgctaaaattataaatgttttcaccacaaaaaatgataattatgaggtaatggataggttaattagcttgatttagctattgcacaatgtatacatatatcaaaacatsatattttacaccataaatgtatataatttttatgtgtcagttagaaagaataaagaaaataaatacaatagaccaggcatacaggtggttattacaggtggttcaggcctgtaatcccagcacattgggaggccaatgctggaggatcacttgagaccaggagtttgagaccagccccagcaacacatcaagaccctgtctctacaaaatatatatataaaaattagcttagggtagtggcacgcatttgtggtccaagctactcaggaggctgaggtgggagcatcaattgagcctgggaggttgagactgcagtgagccatgtttgctgtttgtgctcctgcatgccagcctgagtagcagagcaagaccctgtctgaacaaaaaaaaaggaaagaaaataattataataaaaccataaaaccaagaccctcctttcccccctccaaaaaaatgctgtctataatacaaagagatctatataccttgaagtaaaatgatgggaaaatacataacatgcaaacataatcattagaaagttgatttagctattttactatcagacaaagtgaactttgagataaggattattacctgagaaggaagataagaaggtcaatatatcagatgtcataactattctacatttgaatgtactctaataacaaagcttaaaaattggcacaaccaaagaaagaatacacaaatgcccatagtatttttaacattgactctcagaaattggtaggatcactagacaaaaaagcctaaacaccatctacgccaggtgtggtggctcacacctgtaatcccagccctttgggaggccgaggcaggcagatcacttgagatcaggagtttgagaccagcctggccaacagggtgaaacctcgtctctactaaaatacaaaaaattagcagagcgtagtggcacatacctgtaattccagctactcaggaggctgaggcatgagaattgcctgaacccaggaggcagagactgcagtgagccgagattgtgccactgcactccagcctgggtgacagagggagactccatctcaaaaaaacaaaaacaaacaaaaaacaccatctatcaaattgatctagtttatatatgtagaatactattcccaacatctccagaacacacatttttctcaggtacatatagagcactcaccaaaatagagcacatgctgggccataaaagaaggtttcagtaattttttaaaaatagacattttgcagagcagttttctgtagctactgtccagtagatttaaactaggaaaaattaaaagacatcttaaaaattatcaaatatttggaaattaagtagtacatgactaaataatttgtgggtcaaagaagaaatcccagagaaaattagaaaatgcttcaatctaaacaaaaattaacacatagatattaaaatttgtggggagaagctagaaaagtgtttgggaacaaatgaacatttttaaatgcttaaaatacaaaagatagcacacttcatattagttaactaagttttcacgttaaaaggcttgaaaagggagagtaaattaaaaccaaagtaagctgaagaaagaaataataaatactgtaatcaaatagaaaaagtgaaaaaaaataaaagactggaagttgtgtttttcaaaagatcaatcagaaggatgcacctcagcaaggcagattaagaaagaaaagtacacaataccaatactgggtttgacagagaagacaaatatgctaaagatattaagaggaatatagggagtattatgaacagtgaccaactttaggccaataarttctataattttagatgaaatgaagaattctcttaaaaaatcacaacttaacaaaattgacataagtaaaaaacaaaatatatgagcagtcctgtaactggtaaacaaattacatttggaattcaaaacattctcatagagaaaactccaggtcaacagggcttcactggtaaattataggaaacatttaaggaagaaaaaattacaatcttatataaactttaataaagtataagcggaatgagcactacacacctgattttacaaagacatcatgattctgtaatcaaagatattcaaagaaagtacattccattatccctcatcaaaagagataaaaagctcttaacaaaatattggaaatcaatttaattatatataaagaggatactatattatgagcatttggagtttttcccaggaattcaagattggttcaacatttaaaaattaatcatgtattgtataacattagcagaagaaaggaggaagttctatgatcacctcaatgaaggtagaaaaagcaactgaaaaattcaacattcattcataataaaagctctcagaagtctaggaatgaaaagaatttaatcttatgtgcacatctattatataaaaactctacagcaaacatttttaatggtgaaattttgaatattttccagctaagatcagaaacaggttgtgtctgctttctattcaacattgtactgaaatcctaatcaatgcaaaaagatgagaaaaagaagtaaaagccatcacaattccaaaggaataagtaaaactgtctttattcacagaatatatgtgtttgcagaaaatcttgacaaatcaaaaaggcaactaaaagtaatatgtgcgtatataaagaccataggatgcaaggccaattttatacaaatgtatttctgtattcatgcagaaacaatctgcaaataaattttagattaattgtttataataacatcccccaaacgtaaaatactctgggaaattaataaacatgtgcaagatttctacagtgaaaactataaaatgttgcttagagaatttaagatttttatttcatgtttaatccatggactaagaaactcaattttattagttctccaaaaattgatatataaatttaatgtaatttcaatcaaaatactgacagattttggggggctagggtagaaattgacaagctaatactaaatttatatagaaatccacaggatcaagaatagacaaacgttttgaagaagaacaaagttagggaatttgtattctctactttcaaattttactataatgcttctgtaatccagacattgtggtactagcataatgtattagtccatttttacactgctcataaacacatacctgagactgggcaatttacaaaagaaagaggtttattggacttacagttccatatggctggggaggcttcacaatcatgttagaaagcaaggaggagctagtcacatccttgctgcctggatggcagcaggcaaagagagagcttgtgcagagaaactcccgtttttaaaaccatcagatctcatgagacttattcactatcatgagaatatcacaggaaagacccacccccgtgattcaatcttctttcaccgggtccctcccaaaacacgtgggaattatgggagctacaagatgagatttgggaggggacacagagccaaaccataccacgtaagtatagacaaatcagtcagtagtccaaaatacaatgtccacaagagacctgtatatagtggtcagttgatttttgcataggcatcaaggcatttactgaggaaattcttagcaataaatatttttagaacaactggataaacctatgcaacaaaatgaacaccagcttttattctyactagataaattattttccaaattgcaagagctaaaatataaaactttaaaaaagaaaacaaaatagactatttttctaatgctgtacagcaaataatttctaacatatgacttaaaaagcacaaaccgtaagtggaaaactgataaattagagtttctatatataaaaaacttctgatttttgaaagaaaccattaagaaaattaaatggcaagccacagattaggagaaaatatttctgacaaaaatatatatttgacaaaagattgtatccagaatataatagtgactcctatcccacaataatagaaaataaacttcctagttaaaaaaagatttgaatagttctcaaataaagatgtaacaaatgggtgataagcatgatgaaaatgcttaaaactaaaagtcacaagaaaaagcaaattaaagccacagttacaactacatatggatggaatatctaagattaagaagtctaaatgttggtgagaatgtagaacaaatggaattcttatactttgctagtgggagtagaaaatggtacaccactttggaaattcctaaatcttggtagttagtttattggaatataagtttatttcttttcatataaattccaatctggctattgctggtagctagaaggctttctatatagtcacacagggatctaggatcctttcctcttgtgaatcggcacttcttgtcttcctcattcagctaatggagagggaaggagaacatggaggatagtatagaggggttttgtaggccagacccagaataaatgtatgtaacatctacctgcactctgtcagccagatctcagtcacctaattgcacagaaggctgggaagcattgtttacatgtgtgtaaaggagcaaaggggaaaggatttggtgactggccaatcgtagcnttattcgtagtgctatttaataatgggtgtatgtgggaggtaatttgtataatgagaacactagtttatgcgtgtaattaccagttctagtagtaaattcatgttaccttggacaagaaattttttaaatggtagattaagagcatagcttagagtcacatttgttcagttccntatttcttaacctgagcctttaattaaaccagtttgtgcaatggatcttacaaaacaggragctatttatgtattttctagttcttagagattaaacttttacttccgtaaagtagaagtcataatatttgcccatattcatactagttttgtcctgaagatcaaagtagatagagtctctgaactatcaaaactacattatgaaaaatgaattattttccttcttagctgacaaaggagtattgatctatgtaatgctgacataaattcagatcttggaaaacagagcccttgtagaatgaatatcattatttgttgctttttgtggctcagagatgaagactattagcctaaaagctaaatacttaaggttggttggttggtcttttttatgagaaaattttcactccaaagaagtgttcctaaaaaggtttaaatgaagattgagactatgctggattctgattgctttgttctcttctctcagctttctggcctaagatcaaagtctcttctttcaaagcaactttgtatctcccttaatgtcaggttaaaaaatttattggtgcatgctttctctggaggctacttctattccctagaaagaagcaaactaatctcctaaaatcccatgcagaacagggattctctgatgagtggtcagatatttctgcttttgtgcacccaaggacaaattaaaattctgaaaacttcagtttccttttgcttatacagatattttaaaaatatagagcattattagtcaaaaacgaaatacaggacccctatttgcaattgtttttataacatctaaacaaagtagacctttttctgaggatttccttaataaatgatgagaaaacrtggacacatagaggggaataacacacacagggacctgtcgaagggtggagagtaggaggagggagagattcaggaaaaataactaatggatactaggcttaatacctaggtgatgaaataatctgtacaacaaactcccatgacacacgtttacctatgtaacaaacatgcacatcctgtacatgtacctatgtacttaaaagtaaaaagaaaataataataagtaaaagtgttctgtttcagaaaattacatatcagctattgtttaaattgctttttaaaaatattttggaatattttgataaattgatgatgtatcaagacccttctaattctagtgtttcattgccaatggaagtcttacaggatggtttctggaggttgtggctttcaaccttaaagataagctatatacaagcttttctttaataactgtgtatgacttaatttttcataaatttcacacatttttatatgcatgtatatttccagaatattcttaattggtgttaaaaaatactaataattttattttttcaaagcatatttctttgccctgatactttgagatttgttgagcaaatctgtattaattggtaagttatcttaattttcaagttgctcatttttatattgttgttcttctacagctttcgtttccaagttagcaaagtcataccattttaacctggctgcagatgatagctctcacacttcatttgcctgttttaggtgttcctttctgcatcttctttaattgtaaatattcttcttaagttatagtgatatgaagtgtacatgatatcccaggacaggaaaagtttttttttatttttgcattaatcctctcatgatgcataacagtctctagctcttaccaacttctctctcaccaacatccaccaggacccatgcagccatctaaggatcccagattccatccacctctttctaattaattcagagccctggatcctgtggatatattttctttccattatcacattttcctttaatatccaagtaacaataactttcagtactcactcaacacgatagcaagaaattcaggtccctttgtaagaatttctgataatccccagtgagtatttttgaattcaataaatctattctggttgctgctcatcacttcagataaggcatcttcccagcttcctctaatcatatcatttctttcatcctgtcttagctctctgcctcccagtttgatctaaaatatgtacacaggctctacatgcatccataaagcacacaatttcaagtttacacaattgactaagacctagagaaactatgatgcaaaaatgaaaacctgaaactgaatmtcagatatcmctgcccctttcgtccattagtaatatccactcacagagagttcgggggagctatcatggcaaagtggtaaagatcttagctaaataaactggttgccactattacttttttgagaatgttcagcacaatgtytgaacagaattacactcaacaaatggaggttgctgctgtgatgttagcmccatgattgtgtgctttgaatatctaactaacgccattgtgagacccttggcattgacctattgaatgcaaaaaaaaaaaaaaaaaaaaaaaaaagcatagcctgactccagtcattattactcattcctattattatggacatttttatttttgtatcactggggacaattacatacctccaaataattyttttgcaractccttattttggggggactatgcataaaraaraagccaaaaactaacttcatattataatctttgtccatactaaaraaatttttatgtcattaaatgaaatattgcattatgtattcatagataatcttatatatgacagtcattatttcaaactctggaaataaaattattttaaaatgcacatgatctcttctccttatagaatttacaacccaatgggaattgtaaactcttcattaatgaatcacacaaataaatatatgctatgagacaaaggagaagtactagatgctgtggaagcaaataatggagaattagaccaagtcaaaaaggtcaggaaaggctttaatctcagtacaaagcattggcgtatgacttactcctctggtttatggctgccataatagaaactgatacatacagagcctgttttatgtgcttcaaagtactaatcagtgtctcttagagaaaagagagtccaccacaaatacaaattcttttactttggagttattaaataatcagaaatatttagcgttgaagttctaaggagggatggtgatcaatacattttgttttattttcccttcatgttttggaagcaactgattagtaggcatgggaatcaggcaaatgaagttctgcataacagctttattaaggttaaaagcttaattggataatatgatatacttgatgctttctaatatttcattctggaattaacttatctacccagacagataggcttcctgtgtggagcagagttcactgttatgggcttaccatacataggaagcaataaaggaaggtagtttcttgagagtaaaacagagaagcccaaatgagtaagaagggaagagaaggacaagagtgttctctagtggagttctattagcaatatatataaaattcctaaggaatggaagactcccacccccagccatgttctctttctttccttcatgcatttagacataacagtcaaaccctatggctcaccagtgttaaatgtggcccttatgggaaagagactgttggttcccaggaagtcctgctctctattcatgaaattgagaatagcacagctactttgtgtatctggcagggagtttggcttttaattctatagctgcattgtccaataaattagccaccagccacttatggctatgtaaactcaaattacatagaagtccagttccttattaacactaggtacatttcggtgggaaatagccagttctcaatagctagttaatactagaacggaacagattataacatatttgcactatcacagaaccatctattggctagcactactctagagggcactgaaaaagtgagctccaggaccttgctgtaccttatgccaaagcccatttactttattttttatcccaaattatacctagccacatgccaatatgtttcaagagagttaatacaactataacacataacaaatatgctttgataayacaaattcaataaataatttataaaaatattataaaatctctaacaaaggagaaattatatccaaagataaagctaaaataaataattaaataaataaacttctaaatgttccttccctcaatttctcactctgtgcagtctcrttagagggattcctytcagaagcatggatagagttaggtgcttttagtggttgtaggggtttgtaatagtgtagttaggaccctatgttctacctggtgattttttctgttttcctttttcacccttttcaggccttaaataaatgttgtgtctttaggggtaccggaaatattttyttctacctctccctttttytaaaggagaaagatcagcttytagtgttcattcccctactgttctctcactcatttgtagtaggttcagaagaggattaaacagtttaatctactttttttttttttttttttttttgagacagagtctcgctctgttgccaggctggagtgcagtggtgcgatcttggttcactgaaacctctgcctccagagttcaagtgattctcctgcctcagcctcccgagtagctgggactataggttcgtgccaccatgcccagctaatttttatatttttagtagagacggggtttcaccatcatttctgatgaggattttcaccttttattatgtgactataaaaataacacccttagacattcccttttctatatgacttttgtgccaaagatatttctgctacttttcatccaaaactactttcgtcttggatccctattgtctagcttccctgaagtgcctgctgcttataatcaccacactcttctgattatcctcttgtcttcagctattttagatgccaattttactaaagaccttatttatcatcaactcattcgctttacccacttcattatttagatactagaatttgtatggagaaatgcatgctacctgccttggacccattgagcctcataaaaatttaactatagtggactacggtggagatggccagatggccagcagagatccttgtttttttccaagttgtataattgacttctcagactaccttgcacccagttgagtaatgagacacttacagacatggcctgtaaagtactcattttccctcattcctagtctcctggctggatgcccatattgagtgtgactaagtgacctgtctgcagtgtggtggggtctctctcaggctgagtttctgaaaaacttcataaagctgaaaggatcctccccaccctcctgcctctgtcaggcaaaaattggatctatgaattgataacataaacctaagtgactgagattttgtggttagctattactaaaactagaatttaccataacatatacaaactaaaaacaatttgaacaactcaattaggagaaaggatttccaattagtataagtataggttttgcagtcatttatgtctttgcaatctttctatatttggcacatgtagatctgttgctttccaaaagcagaaaaaaatgactatctggagtgacaatcagaaggataactagtgatagtctattttgatttcaactgcaattaatactttccctgtacattagttaagaaggaaatattctttcttaacttttattttaggttcaggggtacatgcgcagtgttatatagataaagtacattccaaggggttttggtgtacagattatatcatcaaccaggtaataagcatagtacctgataggtggtttatcaatcctctccctcctcccaccctccattctcaaataggccccagtatctattcccttctttgtgtccacgtgtactcaatatttagcttccacttaaaagtgagaatatgtggtatttggttttctgttcctgcattagttcgcttaggattatgactttcagctccgttcatttgctgcttaggacatgatctcattcttttttatagctgtatagtatcctatggtatatatgtaccatattttctttatctagtctactgttgatggggatttaggttgattccttgactttgctattgtgaatagtgctccaatgaacattcatgtgcatgtgtgtttatcgtagaataatttatatttatttgggtatataccaaataatgagcctgctgggtcaattgttacttctgtttcaggttctttgagaatcaccacactactttccacaatggttgaattaatttacattcccaccagcagtgtctaagtgttgtcttttctctgctaattcaccagcatgttatttttttgacattttaatagcaattctgtctcatgtgagatggtgtctctttgtggttttgatttgcatttttctaacaattaatgatgtggagcatttttttcatatgtttgttggccacaggtatgacttcttttgaaaagtgtctgtttgtatcctttgcccactttttaatgagtttgtttctagcttgtaaatttgtttaagttccttatagatgctggatattagacctttgtcagatatatagtttccaaatattttttccccttctttaggttgtctgtttactctgttgatagtttcttttctgtgcagaagctctttggtttgattaggtctcatttgtcaatttttgtttttgttgcaattgcttttgttgtcttcatcatgaaaaccttgctggttatcctccagggtttttatagttttaggttttacatttaagtctttaatacatcttgaattgattgttgcatatggtgtaaggaagagatccagctcattctatgaggccagtattattctgatatcaagacctggcagaatcacagcagaaaaaagaaaactttaggccaatatccttgatgaacatagatgcaaaaatctttaacaaaatactagaaattgaatccagcagcacatcaaaaagctaatctaccatgatcaagtaggctttatctctgggatgcaagtttgatttaacatatagaaatcattaaatttgattcatcacataaaccgaactaaaaacaaaaaccacatgattatctcaatagatgcagaaaatgctttcaataaaattcagcatccatttacattaataactctcaaccaactaggcattgaaggaatatacctaaaaataataaaataatacctaaaaataataaaagccatttatgacaaactcacagccaacatcatattgaatgggcaaaaggagaattccccctgagaacaggaacaagaaagattcccgctctcatcactcattcaatataatatgggaagttctagtcagagcaanaagtaagagaaagaaataaaagtcatccaaataggaagagaggaagtcaaactagctgtttgcaggctttatacatctataccgaaaaaacttcagtctctgcccaaaagctccgagatctgatagataaacttagctacattttagaatacaaaatcagtgcacacaaatcagtagaattggccaggtgcagtgggtgcctataaccccagcatactgggaggcctaggtgagcggattgcttgagctcacgagttcaagaccagccggggcgacatggcaaaaccccatctctactgaaaatacaaatattagctaggtgtggkggkgcatacttgtagttccagctactcaggaggctgaggtgggaggagtcccttctctttaattttttggaatagtttcactacaaatggtatcagctcttctttatatatctgatagaatttgtctgtgaatccatctggtcctgggctttttatgtttggtaggatttgtattactgatgcaatttcagaactcattattggtctattaagagattaaatttcttcctggttcaatcttggaagctgtatgtttccaggaatttarcaatttcttccagggttttaagtttgggtgtatagagtttttcatagtattctctgagagttttttgtatttctgtgaggtcaagtggtaatgtctcctttgttgtttcttattgtctttatttggatcttctctcttttttctttattagtgtagtaagtggtcctttattcttatttatttttcaaaaagcaacttctggatttatttttttttcatcccagtttccttcagatcagccctaattttgcttatttcttctcttttgctagtgttggggttggtttgctcttatttctctagttcctctaggtttgatgttagatttttaatttgaaatctaactttttgatgtgggcatttagcactatcaaattccctcttaacactgctttagctgtgtcccagagattctgataggttgcacttttattcttattagtttcaaagaatttcttgatttctgtgctcatttcattggttaccaaaaggtcatttaggagcatgttgtttaatttccatgtaactgtatggttttgagcaattctcttaatattgttttctatttttattgtgcagtggtacaagagtgtgtttggtatgatttcactgtctttgaatttgctgagtattggtttatcaccaattgtgtggttgattttagagtatgtgccatgttccgatgagaagaatgttttgggatggagagtattctagatggtattagccccatttggtcaaatgtcaagttcaggtcttgaatatctttgttactttcctgccttgataatcactctcatactatctgtcagtggggttttggagtctttcactattattgtgtggttgtctaagactcttcttaggtatctaagaacttgcttcatgaatctgggtgctcctgcattgggtgtgtatacattggatagttaggtctttttgttgaatttgaccctttaccattttgtaatgcccttatttgtcatttttgatcactgtttgttaatgtctggtttatctgaaattagaatagcgacccctgcttttttctgtttgcttggtagatatttctccatcccttttctttgagcttatgggtgtcactgcatgtgagatgggtctcttgtagacagcacagttgggtcttgtttctgtatccaacttgccactctgtgctttttaattggaacattcagyccatttacatttaaggtttgagcctgtccttgtgttgttagctggttatcatgcagacttgattgtgtggttcctttacagtgtcaatggtttatgtacttaagtgtgtttttgtggtggctggtaacaatctttcctgtcaagatttagcactctcttaagaacctcttataaggcaggtccggtggtaataaattctcttagcatatacttttctgaaaagtatcttatttcttctttgcttatgaagcttagtttggctaaatatgaaattattggttggaatttctttattaatgctgactattgtcctccagtctgttctggcttgtaggtttcagctgaaaggtctgctgttatcctaatggagttctctttgtaggtgacctgtcccttctctctaactgccttcaatatttttcctttcatttcaacattgaaraatctgataattatgtcttggggatggtcttctggtgtagtttttcacarggattctctacatttcctggatttamatgtttgcctctctaataaggttgaggaaattttgtgaatgatatcctcaaatgttttgcaagttgcttactttgtgcttctctctttcagtgatgccaatgagtcatagatatgatctctttacataatctcatatttctcarargtttcattctttcttctctgttggttttgtttgtttgttttttgtctgagttaatttagagaaaccgtctttgaactctgagattctttcctcctcttggttgattttgctgttaatacttgcaattgtactataaaatcgttgaagtggatttttgacttctatcagctcagtttggttctttcttaaaatggccattttaccttctagtttctgtaccattttattatatttcttagattcattgaattgggtttcttctttcttttgaatgtcgataatcttcattccaatccatattctgaactctatttctgacatttcagccatttcagcccaggtaagaaccatttytgggtaagtagtatggttgtttagaggtaagaaggacactctgcctttttgagttgccagaattttgcactgttttttttttctcatctgtgtgagctgatattccttcagtccttgaagttgctgtcctttagatgtttttttgtttgttttgttttgtttttgttttgwtttttgggggttttttgtttgtttatttgcttttatattctgtgatgcccttgcaaatttgcttgtggtatgagttcagtcgactagttttgattctattctactcctgggtcttggaggtgtcccctccagttattgtctctatgcccaaatttcttttattaagtgttctgatcaatggggctctctcaggcaagggccacagttggcagacaggccatatcttttctgggtcagttctaatctgctgtagttgtgcttcctgggagatcacaaggttgcacctgcccacagagtgcagacggaagcaaaactgctggtctagaaactctagcaggtgtggcctatctggctatgacaggtgggtgtgagtggagtttcttaccttaccatccaggtggtttctggggcaataggaggctgtggtctttggcaaatttaagtaaaagtaaaaccactgggctggaagctctagcaggtgtggcttgcctagctaagagaggtaggggcaggtggagtcacttatccagccatctggatgtttctccagacaacaggtggctgtgctctccrgctgagttcacatagaagtgggactgccgggctggaagctctagtaggcgttgactgcctggctaccagcagcaggagtcagtggggtagtctgccctactgtctgggtgttttcctgggcaacaagaggttgtgccctccagctaggttcacacagaagtaggactgatgggctaaaagctctagttggtgttgcctgcctggataccagcagtgggagtgggtggggtcactcaccctgtggtyactcaccctgtggtcacctaccctgctctacaggattttctcaggacaacaggaggctgtgcctgccttctgagctcagacagcagaaggatcactgggctggaagctctaacaggcattgccagcctagctacctgcagtttgaggcaagggcagggtcacttaccctgctgtctgaatgtctcctgggacaacaggaggctgcactcactggctgagttcagacagaagagggatcatcggactggaagctctggcaggtatggctagcctggttacccgtagtgagaatggagagggccacctgcccagctacacagatgtttcccaggacaacaggaggctgtgtccactgacagttcagacagaagtggaaccactggaccggaagctctagcaagtgttgcccacctggctactagtggtaagggtgggtggggtctcctgccctgcagcccggatgtttcctgggacaacaggaagctatgccttaaggctgagtacacacagaagcaggagcactagaccagaaactagcaagcattgtccacctggctatccaaggcaagggtgggtggggtcacctgccttgtcatctgggtgcttcccgggataacaggaagctgcactttccagctgagttcacagggaagtgagtctgctgggctggaagttctagcaggtgtttcccatctggctatctgtgggggtcatggagtcaccagccctgctgtctgggtacttccaaggacaacaggaggtggtggctgccagccaagttrtggcagaagtgggaccgctggactagaacctaacatgggaccttgtccagtgagctgggtggagcaatcttactgctctcaggcaccaaactgcgacctctgttggggctattgtgctggtgatggtctgctctggggccaaagtcttttagagttccccttgcactttgagagttgcctccagaaaacatctgcctcagtctagaagcatggtggggggccgtggagtgggccaaagggatgmtctcattcccagtcttgcatttgtccctgtaggcagtgtgtatccccaagaggggtcttactcatccttttccattttggagaggttctgctgactctacattaagcccagacagggtggtgtcctgctttgctcctttctgctctctgcgttcctctgctgccttgatggattctgatgtggttgctcaratgatcagcctgcagggtcagtgttcactagcccttttgtttcctctagaagtagcacttgttagcggcttctagtctgccattttggcctttcccccaaaaaggaaatatcaactacaaatcagatgacactgatcagttttattaattttacttagtcatgtagctaatgtcctaagggatctaatctttattagaaatcaagtcatcaaatgttgagagtctaaattgtctttattatttaatttatctgagagaccttgattttgttggtaacaggatttaggagcagtaccaagactgataattggtattcccagagttctagttttgtgtagtttttactattttgttttgggtagctacttcaagaaaaattcataaagtagaaaagtttttcttttcaaaatacaaatgtctgcattttgtattggattccaaatttccttttaaactatgacctcatgcaagtttgtattcttctgatggggggtcaaagaaataatgatctgaagagatacagtgcctctgatttagtaattcacatctttgctttggagaaacaggtggcctacggaaatcatagattgatacagactcaaaggaaaaaatttgtgcaagtaggtataagaatcttttgagatggggagctatgtaataattctgaggcactggtattggggatctaaaatgggaacataaagaatattcatatattggagatacatttggggaaaaatatttcagaaatatattttctttttcagtattaaagaggaacttttaacagtcatataatcaagagacagaatgtctgcttttcttccagagatagtacttactgggttcrgtatcactgacaatgacaacttggtcagggtatggggtaaaggtaattgaaatagcagatgggtaattggacacaatgacttttttttttttttcctacaatgatctttacagtacttttgtagcttaagattctgagatatgcatttttttcatttgatgctataagctactgaagataaattaattgttcagattttctttttttcttcataaatgtattattttctctttactaagtaagacatacttttccaaagaatttaagaattcctagaaatgttcaacaaagtgaaaatttcactgtagttttgccacctgtacagtcaggtatactccagctagtttaaaggaaaaaggaattcctttgaaaacattaagcagggtgaacttactcaataagcgtactgctaaggcccacagtgctttcaaaatctgaaaaaaaataatttgtaggttgaaagatttttattccatattaatatatctttataccaatgcagtcataaaatattattatataacatatacgtgtgtgtgtgtgtgtgtatactatggaggaaggggctggtgaaggcaaaagtgcctaggatccactaaaatcctaaagaacagaggctcaggcttggattgcgggtgctcaggcttggattgcgggtgctcaggagctccaaccccagctaaatacacacgagcactgctccaaagaaatctcactgtgactgctgctagcacaggtatctctgcctacactgctgatgctgggcctcagggcagaacctctgcccccactgtcttgacagctggcaaaggcgtcatttctcagaatgggttgccagatggattctttttctgagctgaagtcttgaacaatggtatcagaaaagcctaggccatatatttgttctgtatgtataaggaagactaagaagtggatttctagcatccgtcttggtgatgtgtgaacttgtaaggtgggatgtttccttgacgtaggagagatgttccaaatgttttggacagccaaatccaccaaacaaaaataactactgccaacacattgacgtatttgcatttagactttctggtatgctaggttttgttttcatttaatgctttaaaaaaaaagctatagctgtagaaacatgaacacttactgtgagataggtatagctaacattgtttgaattatctattttgatcgttaattaaaaataacagcatttggtgatagccagtattgtcattttcccattttatagatgaaaaaagcagacttaaaaaaggtaacttcttcacggagataaagttaaagaatagtaagatggaattttacayggagttttacctgctacacaaaccatagtcataaatgagatatacaacttttaaatacagcyttttacatttaacattttggtataagccattttaaactcttcattaacgtctttttaatagtgacctaacattccatcaaattagttaatgcaatttattcaaagattcctctattgttgaatatttaggatgtttctatttctttcctactttggtcatattgtggtaacttgtgtatataacttttttatacatttaggattatttctctagaatggaaacccaaaattagaattactagatcaaagaatatgaaaacatattttgagaagccaatgtcacacttatttaatgatgaagaaacaagctcattaatttattcaacattcgacatatttattgcatgcctcccacatgctggctgtggtacttgtaatatcatgataaatatttgacagtcgtttgtctaaacagcattattgtatagtgggtattaaaataggatgtgcctgaaatgagcatcttgtgctaaccacatatggtgagaatgcctcctagattttctgggacagggtaggaacacttttagagttcttagaaaatactcttgggaatgtaggaaagtagcattcaaagcaatctcaaaatagcatcaagtatgaactttttcttctttgccaatttgttagatgaaatactgttgatcattgtttataatggttatttccttgagtattaatgaagttgaacatttttcatatgtttattcatgaattgtttcttcattgtgaagcatcttttaaatatttctcatttgatatttagtatttgtacaaaatagattttggtatattgcctttgttgcaaataattttatatctgctcctatttttttttaaactagggaagtttttatgtagcccaatctgctatgcgttttctttataatttcttctagcacttataagcttcaaaagtagaattgacccctccaaaaaagtgtgaaaattatcaattccatttttctttactttttattttgtattttatttgtatttacttccataatacatctggaatttatatccctgtctaatggaacataatttattttattctaaaaggataggcaactgtctcaacaatcattaaatacttcatttcttttttataaatttgtggtgctcactttattatacattgggtttaggttcgctatctatatgcaaccttggagtcctatgcccatttatatcaatttcaattgtaataaaaataattgttaatttttccccaccagacatctgaaggaattatattgtccctttaataattagtgcagtgcttggcatatgacaggcattatatatttgttgaatgagcaaatgcataaaattgaatgtttctgggatacccatgttttcccactaatctgtaaatcactttctcagccatttcttcactgtgttacatgttatgtcacaaaatatattttatcattagagcaaaacattttattaatattcagaatattctttatgatctagaatactttcttcaaatgaactttggaaaattttaagagcttctaaaattactttcattagaattttcattggaattatactaaaaatataaattaatttggaaggaattgatatttatgctgtaaatatttccccacttacacgtgttacagttctttacttctctttatagcttcttataattttccttacagagttattcataatttctttattgattttgttgttactgctgtagtaatttggattattatagctgctattgggagctgcattcttttggaaattttgttttctattttttgctattatatagaaaagctattgctgcaaatttaccttgcatccttgaactttgagttattttattaattctaatagaatttttttttttttacagtttttctgttgacctgaaggctatgttgagaatgccattgtcagcttaattctactttgcctttacaattagggatggaaactgagcaacaactataagatttttaaaacctttgggaaattagatttaattttaacatttatcttaaaaatagtttaatctagattctagtagctatatgtgaataatttccaagacacatattttaatgctggacctattagggaacaaatgtatgggttctcagaacccatgaaaacctgttgtcttagttcatttatattgctataaaagaacacctgaggctggattatttataaagaaaagaggtttatttggcttatggttctgtaggctttgcaaaaagcatggaatgaacacctgcatctgatgagggcttcaggctacttctattcatggtggaaggggaaggggagccagtgtgtgcagaaattacagggcaagagaggaagcaagagagagcaagaggggaggttccaggttctttttaagaatcagctcttgtggaaactaacaaagtgaggactcacttactctccccggagaggggcattaatcttttcatgaggaatccacccccatgactaaggcacctcccattaggcttcatctccatcatttgggatcaaatttcaacatgaggtttggaggagctaacgtccgaatcatagcagccatattgcagaatttgctgacttacatggcatgatctctccttgatctcttctaaattgtatctcactcagcttctgcctttgctataatatcccaaaacctctcactgatgtgggcccttaacctggagttattcaggctatttggggtcagcacaaggcccaggtttcttccatggggtaagatggaaaagacaaatagtcagctctgactttagctatatccccatcacaccaggatcctggggtagaaaaataaaaaggatgttatgaaaacctcattcagggctgtgttaatttgcttttgtatcatggtaaagaaatactcggagctgggtaatttataagcaaaagaggtttaattggtccatggtttttcaggctttacaggaggcatagtactggaaatctgctcctgatgaggtctcagaaagcttccactcgtggtggaaggcaaaggaggagcaggcacatcacatggtgagagggggagcaagagagggaggggaggtgccactttcttttaaataaccagatattgcatgaactcagagcaagagctcacttatcaccaagagagtggtgctaagccattcatgacggatcctcttccatgatccagtcacctctgatcaggcccaccttcaacatggagaatcacatttcaaaatgagatttgaaggggacaaacatccaaaccatatcattttgcccctggaccccgaaatctcatgtctttctcacatttcaaaatacaaatcatgcctttccaatagtcctccaaagtcttaactcatgcaagcattaattcagaagtcccaagtctaaagtctcatctagaaattagttccttccatctatgaacctgtgagatttgaaaaaacaaaaaacaaaaaacaaaaaaaaaactagttatttactctcaagatacaatggtggtataagcattgggtaaacattctcattccaaaaggggaaaaattggccaaaaaggggggcaataggccccacacaagtcagaaacccagcaaggctatcattaaatcttaaagcttcaaaacaatctcctttgacctcatgtcccacatcctggtgtgagggctggactctcatggcctgaggaagccctgcccctgtggcttctgtgggcgcagtccacacggctgctctcctaggctagaattgagtgcttgcagctttttcacgcttaagctgcaatctactggtggctctgccattctcaggtctggaggtcagtgaccccctttccacagctctactaggcagtgccctggtggggactctttgtgggtctccaatcccacatttcccctccgcattgccctagtaaagtttctctgttagggttctgcactggtgataggcttctacttgggcaaccaatctttcctatacatcctctaaaatctaggtgggagtggccaagcctccttcactcttgcattctgtgcacctgcaggcttaacaccatgtagaagcaaccaaggcttatggcagcttgtgctcttcaaagtggcagcctgagctgtacctgtacctgaaccccattgagccatggttagagatggagtggccaggatgtggaaagcaatatcccaaggcggatcagggcaatggggccctgaacctggcccctgaaactattctttcctcctaggcctctgggcctatgatggcagggtcttccttgaagacttctaaaatgcctttgagacctttttcccattgtattagatatttgcacttggctcccttttagtcatgccaatctctctagcaagtagttgctctgcagcctgcttcaatacattttctcaaaaatgctttttcttcccctctgccacatggtcaggctgcaaatttttcaaacttttacactctgcttcccttttaattgtaagttctaactttaagtcatttatttgccttgtatctgatttaagttgttagaaacaaccagatcacatattgaatgctttgctgcttagaaatttcttctgccagataccctaagtcatcagtcttaaagttcaaatttccacagattcctaggacatggacagaatgcagctaagttctttgctagggattgagaagggtgacttttattctgattcccaataagtttcccattttcatgtgagatctcttcagcctggacatcactgtctgtatctgtgtcagcattttcgtcacaaccatttaaccagtctctaagaagttccaaacatttcctcatcttcctgcttcttctgagccctccaaactcttccaacttctgcccattatccacttccaaagctgcttccatattttctggaatctctatagtaacaccccattccttggtaccaattttctgtcttagtttgctcttgtgttgctataaaggaatacctgaggctaggtaatttataaataaaagagatttatttggttcacagttctgtaggttccataggaagtatggtgacaggatttgcttctggtgaggcctcagaaagcttccaattatggtggaaggcaaaggagaagcaggcacatagatggtgagagagggagcaagmtggggaggagctgtcacactcttttaaacaaccaaatatcatgtgaacttggagcaagaactcacttatcaccaaggggatgttgctaagccattcatgaaggatcctcccccaggatccggtcaccttccactaggcctcatctccaatgctgggaatcacatttcaacctgagatttggagttgacaaacatccaaaccccatatcaaaggccacaaaaggaatggatacagggaccaaagaaggcactgacctatatagaataaagtggaagcacaataggaggccacctcaatttttttggaatattctgcattttaattctaaacaataatgttcaattcagtttaacacccagaagttagcatagaaattcaaattttctactaaaagaaaacttctgtgtcctaattaaagaaaatatcctatttggtcatttatcatgaagataatgataaatgttaaataacgtcttgtttgcattaagtctgtgggatgtatatttaaggtgactatacacttcattgggttttagtaaatactggttcttgctacatgatgggagctgacaagtaatgaatgaccccataatgggaacaaaaaaaaagtctgaaagactcaggctcacataggacagttgatctttctgcatcataaacttttgtcctttagacttgcacagttatccagtttatatttgatgtatctattcattgctatataaagtgttacccatcttgtgtatgcattacgggtatttaaaaaaattattcaagggcttgtttggacactatggactatatgagactatgttggcctttgtatgatcatattttatttgcaaggtaaactcatcacctttgcagaagtaatgtcaactaaaacatccagaagagatgtgcagtctgttctgttaataaggacaggatactgccatctactctgtacaacagagcacaatgcttagatttgggtggatttgaataagatgaaagataaattatgattttgttcaagtgttaaaataaaactaagacacttaaggaccacaaaaatttagaccaaagtatcttgtaaattctacctggtgaaagtttgatatagcacacatatgacttttctatattattttctgttttgagtttagtagtaagcagatggtttgtattttctttagttgcaactaagtgatcagtttcatgatttctcttactatgaaacattttttttttttcttaacagttatcttaaaagcaactctgggtctactgggctcaaaaaatgagaaatctaaagaaaaactggaattttttttccccaaattaaatgagtcctggtayaatttaaagcctattctttgtagtttcacctgcttatattgtaaacaatacagaatgatgagagacatatgataatatgaatgagaaaattttatatctcatctgcattattgacattactaggggaatgtttctttcaaatgaggtacaatggttaaagaacaactttaatccaatgagttactacatcttttgaccaaataatatgaaatcattttataaaagatagtaactgatagtaaatttacaatttgaaaactattcctgataataaaatagagaaaagaaccaggtaacatttttatacacatattgaattatatataatagtaaattgttttataaatagcatgatatatagtagtaaaatgcccaaactctggaaccagatcagtggttttaaattcaaatactactctttacctgtgggactctgcctgaattacttcacctgtctttgccaaattctctctatataataataatggtacctcccttatagggtggttgtattgggggtccccaagacttcctttaggctgatygttttactaatatatcagtctgttatcatactgctaataaagacatacctgagactgggtaatttataaaggaaagaggtttaattgactcagttctgcagggctggggaggcctcaggaaacttacaaatatgatggaaggggaagcaaacatgtccttcttcacatggtggcagcaaggagaagcacagagcaaaagggggaagatcttataaaaccataagatcttgtgagaactcactcactatcaccagaacagcagcactgggtaaccacccccatgattcaattacctcccaccaggtccctctcacaacatgtggggattaagggaaccataattcaagatgagacttggatgggaatacagccagaccatatcatctaagatacagaaaagctgtataatcatagtcatgctttattatagtgaaagyatacaaattaagaacagcaaagagaaaggttcatggtgcaaagtytaggaacaaactcccagctatcctctcccagtggagtcacatggaggtgtgattaaagctgccagcaaaatgatgtataacccatgaagtgtggtaaaccagggaaactcggccaagctttggtttctagagttctattagatgtcactcacataagcatgcggcactgggtgattcagacaccagaaccccttcccacaagcaaaaataaatgttcatcataaatcacattttagaataaatatatctgatccaactgaaacagcatagcctaaggcctcatgcatacaaaacactcttatcaggtagactcttccaggagttcagaggttttctcccagaagctagctgaaggctagacttgaagagtcacctttctttgtgatgggcagagtttgaggaactcaggcctgctgagttaaccctttcttgctgagtagttatgaggaataaatgagttaatccatgtaacttaatatagtgcctggcataggatagtacttggcacacttaagcagcaaacaaggatcagctataatttattctagaggggctctatgggctgaatgaagctgactaatttgggatagaaataagaaatagctatgctccatgaatcttgtgatgatgataaatccctaagtttgaatgatgggcattataagcatattaaacactttacctatgggtgctttagtaagaaaatttccagtaaacactaaatcctgacttctttccattttgttttttgcagagccttgaaaccagcgaaacaataatcaaagagcagttctgtcaaagaaaacaacataaatcaggtacaagagttattctcaacacgtaacatcaacacattgtattcatttaaactgatgattaattcgagcttattaacaaaatattttacaataatgccagttaggtgttttagcatatgtgtgactgcatgttatagatgactggccaaattttatagataaattaatttctataactacattaaaccaattttgagggttttagttaggccaggcctagcctaggcagaaatgttaagaaattaagaaattaatattattacttattattaaattaatgcataygctttatttgggaaacactcatctgtaaggcgattttatagaattggacaaatcaggcagtacttacagtgcagtagaggagattcagtagatatcaatatataagtaaaagctgtgataaatgctatgatgtaaaataacagaattctatgggataaaatattgggagacaaagaatctactgtggattgggtagacagaggctatttctctggaagatgacatttaacctaagacctaaagtttgagaatagagtcccaggcagatggaaaagcatggaacaaagaaaataaatgaagaaaaaaaagaaagaaaataattgaaagaagaatagtgtggctacagcaaagtcacagaagggaagacagatataaatgaagccgggttgaaaataagatgaaaagcccagccccataggtccttaatatccattgtaagaagcctctgaacttgctctgcttgcatttctgtgtgatgtcatttggtcttctctcctggtcccctgaatatagatgctttcgaatctgtcacctgacctcaccttaccccaacgtgtgtgtgtgtgtgtgtttgtacttttatttaacttaatatttcctgaagtcattttcaggattataaggattatattgggaaatctttcaaaagtttacctcttcggaatatgcattttaagaagtttcttttgtacctgagactggcctgcttttagggagcttgacctattttatggctatgagcattaaactacgttagataattttctagaatctagataatgcaagccagaaaaaatctgattgcttcattggtttatttttttccagctgaagatttttcttgaccttaattatatggttaattgcctcaaatcctgattatacttcacatgtggaaatatagcctcaggtatcaagaacaactggagcaaaagcttcctaaataattttcaacattagcattagtaatactggttttcttaaacggagaaaaactacacaaattgctgtttgcatctcagttaatctgaatcatatttctttcctttgaaaatgcttattctctttgatttataaagttttataatggaggcttctgaaaaagtcttaaagtaaggcaaatgacttggggtaatgcctactttagtactttaaagaatgatttgatctctaagaaatagctatgttccatgaatctcactctgtcactyagggtctcactgtgtcactcaggctggattgcagtggcgcagtcatgggtcactgcagcttcgacctcccaggatcaggtgatcttcccacctcaacctctctcagtagcagggactacaggcatgcaccaccatgcctgtctaattttttgtagagatggagtttcagcatgtttcctaggmtcgtcttgaacccctgagctcaaatgatccacccatcttggcctgccaaagtgctggaattataggtgtgagctaccatgttgggccaatgatttgatttgatataaaatgtggagattttgtctttgcagcactaaaagtctgaaaaacccagagttgacttatgcttattttggaagagaagttttcagcatatgtgttgcaaagggcatcgacttttttagaccaattcagcatcttccaattaagttgactgttattaaaaactgagacaaacatcacagaatttcctaggatttcataacttacagacaaaacggcttgtttcataccagaaagacaagagacagctgctttttaattactactcttgccatttgctttctactagagatgtgtctcaaacgtggaatctaattagaaatcttaattgaaaatggattcttaaaaaaagaaaaganagaaaatagaccaacattgaaacttaaatgtaggaagaaaaacatcatattccagccggattgaataatcacccatctgaaaattagttggcatctggggagcatgttatctgacaccaaattgaactttactgtttcctctttcaggaggaattttccaaaccaaatcatcaggagtcttgtaatctgtaaattattgttttcagcgattatatttttctcagaataaaagcaatggtgaattttgaagcctgggttaaatcccagctgctttacttgtttctagtgtgactctgggcaaattttgtaactattcttaatctcagttaactcttctctaaaatgggatttgcaaatcctgttttttcaacattgtcactgtcttgttgctctcttgactgacacattgactggtatgtagtagcatatctggatatagcaagttctagaaaggaagggaaggaagttagaaaaagcaaggaggctaactttgagaacatatatctaagacaatattgcaaatacaaaacactgagaaagtgcttattctgtacactgcaggcaaagacttaaaggcacattcatttatccttttattaaaagtatttttttcttgtagatgttctagattctgctatccagatttaaactccaattagaggcatagtaacatataatttctgaattacagaactttgcatgctgctaagcttgatagatgctcaattaatatttgattgattgagtgaagctatgaactaacagtgctaggacgcagatagcccaaattgtcctattctctggtttccaaacattgtatctaacatctagagtaagagaaattacgcttctctgtgatttttttcattcattgatagtagagattctagccagactgaataatcacccatctgaaaatgtgctgcttctgcatgcactgctaccatcagattgccagtttgctattatttgtgtatattccacattactaccttttagtctttattcacatttttaaatcctccattgtcaatattctcttccctattttctttcccattcttcttcctttcttcttcgtttcactcttactcctcttccttccttttatctaccctcatgtttttgatgcaaaaatttattaaattcttataaaaataattgcctccatgaaactgtcctagatatttcctgagataatgatcttatcacctttgttttttttttttttttcattkgttkgttttcaggcactgtcctttgatccgtatctgtgaaaactgagcctgaaacacagccagtgaaagtcaagccacataatatgtgaatgcctctttccttctatcctctactctaccctgttaacctttcctaacaaacacaaacaccaagggaatgtcccactggcaaagcttgcagcttccttccacactgctttctaggttactggkggaatgaatttaggctgtgatcaccaggctgcagccatatgagttgtctgagtcaggctggctttttgaatgagtccttaatttttgttcctgctttcctgaaagtcgggagccaggctctgcagcacagtgagctaggtgtcttaattcccaggacacctgtctgcatcactttccttgtggccttaacttactttgagtatttctccctgatttatgacttggatatacacagaatgctgagaactgctcttccacagaagcctgttctactgtttctctatcagccacatcaaacccaagggagcctcatttttattgatgtgtattcagatcaaattgaagtgtatcaattaagtcgtggcgactgggactcttggctcctttatagatgagtgaatatttctgtgccagttttatccttcttactgccttgtcaaattggtttgctcctttttttattcctgcaattcttttcattgatttcacatttgttattatcaaagctttcaaattgttcctctcttaggctgtttcccactctcctggccatattaataataaatataattaaaataaataataccataatatttaatgaccacttctaaaatattttttgtttttattcactgtttaaaatttgcatacagtaaatttttcaccttttggcatatagttctttgagttttgacaaatgcacacatttgcgcagccaccactacaatcaaggcacagaacacttaacattatcccacaaaacttccctcttcctgtccatttatggtcaaactcttctgcttacttactggactttttctatacctataattctgcctattttatttatgccattaaaatagaattatacagtacacagccttttgagctggccaccttttacttacatattgtgcttgacgttcacccatttgtctctttattcctttttaactttattttacaggtttatcactgtaaaattgtccttttactatttgaagatctttaggattgttttggatttttagttattttttaaaagccactaaaagcatctgtgtccaggtttttgagtaatcaaagatttcatttctcttgactaaacacctagaagttagattgctgagtcatactgtaggtgtgtatttaattttataagaaactaccagacaggggcaggtatggtagctcacgcctggaatctcaacactttgggaggccaaggtgggaggattgcttgagctcaagagtttgagaccagcctgggcaacagagtgaaacactgtctttaaaaaacaaaaacaaacaaacaaacaaaactagcagatattttcccaaagtaactatactattttgcattcccacttgcagtgtatgagagatccatacattggaaggttggttaacacccttaccagagattggtattgtcagtcttgagaatgattgatagttattctaatatgtatgtagtgatagttctctgttgttttaatttatatattcttaatgactaatgacacaacattttttccatgtgcttatttagcatcaatatatcttatatgttttctttggtgtagtgtctatttaaattatttgtcccttgttttttagtgaatatttttgttttcttatggagtttcaaaaggtcattaaatattccatattgaaattcctgatcacatataagttttgcagatattttttccaatgtgtagcttgtcttttcattttctcaacagtgtctttcacagagtggaagttttcaacttcaataaagtcaattttacaaatggttttcttttatggactgtactatgttttgtgtcatattaacaaatctttaccaaggtctatagaattttcttctatattttcctgtataagctttatagttttaggttttacaattagattattaatagtgagttgattgtataaggtctgaaatgtgtttttttgttcttttgcacatggatattcaattgttacactatttatttaaataattattttttctatccattgtattgcctttgaatctgtaaaaaaataattgattatgtatgcatgtattgtctctgtcttattattcggtaactattcttcttccaaggtcttgttattttttaaattaagtagttgagttctctgattttgttctgctttctcaaaactgtttttgctatcctttctttgcctttccatatatggtttagaattagctttttcttgatatctactaaaattcttgcttggattttgatttatttatattcaatcatctatagatcagtttggacaaagttgaccttttaccaataatgagtcttctaatccatgagcgcagtatctctatttaaatagatcttattttatttctttcatcaatgtttatagattatagcacatagattctatataaagaacaaaactgaatgaaattttatgttctttatattttatattctatatgaagaacataaagagcaaaactggaggaatcacattacctgacttcaaattatattacagaactatagtaacaaaaacagcatggtactggcataaaaacagacacatagaccaatgaaacagaatagagagcccaagaacaaagccacagacgtacagtgaactcagttttgacaaaattgtcaagaacatacactgtggaaatgaggctggaaaaactgtatattcataagcagataaatgaagctagatccctatctctcaccatatacaaatcaaaatgaattaaagatttacatctaagacctcaaactataaaactactacaagaaaacattaggaaaactctccaggacattgttctgggcaatatttcttgaggagtaccccacaagcatagacaaccaagcaaaaatggacaaattggatcacatcaagttaaaaagtttctgtttagtgatggaaacagtctataatatgaagagacaattcacagaatgggagaaaatatttgcatactgcccatcagacaaggggttaataatcagaatatataaggatctgaaacaactctatagaaaaaaaatctaataatcctatcaaaaatgggcaaaatatttgaatagacatttctcaaaagaagacayacaaatagcaaacaagtatatgaaaaggtactcaacatcacttatcataagacaaatgcaaatcaaaactgcaatgatatatcatttcaccccagttaaatgctttttatccaaaagacaggaaataacaaatgctggcaagaatgtgcagaaagggaacccccatacactgctggaggaaacgtaaattagtacaatcactatgaaaaacagtttggtgtttcctcaaaagactaaaaagagctaccatatgatccagcaatctcactgctggatatatacccacaagaaagaaaaacagtatatagaagagatatctgcattcccatgtttgttatagcactgttcacaatagttggaagcagcctaagtgtccataaacagatgaatggataaagaaaatgtggtacatatacacaatggagtactcttcagccataaaaaaagaatgagatccactcattcacaacatggatggaactggagatcattatgttaagtgaaatcaggcaacctcagaaagacaaatatcatatgttctcacttatttgtgtgatctaaaaatcaaaacaattgaactcttagacttagagggtagaaggatggttaccagtaagctaggaagagtatctttaggggcaggtggggatggttaatgtgtacgaaaataattagaaagaatgaattaagacctaatatttgatagcataatagagtgactatggtcgataataacttaatcgtatatattaaaataactaaaatagtgtaattgaattatttgtaacacaaaggataattgcttgagggaatggatgccacattttccatgatgtcattatttcacatcatgaaataatgaggttttgatacctcataaatacatacacctactatgtactcacaaaaatttaaaatataaaaattgttcaaaaccatgagaaaacaaaggaggaaaatgaaaacttcgttgtattaaggttaacttctccaaattttaactcctttcaacaattttcctgtttagcttatttttttagagtccttaggtagcttgcttattgtatttactcctactcagtgtgaagtataacctttagctgccctgatgcatcttggctagaaataaaacaattaacaactttgcatgtatgaattcaattctctccaaaattagatattaccattttcccaatttattataagggggaataaggaayggtatggctaagtaaattgcccaatgtcccagagtaaatgaaaaggcctaggctgtttggatccataattggtcccaaccactttgctgtacctctctcatgttgaattactatgatgataaatgctgtatgacatgacggatccagatgagcactgcagactaacatagtgttaatgaatacaggaaagactccaaaacaataaaaaacagccattcaaaaacaaacatattaacttgcctagagaagggaataaaagcttgtcaagaaattatcagaatagttcatgaagtgggaaagaatcagtgggttttaagtagtaaacacattcaggggttgggagggtgcatagggaggtatgcagaaatgagttttatgttggttatgctaactaattacaggttgaaagccagtactctggcaagggcagaatgtgaaaggaaacttttctacttacaacaataaactcgatatagtaggtgctcaataaattcatatggcatgaattaatcatgatatttactcacttctgacacgtagggtcaaaacaatcctaaaagctagtgatcttttacttgagattaagaagatgggaaaggaagaaggaaagtctacacatgttgtttttttcagtgttcagtgacataaatcatatcatacttttacacaaaatttgagctcctatccttctactacctcagtggcaagcctttatataccccagttcatcacagagaattaacccgtgtttcacaaggcatttgttaaatcagtccatgatttcctctagtcccatgagttgctcagagaaatgctgaatgaatttgcaggtggaacaatggcctggagcttcattgtttactctatttattcttgtagatattccacccagttcgagtttagcagttaaatttttatttttcattttttgctcttattctcactgtagagcagtattattgaataaatattttaaggtagactgcgtgattgtgtatatattgaagagtaaggaaactgcttgtggtaaaaagaattaagatgcattatgtgtatgcagtagacaatagggaaagagaaaagttagttatgtcatattatattctttgcagataacctcaggcactctatgaacttctctggagagctaaagtgaaattacaataatcatgtatatatattttttcttgcctgccataataaaaagcagaagataaaattttaattaaattcattatctgtcttactttgaaatgttaaatttcaaaataaaatgagtaatccatcatcagaaactatagacaatttagtcaatactaatttgaacctgaagtatcatcataaggaattcagtcagctctaggaattaataatttgtgatgatgtctgtattagaaatgtcctcaggatataatcaaagcttcaattttagttttgctttagcacatgtatttaactcatcttgggtacatgtgtatggctgtgtgcataaggattttgaaacgtctgacagtgctgaggccacatttctttagagtcctctactttggtgcatgcgaaaaaagaatctccagccaaattctaattttctttatgtatttctgcttcctgagataggatgctagaagtcactgtatttggaattttcagtttgtttgaagaaaagtatcagaaaaaaacctgtcaccttaggtgtggacaatatattattttcctttacttagatttccagaagatgtcagagaaaggcactgaaaagtctttatccatccagcaaactgttatataatgctcgtgttccattttttttttaaaccgttgttgtgtgatagcaattttatattttcaagtatatttggggctcaaggcttcacaatattttgttaagtaggcaaaatccaatgtgtcaggtgaagtatttatagaagaaaaagtttccatgaagtttgtctttttgagaacatccygtgaaagtttctatcctttagatgacatgtgagaagcaaccaaaagtgtcacacactgaacagcagagtaaaaagctcacrtcaaaacaaaaggcctctttaatccccgtgtggccactggtcagctggatacatgaaaaactcttcagatttgtctytgagccttggtgttcccatccttaaaggagatgactaccagtttctttatacctcttcaattctaccttctgttgaaacattttacccccgtattttaaagatttagctaagccctttcaaagaacagatggagattccatcaagcatgtgttcccatcttcactttgtaattcttcaggatgctttcccttttgctgaatgacacagaacaaaatctaacragtcagatggctgactcactgcattcccaaagtgggtccatgtgcttcccttcaggacatcgggtcactgttggaaactcttcaaattctggttcagatctgataccatttgagttatcacaattaagggtgcctcgtcgatgagttcatgtcctttgctggaacatggacaaagctggaaaccatcattctgagcaaactatcacaaggacagaaaaccaaacaccacatgttctcactcattcgtgggaactgaacaatgagatcacctggacacagggtggggaaaatcacacacagaggcctgtcggcaggtggggggctaggggaatcatagcattaggagaaatacctaatgtaaatgatgagttgatgggtgcagcaaaccaacatggcacatgtatacctatgtatcagacctgcacgttgggcacatgtacccaaaaaagggtgccttgtcacagagatagacagagcacccccttcccttcatatacattactcttatcctaatttgaaacgagtgaataacagaactgatctctgatttacaatgaaccaaaagctcagtgcttctgtttgttcagctgaggtctctgccttgctgctttgtgtgctgtccttttaactgtcaatattttgccagttccaatgatcatggattactcactgtgatttggaatcgtttcttgactgggattgtgatctccaaaaggccatcctataatttaaagaagcaataaaagaaactattatctctttgttaagtaaccaraatgctggatctggagaactggatgtatccaatcattagaaactattttgaggctgggagcggtggctcacgcctgcaaccttagcattttgggaggctgaggcaggcagatcacttgaagtcaggagtttgagaccagcctggccaacatgttgaaaccccatctctaccaaaaatacaaaaaattagccaggcgtggtggtgtgtgcctgtaatccagctactcaggaggctgaggcaggagaattgcttgaatccaggaggcaragattgcagtgagyygtgatcatgccactgcactacagcctgggagacagagtgagactccatctcaaaaaaaaaaaaaaaaaaaaaacaacagcamcaaaaaagggaaactatgttcaaacaccaatagttttgaatctttattcttgatgtttttgttctggcttgtccacagaaagtatatttgcatcaagaaccagtaaaagaaccagagatgagtatgtcacaaacacacaggatactataaataagatcataaatacacctatcgtgttttgattttcacttttctgtctatgggttgtagtacttggatattaaatgctacattgataggttatactttttttgggggggggagttaattttaagaattaagaataatataaataaaaacagcaaatataagatacatgtcttctagtcctcctcctttttttctatccctctgccctaatttctttctcaagaaataatagaagtttgaaaatttttgtgtgtgaaaagcaggtgacatatagaaagagaaagggctctagaattggagactccagtacacatctgtgtttctccaattagtaagtggatcctggaagaaattactttgtaatctttagttttttatctggaaagctgaagttactgaatacatttgttataaggattaatttaatgcatatagaatgataacatagagcatggcacataaacgtcctcagaaaattgtggctactgttgactaaaatgaatttcacaaacagcagtaaaaatagaactctgtggaaattatggatggatattagtagcacctctcctgatttggtatttccaaggaggaaagggaagtgtgatgttctagtcaatggtattttatagaattgattctatctctggtctccctccttctccctctgcatgtttctatgtgacacactagtttgaactgcagcgtgtcctaaaacccacattgcttttagtgaattgttaaattctggatgatcccactttgatgacattaagacagtagttattgtgagctgtgctctaactgtccttgctaacctccaacacattcctaagtttggcatgccatgaactggctctgtttagccccagaggtactttggtctgtccttgccaggggctgagtggggtgccaagagttgggcagcagagctgaggctggggagagcaaagatgaaagggagtgagagctggggacagaatctaggctgggtcggggctgctctatggcaagggtccatcacaaagaggtcaacttcttacagaggatgagagggaatgtgagtggccagcactagggagagagaactgagattatgagaccctggcagcctgggaagtgctgatggtaggacatgaaccaattgctggagagactgaagcctaggctagaatccaggacagctccagtcaatagtctagaaagtctggttaagtaaatgtgggcctgtagcccacattggctttttatctggcagaattccctattcatctcttttgatttatgagcctagaatccaagcggtcttctatgccttaatgtgatgcttgtcaagattaagtgtgcataagaatcacctttgctaaaatgtactttcttttttttttttttgggacagagtcttgctctgtcaccaggctggagtgcagtggcacgatctcgactcattgcaacctgcttcccaggttcaagcgattctcctgtctcagcctcgcaagtagctgggattacaggcatgcgccaccacacccagctaatttttgtatttttagtagaaacagggtttcaccatgttggccaggatggtctcaatctcttgacctcatgatccacccgcctcaacctcccaaagtgctgggattacaggcatgagccaccacacctggcctaaaatgtacattctaatgtggtaagtctagagtgtggctcaaggttctgcatttctaataagcttctgggtaatacagatgctgcttgtccagggaccatattttaagtgtcaatacgcttacaaactgttactgtttggtcttgctagatccatgggtcttctctgtctgtttgctgtcagtgttgcttcctcgyggtaaagaggagaacatcactaactagttgcagtgttagtctgcagctggaatggttgccttcaggatattttgtcatactggagccctgacaactctcatctttatttttattgtgacaaagcaggtcctcactgaatttaatattgctagcaaaaccatactgacatcctggagaattcaattgtctcctgatgcgattggttttcctgggcagaaacatttccccatccatgcatgtacatccattgccctgacgggaattatcttctgcctggtcaggggtctccgtgagaagccagcatgcctttaacctttaaatacatgcttattttttcaggtaaaatacagaatttgccaatttatgccattttccacaaagagaacctttctcctgaaactttatttatttatttatttatgttacttttggatgatgttaaattaggatacattcctgttattgggcacagggacctggttgcaaaattctgaatatagttgtcctacaatgatggtagccttcaaagtagttttccttgttcccagtgagaggaaaggaacagaaaagacaaaggcaaatccccatctggatcgtrtttctggttttaccttttcttgacattatttagcatttgtctgatccttacttaaccagattttctaggtgtgatcctatccattcacactcttatcttgcaaattccaggtgtgtagaaggtttttaagtgatttgacattgtgaaatatatctagtttactagaatgaagtcctggcttcagaaatgttgtgacattgttgtgacgtgaacaagtttaatgcttcactattgaaagtttacatcatcagcgtaactgagacttgctcggtgtttttttttttttttttttttttttggagatggataggaaataataattgattcggcactttatatctaagcactgtttggaaaccaaaacaagggccataggtgtgtagcatcatcaagcatccagcactccatgcctggacatcagcccgcacaggccaggaaacctatttaaccagaggtccattcagcacccaagaatatagctaatcatgtgatgcctcacatccctgtcatcctgagataccacctacactgcaggcactttctgtcatttatctttccctattgtattatcctgttttgctatggacttagttggccatgactatcttctcccaatcatctcacttttaaaatataacataatgttcatgaagtcttctgtttctatgaaaaacagtctttttcaccttccacttctttggggaatgttttctttgtttctttgtcttaatagaaacctggctttattctcataagggctacctccttgctgcctcctctcatgtaggcaggccacacatcagagagcccagaggcagggttaccattttcctcgtgccacaagatgccctttaagttgtaataatctcatttacgattacaaatgcctagctatacatatcttcactcctatttattatgcttattgttcaaactcctggtcctccagacttttctactaggcacgcagtctttccctagtcctcaggccgtgactgtgatccttcagggtgatttcaattttcatgcaagttactcatctaacaccattgatgcatagtttctttgtcttgctggctctagagactaacaccaccactccatttcagccacttatttactttgtgcctgtaccctgaacttctcacttctcatcacttagacctgaatacttctctcatctcccaatagattaaatatattacatctttcttctttaatggtttcccaatccagcctagagaccctttggtcacattgtgaatgctacattctgtgcttcactcttttctcactgcagtagcaggcaaaatcccaacactgtgtccactatactgtccttcttctccaggctgccgagcactgctggagaaagtctcacagccagtcagactgaggcccccacaaatctgtggtctccacgccctgccagatccatacaacttccttgacacatgcttgcttgtttccttacccagtgctcatagaaaccagctcaaaactctgctcctaccgcactgcttcagaatttcctctcaacacatgactctgcctctttttagttcaattcataatgactatttaaaacataacagatataaagaaaaactttttttcctattacccgttttaagaaataaaactttcctgatagagttgaagaatacttgttcccttccctgatcacatttatcatgcccctccttaatttctctgtaatgtacctcttgtgtatgtagccttaagcaatatattaggttatttttagtggcaaaattagcaattacttttgcaccaagctatagaaccaaagagtattgttttacagtgtttaataatgtctgtaagtgccatcgtctctctctctgtctgccttcctgccactcactcctcttttctcagtactttgtgaagtttatctatgttgcttcataaaatgaagagctcctcattttctctactgtaaagaatgaataaatcacaatattatctaccttcttgttgatggacacttagcctgttttcaatattttattagaacttgatttgctatgaacattctcctaattatcttttgatatgcatttgtaagagtttatctacattatatgcttagaagtgaaattactttttaactttactggatatcaccaaattatttttcattgtgtttggagtagctgcagtttataaaagtttatgttactctaaatcttcatcaatatttgaggttttgaaactaaaatatttacttattgatggttatattttatatataatttggttttagtttacatttccctgatactagtgaagttgataatcatttaatatgtttctgggtaatttgtgtttaatatatttgaattacttgtttttatatattgatagtttttttcccattgtttttactttatattgatttgctcacatgattaatatattctggaaaataaatcttcatcagctatgtttatgacacattttttttatcctgcttgttttagatttaatttgccctttttctagttatgaagtaaaagcttagataattgatttgagaccttcttttctgacataaacatttaatacaacaaattttcctccaagcatattttgatatatagtttagtgattttattttggttcaaataaatataaatgttctttgtgactttctttttgctttatcaattacttgaaagtatattgtttaattttcaaatattttgaaatattctagatatgtttgttagttatttctagttcaatctccttgtggtcagaaaatgcacttgttatgatttcatttattttaaatttgttaaggtttcttttatgagtcagcatagaagctgtcttagtgaatattccataagcactttgaaaaaatatgtactctattgttaggcagagcattttataagtgtcagttaggtcaagttgttggtagtgttgtctaagtattttatatcctcactgattttctgtttactctgacaattagaggaatgtttgtgtcctcaagtattgtggatttgtctatttcacttctgtcagtttttgcttcatctgttatgaaatttttaggtacattcacatttaagatcgtaatgtcttcttgatgaattaaccattttataattatataatgtgcatgttagtattccttaatgtgaaatctattttgtctgacattgatgtggccacaccagttttcttgacgttttgttcttgtatttgttgtttttcagtatttttgcaaattcagtcattatctgttcaaataattattcttttctattttttcttctaagattcaaataacatatgtactagactgcttgaattgtcacagtctactgtggatctcttttatgcttttttgcttatcgtgctttttcactctttgtgtttaagtctggataatttttttttctttttttattataatttaagttctgggatatatgtgcagaacgtgtaggtttgttacataggtatacatgtgccatggtggtttgctgcacccatcaagcagtcatccaggttttaagccccatatgcattagctatttgtcctaatgctctccctccccttggcctccacaccctgacaggccctggtgtgtgatgttcccctctctgtgtctgtttgttctcattgttcaactcccacttatgagtgagaacatgtggtgtttggtttttcgtggctgtgtgtttgctgagaatgatggtttccagcttcgtccatatccctgcaaaggaaataaactcattcttttttttctttttgtggctgcatactcttccatggtgtttatgtgccacattttctttatccagtttatcattgatgggcatttgggttggatccaagtctttgctattgtgaatagtgctgcagtaaacatacatgtgcatgtgtctttatagtagaataatttataatcctttgggtatatacccagtaatggaattgctgggtcaaatggtatttctggttctagatccttgaggaatcgccacactgtcttctacagtggttgaactaatttacactcccaccaacagtgtggtgggagtgtaaatttttcttcatcctctccagcatctgttgtttcctgactttttaatgatcaacattctagctggtgtgagatgatatctcattgtggttttgatttgaatttctctaatgaccagtaaagatgaggtttttttcatgttggttggccacataaatgtcttattttgagaagtctctgttcatatcctacgcccacactttttgatggggttgtttgttggcaacctacagaatgggagaaaatttttgcaatctatccatttgacaaaggtctactgtcaaaaatctacaaggaacttaaatgtataagtctggataatttctattagmctatcttcaagttcactgattatttccttgcctgtgtcaaacctactggttagcctgtcaaaggcattctgcatctctgttattatgttttatttacatttctagtattttggttttattctttcttatagcttctatctctgctaaaattccccatctggtcatgcaacttctccactttttccactagagtttttagcatattccctttctgttagttctaatacctgggtaatatctgagtctgggtctcttggtatatatgtacatattatttttttgcttttgcttttgacactttttcatccttctcctcttctgccccacttttccttctcttcctcttctttctccctctcctttatcttcttctcttcttcctcccctctttattctactttaatattaaattgtgcttaragtgcggtttaratgcctggagactgctctccactctccactctctactttaagctttcttggaagtttctacctgagagaggttcattatttgtgcttgcatgccccctctggtgggaggtagccttctgtcacytgtttcttggtgtctcagcctggtggcgggggcagaggcattctctatcgtcatctttcatgcttggttgtagacaggcccgatgttcttgggtcttggggtgggactttctcagtgatccgatcactctatagtaataaaggatcagaggatctctagtggtgtcatcccaggaagatttactgctcctccctttctaatttcaatgagtcttcacctaaggtcagcagggtctgtcatttttgttctgtaggaaagaggatccaagtgggtctttgtacttttcctgcaattactgctgttccccttcagcaggcatgtacctcaaagggacactttctccaggcacccactctgcttccaatcattctcatgggcatttgggtgaggtccataaagaagaccctttagtcagtgcagaatactcttgagtaaaggctctcaggagtgttatattctcatgctagcccacagatgacattatatattttggctgaattcttattaccaggttttttgaggtctgatatggtttggttgtatccctacccaaatcttaccttgaattgtaataatccctatgtgtcaagggcagagccaggtggagataattgaatcatggggtcagtttcccccatactgttcccatggtagtgaataagtctcacgagatctgatggttttataaatgggagttcccctgcacaagctctcccttgcctgctgccatgtaagatgtgcctttgtttcttctttgccttccaccatgattgtgaagcctccccagctgtatggaactttgagtccattaaacctcttttctttataaattacccagtctcaggtatgtctttattatcagtgtgagaacagactaatacagtgcctgacatatcttcctaccatgctctgctccatggagacatgtaaatttccttaggtatccaactagttggttgccctgagacctcatctgttttactagttaaggaaaacttatgatttcatgcatcatttaagttttccttgaagttagggtgggagtcattcttttatatctttgtacatcctaaatggaaactggtaccttctatgtgacaaatatattttcctagtccgtggtttgtttcctcactttttatgacatcttttgcccacagaacatttaattttaaagtagtcagatttattcatctttttatttttttcttctctctctttttttttttttttttttgagatggagtcttgctctgttgcccaggctggagtgcagtggcatgatcttggctcactgcaacctccgcctcccgggttcaagcaattctcctgcctcagccacccatatagctgggattacaggcacatgccaccacgtccagctaatttctgtattttttggkggagatggcatttcaccatgttggccaggctggtctcgaactcctgacctcatgatccacccacctcagcctcccaaagtgctgggattacaggtaggcgtgagccaccgtgcctggcccatgtttttcttatggtctatgcttttgaagttgggttgaaaaatctttttctacattgagttcataaatatgcttttttatttaagaaaaaaaataaagccattggtaagagcatcatcaatttcagatcatgcatcattttctactcaccttcctttctttaattatagtggattgtaccacctggattttgccttgcttgtatctccttaatgttcaattctatttctctctctctctcttttctggccatgttacttcagcatttaaatgtgcttatgtatcccaattattaaaaaaaaaaaaaagctatttcttaactcagtggccttatctgcttgaraaatatcagctaagtagagtgatgacactgttccctctgttcttcctacctgctgctcctcccatcactgaccatgccttttccaactaacttcttttcttgtccccttaaatatttttgcaccttaagattaattcctcarccctctcttcttctcactatatgcatttttttagtgacttcatgaattatttggttttaaccattagccaaatacacttaaccaaagatacttctctagacttaatatttctccagaaaatttaracccatgtgtgtttctaaggcacctcagaacaacatgagtaaaactaaattaactatccttgactaaaattccttttattctctcctgataggttagtggcttgtaatttactaggtagcatgatctttctcttttgcatgaattcacctctgatatcacatctaattctatcaccaacatcaggtaattctatttaataacttagaatctagattctgttctctaatcatatacttctatcttggcttaaccctcattattattttattttccttgaatattaacctctaaataggttgcttttcttatcaagctaccmcctttcagtacagtctttactttttgacactgtagtggattttctaaaattcacgtatgatcatgtcactctcttgcttaagtatatctaatgtggcttctttctgctctcataattaagcttattctctctagcctggccttcaagctttttctctgatctccgcttgtcttgctagtttttctctggaagcaattctcatctcagataaggaataaccaccmccatacacacaaaaatytaatggacaacatgaggacagtgcttaataatagtattttattcagcatttttgctaaatgagtagattatagctgctcttgccacaggggccaaaataggtaaatgaataagatgatgaatatgttaatttgttccaccatagtaactattttgccatatatgtgtatcttataacgtcatgtgcatatcttaaatatacacaataaaatgtatttattttaaaaaagaaggagactcaaagttttcaaattgagttctaagaatgtatttttaaagctccatgagagaaaaagygaaggcaaggagtgaatgacgggcagggggttaatagggcttgtatttcccagcccacaccaaacagagcagctctgcttttatctgttttacatataagccattatatttcatatgaaaaaatttcattgacaggataaaaaacattaggaaaaccaacatcttggatttagccaaactgaactatttgcaattctctgacttgtcatattcttattttcccacatctttcattcctgctgctccgttggcctagaattgccaggactctccccttcacgtagttcacttcctggagcctcttccatgcagtcatcctggatttatttgagcccttatttggtgctctttccttctgccctatactctgataatatccctttcatggcagttatcacattccactgtaactattcatttgatttcctcctactaagactgaattcttttaaaggccaatcctaagttakttatttctgtgtgctcagtgccttgcacatggtgacttcttaataaatgtttgtttatacaataaatggatgaatagatttatctagtgcttattggaatcaatcttgttgctatggggaaataagagaatcaaatttaygttctgacagagttattttattaaaaagcagaggaaaaaatgtatatctataaagtagaaaataaacagtaataaattatgtgagataagttactaggggaacttaggagagcatggtattgctttcagctgaagaaagagaagtcatcatggatgaggtggcacttaaacctggcccatagaatttgaaggtatgtcaattaggaatgtatctgaggatgatagaatggaatgtagaaagccattgggtgtaatgtgacccgtttcttctgcatatttgatatcataggttgtcatcaactcaactccataactggctcagagagagttttaaattttggctagaagcygatagggaataccaacattagagagtttctttcttacttgtatgctgcttcataggaggaaaaattgattaaactcttgactttgtgcattcttttgttcatgtctcagaatttctgttctgtcaagaatcagcccaaataaatacacacacatatagataggtacataaattaataaaatgtgaaagaatccatgaaggagggaatatattcccatagtagtgtttactaagtgtttgtgtcagtttgggtctttcagaaacagatgccaagatgaaatgagacatgcaaaagatttattgggaggacacttgagaaggataaaggtgagagagcagggtgggagaatcttcagactgtaatacacctgtatgacacttccacacagagacggaagggggagaattacacaggaagagcctcagactatagtacagctttaagaaagtcttggccaagctgatggggagccccagaacaaagattgcttgttagcaaaatcccgcaacaggcagaaatggcctgactataatacttctgccatgtgtaggcacttggagcgatctaggaggcacatggcttccctgaggaccttggagtattctgcagacatggaggctcgaggctcagacacccgtatttctcacagcaggtctcttgatgagacatctgagtggtgcaccccatggtcccacagtgtgcattccctaaaggtttaactcatctatagattttatgtctgtgatttattcacaagaaatttataaataattgttttaggctaccaaacatctttacatgtagaaggcatttaatgtcttgctggggttctttgtttatttcttgtaaatttgtctaagttccttgtaaattctgaaaattaggcctttgtccgacgggtagattgcaaaaattttctcccattctgtaggttgcctattctctctgattatagttttttgttgttttgctgtgcagaagctctttaattagattttatttgtcaattttgcttttgttgcagttgttttggcaatttcatcataaaatctttgcccatgcctatgtcctgaatggtatttcctaggttttcttctagggttcttatggtttcaggttttacatttaactctttaaaccatcttgagttaatttttgtacaaggtgtaaggaaggggtccagtttcagttttctgcatatggctagccagtttttccagcaccatttattagatagggaatcttttccccattgcttgtttctgtcagggtagtcaaagatcagatgtttgtagatgtgtggtcttatttctgaggtctctattatattccattgttatatttgttggttttggtaacagtaccatgctgttttggttactatagccttgtagtatagttagaagtcaggtaacatgatgcctccagctatgttcttttgcttaggattatatttattatacaggctcttttttggttccatatgaattttaaagtagtttttttctaattctgtgaagaatgtcaatggtagtttgatgggaatagcattgaatctacaaattactttgcacaatatggacattttcacaatattgattcttcctatccatgagcgtggaatgtttttccatttatttgtgtccccttgtattaccttgagcagtggtttatagttctccttaaagagatccttcttttttcaattgtttaaaatagcttgagaaggaatggtaccagctcctctttgtacctctggtagaattcagctgtgaatctgtctgatcctgggctttttttggttgctaggctatttattactgcctcaatttcagaacttgttattgatatattcagggatttgacttcttcctagtttaatcttgggagggtgcatatgtccagaaatttaaccatttcttccagattttccagtttatttgcatagaggtgtttatagtattttctgatggtagttcgtatttctgtgggatcagtggtgatatcccctttatcattaaactaagcttgtgaagcttagtttggccagacatgaaattctgggttgaaaattcttttctttaagaatgttgaatattggcccccagtctcttctggcttgtagggtttcttctragagatctgctgttagtctggtgggcttccttttgtaggtgacctggcctttctttttggctgcccttaatattttttccttcatgtcgaccttggagaatatggtgattatgtgtcttggggctgatcttctaatggagtatcttagtgyggttctttgtatttcttgaatttgaatgttggcctgtctttctaggttggggaagttttccaacttggttccactctccttgtctctttcaagtactccaaacagtygyaggttcagtctctttacttagtctcatatttcttgaagattttgttccatatttcttgaaggttgtgttggttccttttcattctttttttctctagtcttgtctgcctaccttatttcagcaagatagtcttcaatctctgaaattatttcttctgcttgatttacttggctatggatacttgtgtatgcttcacaaagttcttgtgctgtgtttttcagctccaggtcatttatgttcctctttaaactgtttattctagttagcagctcctgtaacatttgatcatggttcttagcttctttgccttgggttagaacattcttctttacctcagcaaaatttgttgttacccaccttctgaagcctacttctgtcaatttatccatctcatcctccatccagttctgtgcccttgttggagaggtgttgctatcatttggaggagaagaggcactctggcctttggggttttcatctttttttttttttwattgattctttctcatcttcatgagtttgtctagtttcaatctttgaggctgctgacacttggatgaggtttctgtggggacatttttgttgatgctcttgttgttgctttatttgtttgtttttcactagtcaggtctctcttctgtagggctgctgtggtttgctggaggttcacttcaggccctattcatctggtttgctcccacaactggagatgtcacttgaggaggctggagaacagaaaagatgggtgcctgctccttcctctggtatctcagacctcaagaggcaccgatctgatgctagtaggaatgctcctgtatagggtgtctgatgacccttgtggggggtcacccagttgggtggcatgggaagcaggacccatttaacaaagcactttcgctgtcccgtggtggagggggtgtgctgcactggagggaaacctgctcttctgggctgcctggattctacagagctagcaggaggaaagactaagtctgctggttcacagagactattgccacgcctttctctaggggctcaggcccagggagatcagagttctgtccctgagcacctggctggagttgttggagttcctgtagggaggcctcgcccagtgaggagggatgggtcagtgtctggcttgaagaggcaatctggccgtagtctgccacagcctgtgtgctgggctgtggagaatacctctcgggacccagtcgtccagcctccctggcttcagcaggggtaaagtgtggcctggagcttcagtgatagctgccgcccttccccactgggagcttagtgtattaagtagctagcagctgcaatgttggctcctgcccctccyccaaggagctcataaggtttagacagcaaacaacagcagcagtggtgatgccgcccctccccccagaaacytggctgacttaggcagattccagccaagtggctgttgagaatctgcatggctctgtggttgggaccctaggccccagtggcatgggttcatgagtgggaacttccgatctatgggttgcacagttccttggaaaaagcaagtttccccaggctgaatagcacacttacttcctgcctcccttgtctgggtatgggggctcccctccccgtatggctctcaggtgggcagccacaccacactgctcttccttttactctctgggtcatgccagccacctatcagtcctgatgacagaactggatacctcagttgctggtgcaggatttgtatgctcttttgcttcttttagatgaaagcctctgatcaccactgcttctagttggccatcttggccccacccccmctcccccaaataaattcctgtacttttttttttatcttaaagggataactatgtagggattttttaaacatttcattaaaaatgattttaactagaaaaaaattaaatttgtggtaggaatggcaagtttcattcttattgaaaggacttttttttcccttcatattttggtcatgataagcactcactaagtgagagcacaaaacaaaacaaaactaaatgaataaaagtttttaacttcctatccactactgttgaaaacacttgtgtttaagtatctttatgctaactccccttttccctgcttcttttcctaagatagtgccacttgtgtgaggaaaagggtctcacatgaccatgtggcatgggacaaatggaactcatttgtctcatgtgttactgggtggatatttgcttttgtccattgagacacagcaatcctggcccagtcactgctcccccatctggctggagtaacctgtagcctaagcttgtccaacctgcggccccaggattgctttgaatgtggcccaacacaaatttgtaaactttcttaaaacattatgcctttttttggtgattttttttttctagtttatcagctatctggtagtgcattttaggtgtggcccaagacaattctttttcttccaatgtggcccagagaagccaaaagattggacacccttgctgcatagattgtcctctctcatgctttctgactaactaggcctcatcttgtctctagatggcagagaaaacctactgagttttggccatatcctctatctgcttcttggcctagaaagccaacactataacctctgctgcagggtcaccgtatcccttttatcagagacatgtgctaggtctcagctcagcttcctttttatccacactttgagagccagtagtcttttctcaggcttatccatgagtgagaggagcagagggaaatgctgggtttaaactgaggccctgtccctctgcccatctacttgatgggctctcttccacccccggtagaaagttcaatgtttccacagggacaacctgaaagatggttcctcctatatttgcaatggagacaggacatccacttgccatccaccagtgagttctcctcccttctgggatttaaagtcctagagaggagcaccactccctgaaccctgacttggtctccctcacctgtctttgtctacctctgattccaacttcatggatttcaggagtgtcttcagctcatyatgtaaaaattttggaatttgaccatccaggtacatcaccatagttcactaaatgagaggtaaaggatttagcacatcttgtttcctcaaacttgttttgccattttttacactggactaaaaaatatcacgtctcggtctctrtagatgattgtgaggtaaagactattgtaaataagttgcattatttaatatttgcaaagtgattgccctcattacaattttttacatgtaatcactaagaaatctgacacctctttttgctcctttcatcttctgtactttttattttaatccctttatcttatttcttttaatctccatttccttttttaaaaaaaatctcaaatttgatgagaactctggtatatgacactgtccctgaaatatgctattaaacaggaaccataacaactaagggcattctccttaacaccaatctcctgtacctgcaatttgctggcagaacactatcttgacacgaagatgctatttgatttacctatcactggtgagtgaacagtgctgtactaatgttgaacacatcacatttgccccttcattatgtaatgtctccaatttttcgatgtgtgttgttagtcttgtcttcctaattaataataaccttcttgtatgattttatgtgtctgtcagattgccctttataatgtgagtgtacaaaatattaacaaatatctgttattgtagtggtcagtgagaaatattgttcaattaaatataactgaactataactaccaatcatcttttgtccctgggggagggtgagagaaccaagagtattttctgagtatgatgaccattcagcttgtacctcttctgagtaagataaaagatgtgagaactggcctgagtagaaatatgcttaaaagctatctcttttaagtatgcttgtggtatacaacaacyacaatctattattgtgaaaaaattttgcaagtaggcacagaaaataaactgctgtatgttatcataaccataggtaaatgctctacttaacagctaaaaatgcagttactttcttgagctttgtgactaattccttctgaagtgtgtacttggataacaagtaccaaatcttcagtttgtcctcagtgaaaataaacagaatatcaagaggttatctcataattcttgttttgtatatttaacttcattctctctaaaattgaatttattttcacttagcgaattagttttgcatggatagtatgcttaaaatgggaccacattaatgagactttgtagacatcttacgtcagtcttctcctcccatcctcaaattatacaagtgcacatatacygataaacagaattagatatttatttcattaattattcaccgatagtgtgctgaggtgttattttgctaggattcatcatactgcctccttttcacatttgaagatgactgatcaggattgtgggttgagtctttggtcaagaaatatagagaaattaacaaattatatagtcctcatgtccaagtcacacatgccttgcagtctgctacagatattatctcactattagcatttgtcataggtctttgggagaacgtggtgctatgaatgtgtgtgttcttatcagaaaagacttctaaatttaatggtaaaaaaaattaggaagcatgatcgctgttcaagctttattattaattcaaaacataatgttcaaattgatggatttggtctaattgatggtgcaatagccttctacccccagaaatattcttgattgtatccttagaagccaatatgtatttatctataattttattatactattttctaaaaattcaagaagsgttttgaatttaatttctgccagatttttttaaactagagctgaattataaatgaagccactttaccaagaactgcaaagagtgaggctgttggtttgtgaagtttgagacattattagtattataaaccaaacttgattactgctatctcattaaacggcattgggcagacatttaaatatttttatacattttaattcagctggtaacttgatttaaaacaacattgattttttaaaaaatttattcttggtcatatatatcatgttaaatataaaaatgaatttgtaagtatttgaggctgtctgtatgacagggtattaagttcttggagagtctttctttccccatgctaattttcatcaattttctattgctttaatttycccttgagctttagctttttagaagaatgattcattcttttcagcatataccatgatcattaaacaattacacctttatcaagtagagcagcaaaagactccatggataataatgaggttggaaactctcctgtacaacctgttggctcatcttggaagaagaatgtcatgccaaattattttttatgtggtcagtaataatgttctaacaagggtggatggagagatgagcataaagggcaattctaatggaaagaacgatagtaatattcaccttgccaaaacatggtaatgtcttgacaagatgctacatgctcttgctgctaaattaggttttatactaagttagcagcccctatagctatccactatcttacagactgaactagaagataaataatacacctttcatgttttagaaatctttcatatgactatgtaataattgctttgagaatacctattaaacctagactttatgatgcattaactgtgtggaatggttctgaaagtatgagtggagtaggcaggaagaaagtttatttgaatgtagttgcagtctctacttacctttwctttttagctttatactgaactccaatatgactgaaattttaacttttgatgtttcctaggtacagaatttcagagtgggatatcagatctttagtgtgaagatacatctacattaaaccaggaatcactagaactgacatttggacaagaaaatttggaaaattttaaaactgtgaaggttgatcatggaaattaaagaggaaggggcatcagaagaagggcagcactttcttcctacagcccaggccaatgatcccggggactgtcagttcacaagtaagtatgtgtgtatccctccctgtttttgcatctaaagatgcaaattgggccgatgaaacttacacatacatacatgcattcatagattcataggaacttcggttctaataaatggcatgaaattaccaaagtatttttcctttgcactatttaccttggtggcatgagtgtatgatatgcctctcatcttttatcttgggtaagatagatgatagtccatgaaatggttaaatatcaaataacaagattaaatatcttgaatatatattaagagcctaatgaatactttttaagtataccttctagacactaatactttctaagaataactggcatttatataatcttatatgggaatttttttatactgtagaaattctctctttaaacccaaaaggtacttaagttgaaagcattaagaaaaaaattgttacactagaaatttagactgtcactgccataccagagagcactaggccacaaatatagagccagtggagatttggccaagtttgcatgtgaacattaaaattggttttgtattactcaagtaaataaaatcattggaagaattgtatgttttcttttgtatttaaaattctagggtttgggttttattgtttagcatgaattatgccttttatgcctttttcctttcttttcagaagattcctgtagtccaattatttaacactggcaaatatatgcctaaccttctcttttaatttacattataaagctaatctttagaaaattgtattggttggatgcgtttttgagaaatctgattgtcaatgttgaaagcagagttaattgctaatgaccttttaaaaaaacgcagacatttcaagttcacaaaaacctacctaatgattgtcactttaacctctcttgaaaaatctaaaattgttaaccaaagcaattgctaaatgtcagcaggagaaaaaatatagttactgtgcaaaaataaataataaataactgtgaataaaaagcagttaatttttatacaaaaaggtgattcttaaaatatattagtgaccaaatgccagtaaatttaaatagtatctgatgaatgcaccagcaaaaataagcaaggaaaggatttgtataatactctttcatttattgccaaatagtttactttttcatacatgttagttttgcttctttggccacccttgagttgtaacaaatggcctcccrttcatacatccagtcatccactcttgtttaggaagctgctacactgtgtgtggattttaggcatctacccatatcacttcccacaatgtgatcactctaccttctagctgttagatggttccatttctgtacctttgtccccagactcactttcactcctagctcatcttaaattatttagccatcttgttatattttttaaacattgctgaccaaaggaatggaaacattttacaaaatgttggtttgagctattaataaattagcagaataaccagcactacaatgtccatcataacctagctgaagatacctcttttgttactgatttactgtttacagcaggttagagtggcttggaaaaaaaatccatttaagagagtattttggtaagggggttctttatgaaggatccacttctgtctacattgcatccaaaagagataaacacagttgtgaaatatgttttatgtttgccatggcttacaaaaacatttcttggtttctttataaccatacagataaaatgaccaatcaaatcttaagtcacatctagttctgcaacaaatattatgccctgccctgagaactgattatttataaccctgataaaccaagtttattcattctgccaaatactgtctttattcattctggtcacaatraagcatagtaatatatattgacatattcttgataattcaattttttaaaaatctgaatttgctyctattatttataggtatccagaagactccaaatgaaccgcagttggaattcatccttggtaagaaattccatcttatttatatcaataaatataagaatttgtgtagtagtttgcaaagtataggtagattgcttacatcagtacatatttgacaaatttttatgaacattgttctatttttaaaattgttctataaggtaggtgttattttctccaaatttataggaattaacttgctgcccaaggatacagggttcagtgatgatagttttgcctctcaaccaggtctgctgatctcacattccatgcccagcactcagtctaacgtagtgactgcattttgttgctaaccagcattcctgcaactctgtttgtctaattttctatacctggactggagactggccacctataatttctctttgtgttctttatggcatttccaggattcttgcccatttctctcgtattcaagaacattccctgactcttccatattgatttttgtgaaaatgccagtgacatttgagaatttaactttcaatcaagctttgacttgtttaagcaactctaaatatctgtcacatgtaaaaatttgtaactttgtccaaggatgaattaaaagtgtgcattctgagaccagtccactacttaactaatgagtggaaactactttatatgtgaattaagtatgactgcaaaaataccattaggaaattagctacaaagaggtacttaaagtaaaaatgtggttcatatgaactatatagactggtctttttttttttttcctgtcatggttctgaaatatttcggaaagacagtagtatttttatattttattttaaactaagttttacagacyaatacatgcacatattcaatttcgtatacagagaccacatatagtattatagtatcaaaatctttacatattaatatatatattttctaaagttttgggagcaaattgagatatatatatatactctatactgggttttagtggttggaatttctaagtattttaggaacatgcatttttattattttttaaatttatattttttgctgaaaatattttattttaaaatatgacttattgagaccataattggtatgtaattcattttttgaacattatttttaaaaaatatagctaaaaattgtgctataaattaaatattaaagatttttaaatttttccaggtattcagaaacaggcagaaatgtgaaaaactcaagaaaattttatagtatcaaaaatgaggctattattwttttctccctctctctctagagagttttcagattgtatcagatataaaaagaatgtgttttaggaaatggagctgaagagcaaaagaaaggctaggcactcttcactcgtacaacttgagctttcatctgtccatctttcatttttaagagaagaaactcactttttacctttttgacagcacttctgaaaagtgaagtttcattagagtgatttgatatatttccaagcacaaataaagctttcttgtttgcctgctggagaaagagggaatytgaagcagcagaagcaattagggtggcaattgttaggcaaatgtggtggccagccttcaagaaatggcatacttgaaccaaatacctgtcttctagtgcaattaagagaatctatcttgttcaaagacctaactatgctgtttgtttaraaagccaagtaaatttcagtaacaacaccatcatcacttatatttccagatttgaatcaagaattaagagattagcagctgcaagaatttattcataataatgttctaccagtataaaaaacttcaatttctttttttatatatatttttaaaatayactaagaaacaacaacagataattttatcttgtcaaatggcaagaaatgcttgatgagcgaacacaagtttactaaaaaaatattatttcaagtcatcatggaactgtattgttgatcctagaagacacagtccccaaactgttaggttccttagcactttaagatcttcaactacaccatttcttgaagaattttttaaaaactactctttcaagggtattacagataaacccgtggatgttttactgtccatttttgtcatttttttctttgagattttttaattccacaaatcctccgacgtcacctattattgtatgagtaacttctattcatttcccaatgaaagaataatagcttcttaaatatttttatcatgtttaagggtgtgcatatttatttaatcagaagtaaaacaagaacaaattctaggaaaaagaaattcagtaaggaagagggctttttcgtctaattttaactaaatctttgatatttgattctctactcttaaccaaagtattcaaattatttaggaatttcaatgaccttgctttctaaattaggaaaacagccacaccaatcaatttgctaggtgccatattgctttgtataagttattttccatcaaggatttgtgtctgctttgtgtgctgctatataataattatgtcttgctgaagttcttctgcttattgaattcctctactgaagttccttacttattcaaataagtaaggtaggaggtacttagtcaattgagcagctaattggctaaaagtgtcttgagcacaagataagcatgtactgaaaaactgagtatctcttgtccattgttaactgtatttctaatggttgattgcatttaaattaaataattcacccctacaactgcgactctgtttcctcatattttgtttctttgtgttaatactctttttattttcataaagaaagaaataattaaaaacctaagagaacactgagtttgtttatggtttaataaaattgttttgatttcaataaagctgacatttacgaagagggatcatttcttaaaaactaagaacatttctttatggaaacaattgtggaaaatgtataaaggagactaatcttgacaagtatataaaatacayttctatgaactactttaaggtttttctcctgttaattattcgcctccacttattatgtctagagtcaatagaatgcttatgagaatatgtcttcatatttttgtatgtacaccacatatactataaatccaaaacaatagatactaatacctattaaatacataggaaagaatggcatgcatatgtttgcatatgtgttccttgtgttctttccttgacgctctgaagtaatgttcttgaaattaattccttgatggctaatactcaatgcaagccaaatgaccagatatggggtacaataaaatatacattttgtacatgtcaacaagctttggggttgattgtgatasgaatgggggcttggaagctagagtgaaagcattaataagcacaggtcatttattcatctaaattatattgggagaggcatagaaagcctgtatataaaatcatttcagatagtgttaagttctatgtagacagaaagacgaggccactggatagaacatatctgggggagaggcacttgacttgggcgaaagagagactactttagatatagttttcaaagaagacctctaggtgcttatgcaggatatagatactaatttggatattgttcatattgagcctaagaattgggtgactttccaagtaggaggggacaagctatactagacattgaaatgacacataatagggttcttataatgggaatactgggatcgaagggtagtaaattaggttagtgatttgaccaggaatgaaaccaagttatacgttgttctggtttcaaggtaagaaaaaaaaagccacagtgaaaatggcaagatagtggaggaccatttgctgggctactggagtcccaagatcagagtaggacaattgcaggatagactagatgctgagctagtgagatctcattctcatacttcttgtattgtcccctcactttcacccttacctaagctgcagctatctgaataatgggatcaggcctggtgattggatgctgctgaacatctagtgagtaaaggatggagagacatgggatttgaagccaacckattgttagatcttttgccttttgtggagctgttttattttaagaatccatgtattatgtatagaataattttctttggaaaagttttttcctcttaaatttaaaatgtgctgactccttcaccataggtttcactagcacataaaataggagtaacctgtgattcaaattgtttaacagagccattatttcttggttttctctaaaatgggtaaatctacattagctggtgtaattttatattaatataacaaaaattatcrcaaaaaataaataatakgcaatgtggaaacacmtcacaattatatctagaatgtggccatccatcatacatttttagacatatttaaccctctttttcctgtttcaccatctcatttcctggcttttcttctatgtcaaattcaggagggatgaaagaaagtaaaagccactgtatttcatccccaactcagagttgatgaatataagctattatttaatttttagagtgaaacatacattcataagataggatattaatcagtcattaaaaatcatttatcagaaggatatttcatcacacaaaagaatatgaaagttttaaaagcaggataatatgcacaatatggcctttatttaactatccgtgtctgtgtgtgcaagataacaagattggaaggtgtgtgtatcttcagtcatggttctcaccagttggtagaattttcatttcctttgttatgctcttctatatcttgtaaggtctttgcaatgtacacatgtaaatttcataatcaagtgttgttgtttttaataaataacctgaatgcactgaagaagaaaaatggcatatcttaagtaaaattctacttcttgcctttaatttactctaaatagaattagagaaattaaactactactcttgaaatcattaaaaaaacagttaacagctaacctatttcctagggtatctaagaatattagggattgcataaaaattttatgagaaagcgtagtcactgaggctaactaaggaagactgactaaagccaatttttgaagaaaggaaacaggattagaataattagaggaaaggggaaattacattctagagtaggagagctgtatgagcagatggtttgtgtttggaacaagatgaaagctccaaattcagaacatacaaaaaagacacacaataaatcattatttattatacaagctacatatagaaaggcccgccatcttgtatttctagaaggaaaatgaaaacagtattctcctcaaataggattcctgattaatctacatcctgatcctttgggaagagtggtaagtacataaaaaatacataaaggtttttttttttataggaaattaacttcatattcactctgtaagccaccacttgtagaaggtctgttttttttctatggaagcggatgattgtaaaaagtgtcatgtggatatgcaattcagtatacatctgtaccaggtaaatgatgtgtaccgtcctagagtttaatgattaaaattcagttttttcacaacaatatgtmctggtacaatgacaagaggtccttaggtaggttaattcaaatattatcgtggctataaataaggagtgcttatcctctttggtggttaaggctttgtccaggagagagctgattctaaatactttgtctgttaggtcatgtattaaataatgtgaactgattttggattttatatatgcaggtactgtattttagtagcccatttaggggaaaaaaaagataaaatcatgtgatcagttttctgtgctcggcatttaaaaatgtatagaaatgtgccccaactgacaatctgcacaagaaaatgtctcatcrctttacagacacagcatttacaacttgcaagggccttcattaacctgaatgtcaggtccattcatactttatgaattgctataaatcaggcattgttttatatgtttttctaaaaggaaaaatcataagaggcccaacttatgaattatcttctatgttcacaatcctactctcttgctggtctgtgttctataaatgattatagagctctgacttttttaaaactccagtgggagaatggagggttttaggatatcttctttagtatttttgccttttacatggcatgctagctgaagggaataccaagcacagaggtatatttttgcatttattctattgataaaactcttacttcaccacataggatgcaataagagaaccaacggctaagaattaaacaaggcctgtgcttgccttattttatattttgctgcctcattataagttgattgacatccattttcttgattctgttttttgttttttgtttgtttgtttctttttagataaggtttcactcggtcacccagactagagcacagtggcataatcatagctcactgcagcctccaactcctaggctgaagcaatccttccaccagcagcctcccaagtagctaggaccacaggtgcacatgaccatgcctggctagtttttttcatttttattttttgtagagagggggttctcactatgttgcccaggttggtcttgaactcttgggctccagtgaatctaccacctcagccttccaaagtgctgggagtacaggcatgagccaccacacctagccttcttgcttcttatagtgtaacacatcccttataaaacattgartttccctgaactaccattttctgggcgccttctaatgacaagtcattgttcaaagccctaggaggacacagcaacaactaccattttttcagcatctattatgggcttaactttacaaacagcatgtcatgaatttctcaccacaactctacaggataataatattaaaagtaactaacatttattgattgcttacttgtttgccatatgctgttctaaataatttacatatattaattacttcttatcatttcattatgagtaattgctcttttatcatccctgatttctatgtaagaaaacttagaattaaactggtaaagtagtgagcctaagatttgaacccaggagtctgagttcatactataatatctctcccatattatcattactggacagattaagaatcctagattctcaacggtctacgttctaaagatcttacagaagctgaatgatggagtcaggatctaagctgagttttgtctgatttggaggctcctgcttttaaccatcaggcaatatccccctcctcactgatttgtacttcctaggagttttcaggaggtgatgaggataaacaactttaataatgtcaggcagattgtggtaagggcaaaataaaggcataaaccaaaaactatggaagcgctgagcaagtataattcattgtaacaatggcatcaaaaacagcatmtcagaggaagaggcatttggaccaagtcttaaaagaatgagcaggatttcagttggtttaggaggaacatgagagaattcagaaaaacgaaatagaaaaatacatgaaatcctagagctcattttccaaggtgatgcatttaatgctcatttacatttctctctttattgcttataattccactgtaaaataaattaaagctctagaaattctcttgcaatattctataattgttgcatgtatatcagagactcattttaaaattctaaatgaacacaagtctttaaacatctttattgccaccaaattatatgtaggtatcatgaagtattgagtcttactgcctctgggrctgtgctagatgaaactcagaggaggctcaggccatgctgagctggacagggaggattttttaggcaggctgtgcctctaattgcctacttatatagacaataattttcccattgagcctttctttgagctatgtcaattttgagagcatcggataactagcagtacttttgaggagatatttttcagaacaggcattcaccaacaactcaacaacaaaaataaagacaacaaatagaaatggatttgcattccaggctgaaactgagcctaagtagggaggcaatatagcttccaactaagaactaggagtatgatgccaacttgctagtgtttgaatcctatctttgctactctrtagctataaggcrttagaaaaatagcccaatgtttctgaatctctatttcctatctggaaaatgggaaggatattactatttaccttataaagttcttgtgatgattaaatgaattagcgtaagtggttggttaacttatgattaatacttccttgaataaatgactttatcacactcaaaacttccttgagcagggagtctagccactgaacttttgtgcatagtaattgccatcacttgctgaacaccttctaagcacaaggcattaaacacttttgacattttctcctttgttcctattacaggctcaacagttgcctcccattacctatgtttcacagacaagttcattcacttgtgtgaaggcctatatctagaatgtagagcaatctggattttaattccaaaggccatgttctttgtggtctatgattaaaagtacaggaatgggaaagagaacagcaataaaaggttatctaaggcctacatgaggtttttgtacttctgatatagttatttaattgaaggaagagaaaatgaaccaattagagcttctttacacatctgtcgggtgggtagtggttttctggtgaccaagatttagcatgttctgcagttggattgtagcctgtttttagtgacactggtttaaattcacatttggtgcaccccgcagatatgagawatgatacatcaattaataaatgagaagtatataagacctcaaacttttctctcccacttctccttgccaggactatatcatttaactgaactgttgttgacataaaatagatctattcttcttgtcatgtttctttctaagtaatacattgtaggaactttttaattaagggatatctttaatcaggtttaacttcacaggcttaaattgattattcaacatggattaagcaaattatttattagttattttttcctagatgtttcctttatacttttttttaatttgtctttcatccatgaccaacatatcccatacagtttatttctacttctttgtggtttacctaattactttctccctccattgtctaattactgagagcattggtcactgaagcaagtccctctgtgcagcatctgttgctacttaggggtaattgaggaatcaggactacctcagggctttgtttatcagatgcttttgctttctgtaaaatcaaaagccaccagggttgggagagagagaggtccyctgatgttgctgtctgtgtgcttgaaatttgtcagtcagtcttcttgttgagcagatggcatccaaatgtatcttaagtcacttggggaccacgccatggggacatgaagagacctaatggagtgcaattaaatattaaagataagttctcttacatttctattgtacaaaacagtctttgccccaaatgcttcttatttgagcttttgtagttggcaaaggcaatgttattcctgttttgtagtggaagaaactaaatctttgagtggttaagtgacttgcctgcagtggcatttctggtagaagaaagcccaaagcttaagttctctgtcccttactcctccatcagctctaccagtgacaaagagattattctcagctgttatccacagtgataaggtggcagaagtccgtttgagcatacgggtattcccaggtcaaaatttgctcaaatttagaatgtcagttttatcccagtgcaaattacttttccctctaagcaattccaaggcccacagctttaggtaatatttataagcctttgttttcaaaatgtgtaactcttgctctcacttttccacagagctttctacttccatattcaactggctaccagataacaccactcgcttgtttaggaggttatcttaaaawttttaagatggccagaacctgagtttttaaatctttacttttgtccccccaaatattgtattcccccatggtatctatctccataaagcacaccaccatccacttagttactcaaatccccaaaccataatgccttcttgattcttctttttctctaaccttacattaaatccatcatcaagtcctgtaagttgtaggttgaaaacatattctgaatttcaccacccctttccatccccaccactgtccttcaattccaagccactgtgaactctcacctgcgccagcaggcaagtcctcgtgagtctgtttctattcttgtccctgctcagtctccacctgatggaaaagccagtcttctaaaaatggaaatgtaatttctttactcccctagttaagatcttccaatggcttcaattttacttagagtaaaatcaaaatgggtcttaaggagcaggccattctcaccttaccttgtgttaattttctagctcactctctatcaacccatggggcttctttctgcttctcaaataggtcagatgtttgggtcttcatacttattgtccccccttagctggttccttggtatgttttaggtcacagctcaaatgccacctcatcagagaacatttgcctgatctaccagtccctaacactctcaagtttattacactgtttagaattctcattgttttttaaaaaaatttcttgtcatactagactataagcaccataaaatggggaatttattttcttgttcaatgctgtgaaactgtcacctagaatcatattgggcacatttggacrttcaataaatatctatgggctgatatgcatgaattccattgctttatcctcacacatttattcataaaataaatcaatatatttatatattcccttgaaatgtttcataattattgccaacacaattatttgtaaaaagtaatccattttaaaatttcaaatgaatatttaacctttaaaatttcattgtttgcaaatgaatatattatattttagagaaatagagtcttttggccttggggttcttttagagaaaattgacaagaagaatcagcttataggctggaggtgaacaagttgagttctataattagactgcgtatctgttgactgcatacctgtgtagaattggggagccaaaattattgcaatgtaacctgaagattcctatgttatgacagcatcaaagaagcaaccaatcttcttgcagaaatgtttttaagaacagacatatacaaataacaacaagaacagacaactgaaataatagaaatagactgacataaggagatttgagcttaaattttagcttacaacatgtgcccgtgagggaagtcagggccaggctggtatttggactgccagcctgagagagcctttggatcctgataccgcctcaaaaatcctgaaaaattcatcattcctgggtcgttttgcaaactcaatcagacagcattcctaaagcactaagaatagtgctagatgtataagtgattctccaatggtattattctaattattatcttgggttaatccctttctgtccctgaaactctgattccttatctgtgaattgcagataataattcctattttgcaagttgtttgagctaatatagatgaaattgagaagtatattactaatacattgttaggaatttaatacattttttcacacattttatttaattggatccacacaagcactaagtgagaataaacataattatcatccccattcccagatgaagatactaagactccgtaacaaacccaaaatcacacagtcaggactgaatctatggccctcaacttttggcaatttggaaggcagagcaagtaagaactgccaagaagaccttaaacagaagggaaggtgcatcatattctcatcttgcctaggctacagtgcatcccggaagaggttctttttaatttaatttgagtagtgtaaactactcttctgttctgaaacttcctgtatgcctagggctctgaagctttctactttgagctagcagccactctgctgagctttcatttgaactgctctccctggagatcccaaatattctgagaagtatgctcttttttccttcaaacactgatcctcttagaactactctttcccacgaagttgtctgatctcggttgctttcacaaactgttgaattggtggattttgctccaagtaattagaccctctgctttccagccagcccagatttactttctcacttataaactcctccttctcttatatcctggatcactagtcatttctagctttagcttatctgtatgaagcttgttttatttcctgtgagtcaactatcttatgacagaagaatcgacaccctcaaagccctagttagtcaaatgaatattgagattgtcttttgcctacacagaatcacacatgattgatgactgaagcgaaactggagttatcttctttaagcacttcaaaactggttcttgcccaaaggatgatctagatggagacaacaaaatgagaagctcattatgcccctagaaccatctatttttctcattcttccctattcctcttacttcctaatctgtctttttatgtgtcttcaatttaataatttaattctactggtaaaatatttggcatttgagcaatagcacatagccattaagcccaaacaaattttcaggaaaaaaaattacttaaataatttttaaccttaatttagacatcatttcctaaaattcaagcccttaaccaaccaccatctgcacaatgcaattctcctgaatattttggtttgggaaagcatgctcaggatttggtaaaacccagaccatgagtcagtgtgttgtatgggaagtcatctggattgaacagctgcctccctgtcggcttgctacctcctgcccaaacaaattccctcagragactgtcaactcctcaagacaacattccaggcccctattttctttattctccctcaaactcctaaatacctgcctgacactattttttttattatactttaagttttagggtacatgtgcacaacgtgcaggttagttacatatgtatacatgtgccatgctcgtgtgctgcacccattaactcatcatttagcattaggtatatctcctaatgctatccctcccccctcaccccaccccacaacagtccccagagtgtgatgttccccttcctgtgtccatgtgttctcattgttcaattcccacctatgagtgagaacatgcggtgttcggttttttgtccttgtgatagtttgctgagaatgatggtttccagcttcatccatgtccctacaaaggacatgaactcatcattttttatggctgcatagtatttcatggtgtatatgtgccacattttcttaatccagtctatcattgttggacatttgggttggttccaagtctttgctattgtgaatagtgccgtaataaacatacgtgtgcacgtgtctttatagcagcatgatttataatcctttgggtatatatccagtaatgggattgctgggtcaaatggtatttctagttctagatccctgaggaatcgccacactgacttccacaatggttgaactagtttacagtcccaccaacagtgtaaaagtgttcctatttctccacatcctctccagcacctgttgtttcctgactttttaatgatygccattctaactggtgtgagatggtatcattgtggttttgatttgcatttctctgatggccagtgttgatgagcattttttcatgtgtcttttctgcctgacaccattttgtgcattcactcggagtccagccatcttgagtccactccccttagccatccacctttggtaactgaagccctgactttcctgccacccttcctgtaacctttctccaccagctacactggcctcatcttttggttcagaggtaggtcagggaagcagcccctccccaataacctatgtgcactgctgaatccactcatgggccatatgcttgtactggacagaaatcctattggctcccatatcagtggtagttgttcaaaaaaatgktgccacctcagctcctggagaaagggtggtaaaaggcttaattaaggtggttccttgcatttctttttccgcttacttcttcagcctaatcctaacactacagatttccatgaaccgactcacaatattgcttttagtattcagggggacctgctttccttcttggaataacattttcatcctttcttaagcagcacatatgttcccactgaaaagagcagcagaaagctgcaaacacttgttgtttccaaagtggaacttggatttggagcatgcacaaaaagagccaagtctgaatgcaacgataggcggtgctaggccagcttagaatttatggcatgaagtgtgggatatcacaaccagaaaagatgcgggcacagacttgtttttatttcaattgcttgaggatggagtctcagccacctaggtaatattcatgaaagcaagacaaaataggattttctgaggactgacctgagaagctaagggagcagggcataagcttgagaatgggagtcttctggtactgacaacaattatttgaaccaaattttttcttttcatatgcaaataagctgtctgctgtacagctggtatcttcatttttcccagcacagacaatccaagagcatttcccaagagcaccattgttccaggcagaggttgtgttgtttttctttccctcttgattcttcagtgacacttaaattgagaattggtactgggtgtgaagtttattttagtatcaataatattcccagctaaagaagtgaattttatcttctcrtccattttttttttatttaaaagcccagcacatttctatttaacacacacacagacacataaaataatggtgacatgttttaatattgttgtgttataggatggtaaaaaaaataacaaactttatttcagggcttatttcccaacaatctgaagctaatattttacttcaaggaaatcagtttaatttacaagtgaatcagttgtaaagaaatttaggagcaatgatgctcaaatctcaatgtggcaagaattmtaaagcaatatttctacaataaaatctcttaaattccctcttgcaaattattacctatattcctcaataactccgtcatctgttttctccccatggtattagattcatcctttcctcaagttttatttggattctattatcagagggttgagagtcttaaaattcttgttgcaaagctaaatcaccattgaatatgcagacaaccagacaagcagaatgacattattgaaaacaaattaactcagattgctgaatactaagctattggttaaataaaaagatagtatttatccttcagccagacactgtaaccacaaatattgactggctggttagttaaaaatatgaatgtggaactaatggaactatgagacagcaataggcatgttgttctagatgtgagctaacacaaggaaagggtctaaggccaatacttcctggtacatattaagcatttagcaaattatgcttcctgccacrcctcaccttctttgcatgttttatgtattatctttaataataaaaaccctaaaatatggaaaatattagcattttatgattgcaagataggaatactagtatctagcattatttcaatatgcctaagagattcttgcattaggatggctttatttatttgtctgtgtgtttattcactcatttagtttatgtgtatgtatgagctgattccttaggttgatttcttttctttcagtcttaaacattgaattgcttttatccgctgaccttttagaaacctaaaattagtactattattttcccttatatgcgtattgtctttcttggagagaaagaccctggctttgaatttgggacattaatttttagaacttagtgccttaaaagacagaagaaaacaaactaaaaaaacccacacattttctaattttttaatgccaacttttatacatttgttcctatttttccaacaaatatctcttatgttggcagcgatgcatggtcctttaggaagtgcgtgccaattaaaatctcccacacaaaagttaaggagaacataacacatttttgttttgtttctataaagactttaaaaccagtgaactgaggggagaagctgtggtttgttaagagcagtgtgtgcttgactcctagagtcccaagtcttataaaatatatgagtggygactttgataacctcgtctttcagagtgatgagagtaacacatatgttggagaggaaatatgagatggcmgagaagagaagaaaaaagaataatgtcaaaggaaaattataaaaagcaggcttgcccgattgaaaataagctaaaatgagaggaaggacaagatgagagctactctcaatgaattaaagactcaaagattttacagagaatacagaagaaagatgggaggatatatattcatggccataaatcaaytcagcatgatatagagacatattcttctaagaaataaccataaacagatagtagtgaagagagtatttccaactgcttgtgcaattctcattgtgtggatattagtataggcagggacactgtacattctgtcattttactatatataattgaattatcatggattgtagtgcactgagcctaggaagcatcctcttctgaatgtactcaggagatctgagctggagaggttgacatcctaggcttcagaaaattgctgtcttaaaattcttgaggggaaggaagaataaaaaacaaaaaaaggcaaaggagattaaaaatagaaaarcatattatactaataaagtaattagaggggctattaggctttttaagtgctctatatatcttttaatgtatgatataaactgatttaatctagatgtaatcactggtatagaatgttaactgtgaaaccatataatggagtccaataatttattggactggaaacawaacctaaattggcttatcagttgattagtggaatctaattttctgaagtacaaagaggaaggacatatatgtgacagttttgagaaacctgaacaaacattaagaatttctgaataaaaaactgccccctaggctgcaaaagtcttttgcacatccttagggaaatgatgtgagataagaatggtgctattgagggaggtgggaagccaaatggtatttccctaaagctctgggtttttttgttttgtttttgagacagagtctcactctgtcacccaggctagagtgcagtggtgcaatctcagctcactgcaatctctgcctccctggttcaagtgatcctcgtgcctcagcctcccgagtagctgggattacaaacgcgcatcaccatgcccagctaatttttgtattttttgtagagatggagttgtgcgatgttggccaggctggtctcaaacttctgacctcaagtgatccgcctgcctgggcctcccaaagtgctgggattacaggcattagccactgtgcctggcccctgtttgtattaaggccacttttctattctaggatgccaatgtcctctgtactctggccctttttgctcttaacaggcatggatttatctctcccatttctcctatgcagtgtctgtagagggcataagaggtgagctttcattagattcgaaggtatgcttctatcagactatattgggctctagctgtaacatttagttttaattgcaagaaaaagaagctttattagcatccatagtcttcctttttgatgaaggaaatgtacagagcagagaagcaactctttccctgaccctttgggacatctcagtagttaagcaartgctcccctgtgggccatcatccactgagtaatggaaccctaacctcctagttaaacccctgcttaaagggtgagttgaccatttacatgtagcacatatgctgggagagagaaagtcaagtttgctttctccattgtaagtttctcatttggaagtacctcattagaggtgaaaattacaagtgcaagtgtacacatctgatttcacagaaagcagcatattaatgatgcctctgattttcacaattaacacatgatctagtaaagagcttttaaaaatgtatatttagctatctgaaaataaggtgaaaaaaatcacaggtatatatttaacaaatgcttttattgaaaaaagaataactttatataaaattaggaccaatctggaatatcttgagcatatgattagtataaaaatataggatagataaaatccattttttgtgttaatgcacagtataactatatattaatgtcaataataatttaaagggactcatatattagcattctatatacattaccttattgtctttatagcaaatttatgaagtacattcttttacttccattttgcagatgctagaatagagattcaaagagattgagtaattcatccaaagtcatatatagctctctcaaataaggttttatcttaagttaaaaaaaawttctttatcctccatacactatggtatgtggtttctcctctaagtctaaatttcctttggctaattttgagtacagaattgtagagatgtggaaattcttgtcatatccccctcactgattcccacgcacctgtggccactgctttgttctggaagaaagaggataaattttgttagattccattaacaatgaatggcaagaagagagatgaagtaagagtgaggcaagagaaaagacctcacttcacagaagaaagttttcttagggggaaagagatggtcacttggggttgaccaccaattcacagtgcctcagtggttcacaccaccactctcgtgaaagcctggggcaggcayctgcttgttgacaccccccttgtctaatgtatgctttacaactacttgaattcgagcagtgttgctgaactcaaaagcacctgaatgaacagttgtgttctacttcaaattgattattgctgagactgagctctctgatgtgaatcaagaggtatttttaggcttccagccaaaattggttggaatgatagaaatgatcatggactcaatagccttcacctgattttgaaataatggccacaggaaacagaaactgrtattttataaaaagcagtattttggtatagacagtatctttgatttcacaaaaatcctgaagagtcccaccttttagctctggactctccagtgagaactrctggagcagaagaaaatctgtgccctcttcctaagaggctaggtagtagctgtaagcgtcaagactagaatttggcaatttctattcctcagaaaaacttctggccaaatctatcaaacagatgtattttgtgcagctgttccagtgttcacctgcacagtgactggggatttcaagctttggagaaatcctaaaatcaaggacacagtgggccttcattttttcaggcaatgactttgtatagaggttccatcttatgacatagtgtaagctttccagtttgttcagtgcctagccctccctggacatattgagtctttatttgtttattattttttgagatagagtctcagtcaccggagatattgagtctctttatttatttatttatttatttattattttttgagaaggagtctcgctctgttgcccaggctagagcacaatgacgcaatctcggctcactgcaacctccgcttcccgggttcaagcgactctcccacctcagccctccgagtagctgggattaaaggcacccaccaccatggccagctaatttttgtatttttagtagagatggggttttgccatgttggccaggctggtctcgaactcctgacctcaagcaatctgccctccttggcctcccaaagtgctgggattacaggcgtgagccaccgcatgtggccccctccatttatttttattattatgcttccactgaggatttccttctcgtagagtgaaaactgcctggctcctgtacaaatatgagctggggatgcctgtaggcatctcactcacagctactcatagtagaatgtgaaccctcatgttactagttaccatagcaaaagtaatcaggaaataaaaagtcacttattgctctttattttttttctgatgacaagtcacaaattatggtttaaaaatatattccttctgtattattatttttcccacatttcaataaaaaatacactggatacaagcacactagaatccccatctatcaacatcctgcatatttaaactcttctgaggtctaagaacacttttaaacaattcaatactaagcaaagccattaagaaggcagaaattaaaaatctactgatgaatgaaggattgcagtagcatttgtttgttactgaccattagattgaagtgggtagaattcttaaataaacaaaacgaaacagaagcaaaatcccaaagcattgctttcttttagtcttctgagctgatgaaggccacagatgcaggccactcctagagtagaattatatttggttaatgagcagtggtaagtatagctggaagacagatataactttttatttatttatgagacagagtctcattctgtcacccaggctggagtgcagtggtgtgatctcagctcactgcaacctccgcccctggggttcaagcaattcttgtgcctcagcctcccaagtagctggcactacaggagtgtgccaccacgcccagctaatttttgtatttttaatagagatggggtttcgtcatgttggccaggctggtctggaattcctgatgtcaggtcatcctggcctcggcctctcaaattgctgggattccaggcataagccacctcacccattcactttttttttttcctgaaaacagatttttcaggattctttattggctgctaaataattctcatacggattagattttatagtgatcatatgagtaatatcttcacaaaacaatccaatcactcattatttatcagccgtctggtgggactgattcagtatgtacagatccatgatgtgaataggtttcaccttatgaaatgcaatgactcatgtactaatttrgtatttatgaaraaatattggacctggtaacagcttttaaaaagctgagtatgactgagtcaataaaaacaattttacacaataataaaacaccagatattggtaaatgttgatattaatatatattagtatgatattagtaaactttttttttgcatagaaaagtccatttataaaaaggcccaatttcctcacttccaccctgagaggtaggtagatagatgaggcaattaagtgtcagagtttgtgacttactcagtgccacagaactagaaagcaggaaatctgggagcacagcttaggaattctgcctgatctcgggttctctccaggatatcatgctgcataagacttagggtacagtaaatcctctgagctgtaggaagaaaaaagtgcagcccaagatgtaactattattgttttcctgacaagatgtaaccgtattgtttttagatgtggaatataataaaaatacaaagcatcatcattatttttatcagtattagggaatgtgcaaattgggttggacagaacatttcagtgtaatagaaattttctctgtttttatggggaacgagggtgagagtctctctgataaaatggagaacagctgctcatttctgggaaataaccacagcccacaatcaagtctgataagaactcagaaaagaagtgacttattttgagcaaaggtgtcatgagctcacaaggtaaaagatggggctacaagcagaaagtgggcaagatgcctgtatttgaaacacagtggcctcagctttaaaattctgatagatatatgtcaatatcaggaaacggaaaaagagctgtttactgtaagcagaaaaccaacagttgaattttatgagcaataaaattaaacacattcatattgcaagtaaaggaaatgatcaaaataaccaccaaagaacagtgaaaatctaaatctagctttttctttccttccggtgatacgttgacattattgaaacctggcaccagtattttttaaaactctaagtctcttgggttgagtaataatcgtggtgtggcggtgggtcttccaaagagaggtgccattgtgcaggagggcaggtcggcatgccaagaagagaaatgaagccagtggggtaggatgtaagctaccagagaattctagtaatgtaaatgtgagcacttcatgtttccaagcctctagttctagttctatgtaaaactgaaataattcaaagcaccattttaaggaatagagagataattagcaaaatgcctcaaaaatagtaagggttaaatacattgtagctattatgttttttccatacatgctttcataagctctcttctgttactagaggcatgtggtttatataaggaaaaaaaagtatatgacaaaacgccatacagaagcagcaggatctgaaagtctggyaagaagttaagcagttaaataattttcccagtgttgcctagctatttgaactggactaaaaccaagcctgtttcattccgaagttcctgctttttctatctccttgtacttctgaaagagattatctgtaaacaattgaaaggtgataattgcatctatactttcctttgctttcaagtttcagatttaagccatattacctttgttaccaatggtaaggaccttgcaagctctgaccacaacataccttaaatacctcatctttctctcccttcctgttatggtctgagaagtggggtagggatggtatagaaccctgcatgccctcaccatgaaatcaaggacccagggctacttcccccatccatagctccagcctgcagcaagccaccagccgaatttaacttgaaccacctctagtgagggcactttacatctcagcaactcagctgaagggagtaaaattattatttcaaaggtgggaggcgagggtggcggggatagagaggaaagtcgattcagacttgcttaaaaggaatatttttctggatttttcttcctcaaattgggggaatgatatgtgagaggagaaaatattcaagtaaatatggtatggtggcgagggtctgtaatatgagcctggtgtctcaagggaaagtttttaacttttgtggcccctgggcaagaattaacccatctcctccaggcttagcttgaattccagaccagggctttaaaaatcctacctctgcttcctcttcccctgcttgtgtgctgttgtggttgagaaactgctctccttgtttctgttggtgtgtattactgtgggaggccagttctagtgaatacataggtaaggaccaagtatgaattcaaacacttgatctaatccaacccatgtcaataaggaacaccaaagtttccyagatatggcccaaatcaactttcacatcctcaaggagtgtgacttaaagcccagggcttaatggctaattaaagtcactgaggtttctgagccatgtgtgcatagtcacgcattagagctgggatctcagaccagtmaagacttgcatgaactgcaaatgtggtcagtggaaatgaactctcaattcagctccacagcacgtgacttcctatttctgtaaggtacttccaagggacttcctctgtaaaaccagcctgagccccaggagatttccttcagtgctgtagctaagttcactttcagcccggcgcaraagttttccctgagatatggtgttagtttcttttctttctgtctcctctgccgttgccagcatgcaaggatctcgtggctcctgtccgtgatcgtaaactgaatacactggtgcagatctccgtaatccaccccgtggagcagagtctgacaagatactccagcaccgaaattgtggaggtgagatgctgtgtgcctacattaatctctctctctctctctctcttgctggctcgctcgctcttgctctctctctcyctcccccccacccccgcccyatctctggatttgaatgaacagctgaaataagttagttcatagtctgtagcaatgctgcattaccatcctctgtcattaagaagcacatacctgagattattaagcaatgcattggtaatttactagaacgaacaaatgamaaaataacttgtctttttttttcttttcatacaaagagtttatttttctcccaaagatagaaaaaaaagttcccactttaaattctcatatagagcatagaataaagaaaaacaacatacagactttaaattgaaataaatatttattttgaggaaaaaaaagaaagttgtacagtacccagagaaattttaaacatgttaagggtttttgctttttttccccccggtattctttagtctgtggaaactttatattctctgttgtttgtctgtctttcaacttacgatgtttttcagggaaaagtagatgattaatttgacaaactatgtttttaggcaaaaagtataaatattactcatcagatgggaggtttcctatttacatttattattactaatataacattcaaaatgtcaagaggaaacttgttattgtgttggatcagattcaaaagaggaagtgtttccctttggattattttgttctgatcacacatttcacaaccttaatgaatgagagatacttatttaaacatctggggctggagaaagtataatctacacttcttaagatttgcttgtttttcttagacttgtgagctgcatatgttttgaatgaggagtttctctgtaagaacctaactagcctgccccagacctggctagctcagggctgaccgcctgctttgatgcggtggtggaataaatgattcagactgaacgggagtcatttctataatgggaatgacccagatactgcatgtagccctgaatatgccctttggaaactttaggttccagtgttggtataatatatagttaatgctatagttgaattaacaaaaataatcttattcatatgaaaacatcttaaccaaaattgtaagttattcattttatataaaaaagttaaaaattctgttattttaaaaatgttgccaaaatttacttattcactcatttaattttgattttttcttaattttcattttattgtgataaaatacacatattataaaatttaccatcttaactataagaaatgtcttattttggcacattttaaaatattgtacttgaacatkttttgctatttttagttgttttattcactgcccgttccaaagtgtctgatgcagtgccaagcaaaatgtatttgttgaatgaaagaataaatgaatgaattacttgggcttccagaaatttccatagacaattagtttatagaactctagcaaacatctccatgatattcggcaatatatatgtataaaatttaatgctggatgtcagctctaaaaatgaattctgaggcattgaaatatcctgtgcactgcatcctgagctagtaattttatagcctcaaatccatcatatttagagtttctttcattagttttcaagtgattctgaggaaaaaaaaaatcatagctgaacatctaaaaacaaatggacactatcagagcatgattttcaattgaatcattacagaaaggaaataaatggaagcataagattaccacatggttctttcggagaaaatagcttcattttaatttgatgagtcaatatcttagattatttgcataaattacaagttatatttattaagtgtattttaaattaactaaccctaaagaagggttctgtagataataaaaataaactttttcaaggcagctctgacaatgatgcaggttcatttactatcagcagttgtatcacttccttaaggccctgggccatgttgttgcccaagagcaggatttgacaattcagatctcttctaatagaactatttccttgaaaaacagactcaggcacactttctgcattctcatgtgtcacttgcgtgctgccaactacagttgctgccttattgaatcaaagttgtctgcttgtgctgttacagggaacaagggacccactgtttttgactggtgtcacattcccatctgagtatcccatctatgaggagaccaaaataaaactaacagtctatgatgtcaaggataagtctcatgayaccgtaagtactggtacttctttctttctttgggaaaaagttatgcttttccacacgrttggattttttgtgtaactgacatttttcaaagaggatatttgcaccgtgttcatgattgtcttatgtttatcgtttgttgtttttttcccaaatatgtttgtctcgttgccaaattggcmattggttaggagcaaaagtttttggaacagatttttctttttcaggagagctgacttgatcttttggtttacattttgttgttgttgttttcagcagagtggtaatattgtgggtagaaagcaaatggaaattaggcaatatttaaaactttcttgatagtgtaattattctaaaataggggattgacaaagtgctctacttttacaatgtattgcataccgtatagagagaaactgactacatttttcttgatgttgttactggcaccaaagcaaacagaaggtaattggaaacagtaggaagaaacrttaactgctctcttttcaagaaggccaggcaaaatcccagtggtcttttgtcctaaattcttcaatcttcctaactggtctgcatattcctccaattgcatcatccttcctggttaggcactatagaggacactcttaaaattcttggacaggagaaaatgctattggggaggtaatgaaaaggggaaggcagttctctcctttaaatttcttccattagcatgaatttgtatgtgtcttcaaggcagggagctatgagagacttgaaggtcaatattgtagcatgaggcagtaaactctttaatggcaggtggaccagtgggttccaggagagttctggttgaagctaagggatgctgctggacctggggaatcccacagtgccttgtatagggaaaatgtcactttgaactctgccctcacttcggcatttctgttttgctcatgactttctcttctttccattctttaccacaaaacttagtctaatagtgggaacatttaatggaaaaaaatattctatattgaagggatttctatgcatcttagccccagaaaagttcatttctttaaaattgcagaacaaagactcaagtaartgcacagcatatgtacatggaaacaaaacagttgtggctatctggtacaattcttaagaaggcagattctgagccatattttctgattccgttccatwtacyggctttgggagaggaaattcttggttcccttgtttcatcttttaaaatatttacctaatgggattgttgtaaggattaaattaattaatatacgtaaagtgttactgactgttacagagtaattaataagggtaagttactgctattattgctgttattgttttggcagctgcctcatgctttcttataaatagtaaaaatcaattaagggagtattaaccaaaataattttctatatttactaattttgttttttctcaagtgaccctacatttgctgtttattacttctttgaacaaaaaaggtaaaaatttgggttaaaactggcaactgaaaaatatttgcctgggagttttgtcttttcctttccaacttctttggtttttgaggtaatgtgaaaaaggagtagactgcagctgggatatttagaccagctttgataaattatgcccagagctctcacccacggttttttgttgctgtttttgttttcaaccttttgccagaggagagagagaagtggaggaaaaggtgaaagaatcataaagttggggaggagggagatatagttcaagtggaaggtgggagtgggtgatgcaactgtgcagagaaatgatcaggacaaaaggaaaagcagaggagaaactataggattttacgttctgcaaagccgctgattaaatttaattctccaacagtccgaagacatagggtggggcatggaaagggctgagttataggaacactgtgctacagaagtgaaaatgttgcccctaaattcttgggtttgtgaagtatttagaagtatcagagttagaaatattacatgccaaatgtgtttctatctccttcaatctccttcatttaaaatgtgcatgaatgttaatgctttggagatagacaactaatgtactcattaattatgctttttgttgactttagttctggaaactaattatttggggtcttttaaagactttcttccttgatcagaggtgttatggcgtaaaagtatggaatgaactggaacccctactgtgaagtaagacttgtgaaatttgaacatacttaagaaatacacccagattgcatttatcaagcactgttgattaaggcataacctcttccttaacatagctttggtgatggaagtgtacatagaaacacagtagattaatatgctaatagttcctatggacatgtggtctttatctttgcccctttctttcatttcttaagtttttctttaaagtgaatgatggaggaaggcagcaagtggcttaaagtacagcttataattataagcacttaacctaaatatattaagatcataatattctaaaggcataagagatgagatggtgaatatttgtatgttttggaaggttaataaattgtgtgcatgtgttttaagrtagtttaaatatttggtcctagcaaaccattgatcatactagactgattcaggacgatcagatcttctatattggttgaatactaattagttgagtcagatgactaaattgcttgtgttttcctattgagcttattacttggagataaccggtgaaataaacacgttactttgccatttcatatcatttgcatacatatttgtactagatgtttttaaagagaaatgatggccttttctctgtgctcttgatgcagatgttacctcactaactagttgttcttgtgctcctctaaaaaactggatctaggattgattatcttagtaacttcagcagaaatgcaattaatcatcataacaaatgagaagagtctaactgttgattcagcataactattgtttccttctactacatccttcatccttcccattcactgccataagttggcagacggatacagaatgcttagcaggtgggggaggggtggggcatatggagtgaagggtctttatgtattagtattagagtgatcttttgattattttcctcactataaggaaattatttcctcaggatgagctgccataacattccactgtctgatggcaattttaaagcctgaaattgaagcccatggctaggctatgagaaccctagttcgtatagtaaagttgatatcttctggatgtatactaattttaggctttattttaaaactgctggaaactgaaacttagacaaaagtattttcaggacatcatttacaatgtttagccctaaagagtcaagctgtgggattctgagtctttcatatgttacagcagaaacttaaaagcaagaggaaattggctgggcacagtggctctgtaatcccagcactttgggaggctgaggtgggtggatcatgaggtcaagagattgagaccatcctagccaacatggtgaaaccccatctctactaaaaatacaaaaattagctgggcgtggtggcacacgcctgtaatcccagctagtcaggaggctgaggcaggagaatatcttgaacttgggaggcagaggttgcagtgagccaagattacatcactgcactccagcctggtgacagagcgagactccgactcaaaaaaaaaaaaaaaaaaaaaaaaaagcaaaaggaaatttagaaaggaaaagaacatcaccataaaactttgtctctttttcccattcatcccatgcaacatggtgctgtggaagatattgatgagtaagcctcttccaacaccctytgaggacagccatcaaatctgcaaacatatattaggtcacaaaattatttttatttttgcccatggtagaaatttgaatttctactctattttgcagaagtatacattgacacccctctttttgctctgaaagtaataaatgtttgtggtaccatcagcttgttaaattctttgcttataggacagaaactggtatccagtagacaccgagcgtttctcagggaaggatgtagtcctaagacatttttttactgccagttactagcaaccctgtatttgaaactttcagaaaaagttatcaagattggatgtgcatgttacctaatgtgtgttgtgttatatgcccagggcagtttagttctagagcagttccctagacagtagtatccagttcattttttatgtttttctgtgtaagataatgttttgcatttaatttatttttatttcacttgattttctaaagtggcttcttaaaaagcttaagtctaactatacctgttgagatacaaattctgagagttggctttttttttcatccataaaatatggcacagtgggtaaggaaaaataaattgagattgtttacaagtatatgccacgccctatgtttaatatgttttatatatatatatatatatatatatatatatatatatatatatattttttttttttttttttttttttttagacagagtctggctctgttacccaggctggagtgcagtgccacgatctcggctcactgcaagctccgcctcccgggtttacgccattctcctgcctcagcctcccgagtagctgggactacaggcgcccgccaccacgcctggctaatatttttttgtatctttagtagagacggggtttcaccgtgttagccaggatggtcttgatctcctgacctcgtgatccgccggcctcggcctccccaagtgctgggattacaggcgtgagccaccgcgcccaggctgttatatgttttttttaatctccataaaactcctttgaggaaagtataatgcccattttaaagatgaaaaaattggtattctaagaatctaaggaggccgagtctgaaatcctttatttttttctaggctatgttatggtacatatattgtccataggatttctctcacttttatttccccacagtagtatggcacttttatttcaattgatagtttcaaagcactttttttattttttattttttattttttttgagacggagcctcgctctgtcaccaggctggaatgcagtggctcaatgttggcttactgcaacctccacctcccaggttcaagtgattcccctgcctcagcctcccgagtaactgggactacaggcgcccgccatcatgcccggctaatttttttgtattttagtagagacgggggtttcaccgtgttggccaggatggtctcatctcctgacctcgtgatccgtccgcttcggcctcccaaagtgctgggattacaggcacgagtcatcacacccggccgcatgtttcttttgaagcttacaagttgatcaattactaaaacaaggtcagtattcaaccagaggagaaaaacctatatccaaaatttttaggcacttaagcatatataactaattgaaactgtccaaataaattttataatgaagtggtcaattattcatggaaaaaaaatagctgttattaccggttgtgaaatacctgagtttatgtctcaaacttttgcttttgttccataggccttgttttttccttttttaaaatgtgtactacgtggttccctcaacctgctcattcattcagcctctgccttttgaaatgcttctgtcttcattgtgacatagtttgcaaagggagttacagatgtcttgtagagggagctgaggcttytaaaatgttgctaccctttataattaagttcactttccttgttgataagtaggatttatttacaaaggacataatttttaaattgagatataatttatatgtaacaaactggtcaaatcttaactgttctgttccatgagtttgacaattgcgtatgcccatgtcactttcataaggcaagatatagaccatttccatttttctagaaagttcccttctttctccagccaattaccaccccatacaacctgaggcaaacactttcctacagatctgttttgtttgctgttgaaatttatatgaatgaaatcttatagttttgcactgttacatctagtatcttttcttcaacgtgtttttagattaattaatttcctgcatgaatcattagcccattcctttttattgcagtctgttgtagtgatatatcacaatttgttcatttactttcttattgatggacatttatgttgcttccggtttttgacaatgatgaataaaacatctatgaacatatgttgacaaatattggtatgaaaatgtgcttttattcttctgggtaaatactgaggagtataatttytagagtataggacagattcatgtttaagtttcctagaaactgtcaaattattttccatattgattacatgactttttactcctactcctagtaatttgagttccagtttctcctccaacacatgatattgccaaacttttccacttagctattttagtgggtatgaagtggtatctcattgtggttttaattggcattttcctgatgactaattatgttgagcacgttttcctgtgcttactggccattcatctgactctttttgaaaaaaatgaagtatctaagtcttttgcctatttattaaaaaaagggttctttttcttcttgagttctcagagttcttcatacattgtggatacaagtgcttttgttgtatataagtgttagagggtttattagtctttggcttagcctaataatttccttaataatacattttgttgacaaaattttttaattctgattaagtccagtttatcaattttttttgcattcatggttaatccctctttttaaaaatactgtagtaagaacacttaacatgagatttaacctcttaaaaaatcttaaatatacagtacagtatttttaactatagggataatgttgtatagcagctctccagaacttattcttcttgcataattgggactttatactaattaattagcaactcctcatttttccctttccccagctcctagcaatcacaaytttactctctgattctatgagtttgacaattttagatacttcctcctataattggaataatgtatgcatccttctgtgactagctcatttcactcagcataatatcttcaagtttcatccaggcacatattatgggatttcctattttttaaggctaaataatattccattttatatgccacattttctttatccactcatatactgatgaacgtttaggttgtctccacatcttggccattgtgaatagtgctgcaatgaatgttgcagtgctaatatctcttagaaatcctgctctgttattttggataaatacccaaaagtgagattgttgtatcctatggtagttctatttttaattttttgaagaaaggtctgggaaaagtctgtcaactctcggattttgttttattttggtttattaaacttggtttcctgatgagttaaacaaaaactattatttttatagttcgcttgacttctcagtgttagaatgsgggtaacagtctctagcaacttttaatattttaagcagaagcagaactattacatatcgatgttatttcttttagcattgatgctactatccatacatttgcattttcatttctgcctctttcatttccttttctctggaatttacatatcaaagtacattgcactctgctgatgctcttcacattgtttctccctttctgtcatgttcctgtcctctctgttttactattatctgcactcacacagtagttgttctctatcatctcttcaaaaactttgtttgcttttttgttttgggctctcacaacagaggaaaggataagcattgacactttccacaaggaaataatgatgtttgcatggagaaagactgactttttgatggtagaaacggaagtaagtttaattatgaatttcttaaaaaataaactttggtcatgaaactaaaaggaactagaagaaaatgtgggggaaaagttctgtcacattgatctgrgcaaagatattttggctgtgaccccaaaaaaataggcaacaaaaacaaaaataaacaaatgagattgcatcaaaggcttctacacataaaaggaagcaattaatagcatgaagagacaacccatgaattggaagtatttgcaaatcatacatctgataaggggataatatccaaaatatgtatgtaactcaaacaactcaataatgagaaaacaactcatttagaaaattggcaaaggacctgcataaacattcgtcaaaagaaaatatacaaatggccaacaggtatattaaaaaaatgctcatcatcacaaatcatcagggaaatgcaaatttaaaccataatgagatatcacctcacacttgttagaatggctattgtcaaaaagacaaaaattaagaatgtcagcaaggatataaagaaaagtgaaactttggccaggtgcggtggctgtagcctgtaatcccagcactttgggaggctgaggcgggcagatcacgaggtcaggagatcgagaccatcctggctaacacggtgaaaccctstctctactaaaaatmcaaaaaatcagccgggcgtggtgacaggagcctgtagtcccagctacttgggagactgaggcaggagaatggcatgaactcrggaggcggagcttgcagtgaactgagattgtgccccagcactctaccctgggcgacagagcgagactccgtctcaaaacaaacaaacaaacaaaaaaaaccacacaaaacagaaaagtgaacttttgaacactgttggtgggaatgtaaattggtacaatcattacagagaaaaacactatggcggtttctcaaaaaccatattatctactgccatatgatccagaaatcccacttctgggtattgttaaaggaaaaacttcagccaaattaaatttaaaggagtttaattgagcaatgaaagattcagaatcaggcagcccccagaatcgcagcagattcagagattccagtgcagccacgtggtggaaaaaggtttatagacaagaaaacggaggtggcatacagaaatcagaagtgaggtacaggaacaactggattggttacagatcggcctttgccttatttgaccacagtttgaacactcagcagtgtatgattggttgaagtatggctgctgggattggccaagactcagctattgttgcagacacatactcctaagttttcaatcttgtggttgcagttcatccacaaggacgcaaatataggacagagttcttctcaggccgtatttagtttgctttaacaattcctcctttttggtcactttctcaattttgagagattgaccaaaactttagtcattaatgtcactattaccagtgtaaacccatcggaaacagtagaccagtgagtgagttttgcaaaggtgggagcaaggacttgaatagagggtacctccttatgctgaaacatcctgtttacaggagaaaaaccaaacctggtctgttctaggatctacgtgtctccttaaagtcttagtttgattatgttatatttagcataagtgactccattttggtttggtttggtctgttgggtcctagtgcatgaactcagtccaaaacaatggcctcccataatttttttttttaatttcccctttttggtcaggttttcacttaggtgagagtgtgcaaaactcagggccttggcaccactctcagttaccatcatttggggttttcagcctcggcatgtcattcataagttaaatgtcttcagggtcttacatttctttcagctcttgtcattccagttgaaaagataccatttgacattttagagatgggtacatataaacatttaaaatatttgagagaatacagcacaccagggagattatttttacaactatcaagaggataatactaagtttggagtatcctccttacccagggtccgcataaaccaaaccacctaaaaccaaataaagaatgatgtagataaagagtctgctcgcttaattaagtggtctttttgttaattccctgcaactgaattgctataatacccaatgttttctccgtaggtcataattgtcagcagctgcccagatacttttctgtttagccaactctattatttagcataactttgacaggagaatttaaagtctgttgtgtaactatagcctttacagtagaatctgctatagagcctatcgtgagggatacatttctaatcattgcctcttttactccaaccatggaaaatagacctaacaaatgatgcccttctagaagagtgaaagcctcctggcaatgttctttttaacccatgatgtgggttaagaggagtgaaccaatgttctgtttctgactgattatgaggcaacatatgtaccattaaagtttctcacctatattgggctttcatctttatcaaagtataaggttatccatgtataaggttggctgcaaaatccttcacaaataaaagtatatgccataagtgcacataacagacccccttttcatttctattgttcatagaggcataaacaaggaaaaaatattcaaagataagagtcttaagatagtagaagtctttatccatgatcttgggaaaaactgttcacatcaaggatcccatctttttctgggaagaaattttcctggttagctttacctaaaggggttccagtgggtatacagttccaacagtgtgcagggaccattctcagttgtgagattataaaccaaggttcacagtcctgaagttttgctgtagtgtggatgtcaaagacagtctttctctgatattctcagaagatttggtctttgggttctagattgtgaagaggttgactgtcctcagtgaaccataaaaagctttctttttctgctgaaaatacactgtagcataataatttacttttataacatcagccctcttccatgggaaagcttttatacaatcagaaaacatgcgttgaaaatgacaattgaataaaatcccttcataaaatgtttaaacggcccaacaggcaaccaaatgtacctgaagctttgattgttttctcaggaatatgggttgacaaaccaaacattggttataaactatttaggaatttataagtcactataccaatatattcaatttggactcttttatcttttctatgatgaatcatggcatgcagaacttttaataayaatagctttaaggactcaagaaagataaggtggccatcctccttctccaggagtacatggttttttttgtttgtttgtttttgtttgttttgtttgttttgttttttgtttgttttgagacacagtctcacttcttggcccaggctggagtgcagtggcacgatctcggcttactgcaacctctgcttcctgggttcaagcgattctcctgcctcagactcccaagtaactgggattacacatgccggccaccacacccggctatttttttgtgtgttttttagtagarttgggtttttgccatgttggccaagctggtcatgaactcctgacctcagatgatccacccgcctcggcttcccagagtgctgggattagaggcatgagccaccatgcccagccgagtccatgtttaacactggactttgtcctcttgaataccagttgtttctgcaatttaggtgcctagcactggtaactgatgggttattataggtaatttggcttagaccatggaatttattcaaattgtatatcaaaacaattttagtattggctgattaagtatgaaaatctggcaaagtattttcttggtattcaaataaataatttttgttctacttgggttagcagttttataaaccagtcagtctggtttatattcattaaagtttcaggaattcttaccagtccaaatgatatgaatttaaagttactagaaacctgtattgaagagtgcttttcagggtcctttccattctttcatgaacctcctaaaagayaccatattctaggattttgcatgcttgtgaagttttcagaaactgcatcagcattatgcaattaactgtggaaatgactctaaatagtcgtagttaaagacacaattgacaaggcaatttggttatttctgtggtctacaataacttaacatagtaactataattatgataccatatactcagacatattggaattttagaaatcccattcaattttggaagatattgataacatacactaaaatagaacattaaacattatgttttattttgagaatgctccccatatatctaaatacgtcaaataatcctatttacctctcttttgaatgttttaggggccctctgtagcatctcaaagttataagtcagaaaagataatgttgaagctgaaatttgattttgggaagcctatcaaatatgttaaaggtttaaaacacttgatactatgaaatagaattccaggttaccataagtcattcatttagccaaaatgatgactcaaaaatttttgaaaaggccaaaacctttactcattgatagagggaagactccgctttccaaactcttgcctttcccttctttttctgatagtttattcaaagggaaacaaaaacatttttattatcttctaatattacatgaaaatcttgttcaagagaaaaagccaaatttcacccttgcattagtctactatttaatgttatccccaatttttaataaaaccttatagataaaatgtatctatcttaatcagtttgaccgtatggtgagattctcataaacattttataattctttataattcctgtgaaagagcagatcagtgctctaagaaaggtctgttttgtttttattccaatgttcaatttacagaaaaacttaatacccctttaactttagccagtgtccacacaggatttctttttacaagattaatttttacaaacctttcacaacttgttcaaacttttagtgttatcttttctaatttaaaacaatcctttcatcctctaggcaaaaatttacatccctatgcctttttataatcttttaccaaaaacacatttcactctcctcagacatcttgcatgtaaaactatgttttcagtagtctcaattacatgttatcatggtaactcttagcaaattttaatcttggtaaaaaatctcataagttattttaattatgtactaggtgcaggtgaggtctgactctttccagtatagtttgggatgtggctctccacatgtccccatgccttatctagactctaaggctccaaagtaagtaaattgaataatcttcaaaagccaaacatgcagtttatgatcttaaagcattcaacaaacctaatatctgatctgcttaatttagaccaaatggctttatttttactaacaatcttaaaaacttatttcccaaagattaaaagtcacgtaaactaaaaggcattacagtttttatttttctttcaaaatatttgatctaagtgcttatttttctttaagccaattaattagagctcttttacggaaacattatacacatgacacatatataactacactgaaagaagaagatccagtagttgtaagatttttcatttaccagtttctaagtttctttttttttttttttttctgagatggagtcttgctctgtcacacaggctggagtgcagtggggcaatcttgtcttactgcaatctccacctcccagcttcaagcaattctcctgcctcagactcccaagtagatgggattataggcacctgccactgtgcccagctaatttttgtgtttatagtagagacagggtttcaccatgttgaccaggctggtctcgaaatcctgaccttgtgtccacctgcattagcctcccaaagtcctgggataacaggtgagagctacctcactgggcctctaagtttcttaattggatactggctttagggtggagtccttggaaacacaggcttaggaaaatatgcagtttctacagcctaatataaggcacagctgaaaggcaaaatagatctgcaaaattgagggcctcatttttacattgtatcctggatccccaaaaggagaagatagtgcaattcttttactgtgcattttattgcatggcagcccaaagccaatcagccyattttttaattagcccatccctaaaagtatattttctacctatttattgtacactaaattaaagctctctcaaaatgcaaagcaatctctaataccttcccaagtcaaaaacatcagataactcaatacaaaacagaacagagccttagactctgagtgggatctattcattttcaattcctagggttccatgaggaaaacaggtttttcccaaaatgggttctgtggctcctmctctgttttttctaaggagacccgggctactagaagttatcttagggcctctcatgtgtgcattaagagtggcaagacaaatagagaaaaataatttagtcaactgagaaggaaaaaaaaaaaccctttttccagaaaaataagatcyaagaagagaagaacataggccttttaaatatacctatcacttggatagccacttctaattaagctgacttttaaccatagcactcctttaaaaatgctcttaaatttattgcctggctttagccatgccgagtggccaatattcctggattttaaactcacaggtgaaacctgcaagcctcaactaaggttataacttaaccacaagtatacaagatatcttcaaagtggtggtaagcagtttttataaaatctagaatctttagaggtagctcagaggaaggaagatttaagaagagaacttggaagttgtttgtggaaggggaagagaatcagcaaataataaaggtcgcacagacattaaccagatagttttcattccctaagccaggattgaacctgggctgctgtggtaagagcacagaccaagagaaagyactgccacgtggttacaatgtcatgctcccaaggacatgactgaccagtttgctgggccatcttgaacagcgggcttatggggacctaggctcacattctatcctaaggtacccctctktatgatagaacaatacagaaagacacacaaagcacaccagattcactacagctcaacattagcctcatgaatcctttttcccattaatyaaaacttaacagaggatataaaccatgatttttaccattcatccaaccgatttgcacagagagaggctagaagtgtgactgataagaacttttacccttttgttggcatatcaggtatctgggttcccttccctgagtggccctagtgacctaaccctgcttgccacactatataaccttggaggccaaacgcaacacaaaagaaaatctttttttctttytttttttttttttttaaatgcacttcagtgcattgttgttcatttggaatgttccactgtaagttatctttagcaagattttaccctttctgtaagactttgctgcctcctgggcctaatgtataygccagaargaaatgagatttttagaaattaaggaccccatttttatctaaaatattagctttttctcaggttcccttgatgacttagccaatgacatttcctacctaagcatgcaagaaaaatgaaacaaaggggtagagcacaaaaatccccacgaatttttaatggacaaatttttacaaccactgcaatattaccatttactaccagtttctttctgacccagtgggatgtaagaggcctctaactggatctaagccagttaattaccggatcaaatcacatcctggacccagtccactttctgtcacaactgtcaaacccagtttggaacaaaaatttgctcaaagaaactcagagagctcaaaacacaaacccgtagagctctgaaatccgagagagaacttacccacgatccccagctgctctgagagatcaatggatacaagtgggtccagaaggtatcttgcttgttcactcagtgctcctgggggtcgttagaaggtctacttcrgacctcacttctgacacaatctattaaaagaaaaacttaagccgaattaaatttaaaggagtttaattgagcaaggaatgatttacgattcgggcagcacccagaatcacagtagatttagagagatgccagtggagccacatagtggaaaaagatttatcgacataaaaagggacgtggcatacagatatcagaagtgaggtacggaaacagctgtattagttacagctcggcatttgccttatttgaacgtggtttgaacactcagcagtgttcaagtggttgaagtattgctgctgggattggccaagactcagctgttgttacaggtgcatactcctaagttaggttttcagtcttgtctacctattaagttaggttgcagttcatccataaggactcaaatatagaagcatggagtccttttcaggccctatttagttttctttaataatatatgtacaaagaaattgaaatcagtatattgaagaagtatctgtactcccatgctcattgtagcattatcmcaatagattattcmcaatagctaagatatggtagcaacctaagagttcatcaatggatgaatgaataaagtaaatgtggtatatgtacacaatggaatactattcatctctaaaaaataaaattctgtcatctgtgacaacaaggatgaacctggaagacattatgttaaataaggcaggcacagaaagacacatctgcatggtctcacttacacgcagaattttaaaaagttgaactcatagaaatagagaagaagatagtgtttttcagacactggaggaagaaagtgcagagaaggggagatgctgatcaaagagataagctttagtgatctgttgcacagaatggtgactataattagtaataatgtatggtatatttcaaaattgctaaaagagaagattttaaatattctcaccacaaaaaagtaacaactatgtgagaagattatttaattatcatgatttaattattccacaatgtgaacatatatcaaaacatcacatagtatatagttgtcaattaacagtaaaattttaaaataacataatttattttcaaaagtcaataaataaaaaaatacacaagtaaaatcccttggctgtgggagaatggatgcttgactgagaggtatttcattgttattttatgaaggcaaacagaattgtaattttagtactttcacacttacatgtctacaaatgtgtaaattacagaaaaattgcttaatgtagcttaaaatgacaatatccaggattagttttctcttttccaattaaatataatcgttcggtaagaccatttcctattctgtattcagaggtgaacaagttgttataactaatcactaggtacagaagcatactctaccctgtttttctgtaatggaatgctggcctaagttcatactgagctctacctccactgaacattcaagagtggttttttttttttaaggttcagtatcactgatcattagagaatacaaatcaaaatcacgatgagataccatctcacaccagtcagaatggctataattgaaaagtcaaaaacaacagatgctggcaatgttgcagagaaaaaagaacgcttatacactgttagtgggagtgtaaattagttcaaccgctgtggaggacagtgtagtgattcctcaagatctaaagacagaaataccatttgagccaacaatcctgttactgtgtatttacccaaagaaatataaattgttctatcataaggatgcatgcatgcatgtgttcattgcagcactattcacaatagcaaagacatggaatcaacytaaatgcccatcaaccatagactggataaagaaaatgaggtacatatgcatcatggaatattatgcagccatgcagccataaaaaagaatgagatcatgtcctttgcaggaactcgtatgtagttggaggccatgatccttagtaaactaacacaggaacagaaaaccaaataccacatggttgagggtgggaggagggagaggatcagaaaaaataactattgggtactaggcttaatacctgggtgacaaagtaatctgcacaacaaacccccatgacacgagtttaactaaaacctgcacatgtatcccctgaacttaaaagttaaataaaataaaaataaattaaagggcattataatcaagagatatacagtcatgcgctgcataatgatgttttgatcaatgatggactgcatatgcaatggtgattccataagatcaatggtgatcctataagactctagtactgtargtgtactgtatcttttctgtgtttagatatgtttagatatacaaatacttaccattgtgttacaattgcctgcagtattcagtacagtcacatgctgtacaggtttgcagccaaggggcaataggttatttcataaagcctaagtatgtagtaggcaatactatctaggtttgtgtaggtacactctacaaagttcacacaatgacaaaatctcctaatgacgcatttctcagagtctatccccatcattatgcaatgcatgactgtaattcattggaatgtaatttagtgaagttgttactaactaattgagttaatacctgttttttctaaggtatttcttttgtcttaacccacaygtactggaattcttgaacatttttagaagctatgtcagattggaaacttactgatcacacttttcttcccaagatagctaactcatccagaatttgagtataagtggatcttgaggtcctcagagctgagacaacttgagacaacttgctcagwcacctgttcaaatgtctgcaggatggttggccaagtgcaagacatcacatgagcttcttgacagctgcacgatggtaacttaatgagacacaacagttttcttgtgaaatagctggacatgcagagaggtcacatgaataataagctcacacctgtgttcccgccacccggatattattcaaagcamaaaacwtcataaataaagtcaaggtcctctatatcccccttctcaatctcctctcctttccctcctgcctgtgcaaccactgttgtgaatattaatgattatccttgaagcttatatttctgaactattactacacatgtccaaaaacaatagatttttttttctggtaaaaatatgacttttttttctcttatcagtgtttgaatagtgagcagtttcatttttaagcatcatgggatactattgagaggagtggttgagttaagttgcaaggcagatctactttgagcctattgtgtccacagattggaattttgacatgtccacataactctgttttgatgggtgtctgctcagaagatgttaggaagctcatgataaggaagtagaaatttaggcagttaggtttkacccacaacctcatagcctaggtggtaagcagttattctttcaagcaccttttatgggtattgtaatagaaatatttgaaacactggtacataagcagtatgactgtgactatattgggaaaaaaagaaagcttccaaagtatattttatgaggactaggtaggtttaatactaaaacctgatgaatgtttttttaacagctataagtaaatttcaattaaaagcataggtgcaaagattataaatgtaacagtgttcagtaggattaatctatgaaaaaaattatactcggaccaagtaatgtttaattcaggaaagcaaaagtggcttaatatcagtacatctatcaacacaatccattttgttaataactaaaggagaaaactcattgctaagaggcatttaataaatctcatggccacacttactagaaaaagagaaatataagactatagtaaaaataagtccttaaaaggtaatataaatattctaaacaattaaatgcttaaattatttctgctagacactaagttaaccactatcatcattattattcaatattttctcggactctgtaggaaagacgatgagaaaattatttaaaatttgggaggagtacacaaaattatttctgttactatgattgaaatatctagacagcccaagacaccttggtaaataaagacctaatgtgttcatttaataagtttgttggttacaggtaaatgtatttgtaaatcaatgacctaattttttatatataaatataaatatatatataaatatatataatatataaatgtatatatttatagtatatatataatatataaatatatatatttatagtatatatataatatataatatataaacataaatgtaaatatatatatatatgtatatgtgtatgtatgttttttgttttttttgaaacggagtctcactgtcatccaggctggagtgcaatggcaccacctcagctcactgcaacatccacctcctcggttcaagtgattctcctgcctcagcctcctgagtagctgggactacaggcacctgccaccatgcccagctagttgttgtattttcagtagagataggatttcaccatgttggccaggctgttcatgaactcctgatctcaggtgatccacccgccttggcctcccaaagtattgggattacaggcgtaaaccactgcgccaagctgaaaaatataaaatattattgaacaatatacaataagatctttacagatgggaatacatttctgttgaaagaaaagtacaaatagaaactgtcccaaattcaatgcataaatttaacataattttaaataaaatctcaaaagtattttttatggagaggaatgttgggaattagatacgtttttttctttaaaattrtgggtaaatatcaatatccaagaatagccaaggaattttaaaaataatagtaagacttacctgatcaggcattgaaacataacataaaactacaatcaaatttgcatagtttttttaattgtaatagacaaaaagaagagtgaggaaaaatattgaatcctgaagcagactgcaagattcatgataattaactatgattttgatggttttagttaataggtaaagaacgggttatttwagaaaaaaagtgcaggtaaaatgactatccttctagaagaaaataatattacagtttattatattctatgtgtaaaaatgaacttcatttggattatttaagtgtagaaaattaaactacactacaacttctgcaagttaatctgaaagactatttgtacaatctagaggcaaggagtagggaaagttttyttaagaagtccagaaaagacatatatggtaatttatgactgtatcgtaatctaaacattttatatgtatggcataaataagatgaaaattagatatgaaaaattatttgcaattcagaggctagtgggttaatctctataatatatagagagttcggatttcagaaaggtcaaaaatggagcaaaggatttgaggaagctctcttcagtaaaacaaatccaaatcagtaaaataaaaacaagaaacatgaaaaaatgctttgtcttttattagaaacacaaaattaaaatagcaatgtgattatcaatattcacttataagactggcaagaattttaaaaaccattgctggcaggatgtgagaaaaagcgtactctcatacattgctgattgaatgtaaatttttgcatcctttaaaaaaatctgccagcaattattcaaatgaaaataagtgtacattttgatccagcaatgttactcttaattttgaacctcatagaaacaaaacaccaggacttaaagatatatggaaaatcgtggttgagtattgcttataatggtgaaaaattagaaagaatgaaggcttatcagtaggggaatgtgtgaataaattctgatgcatccacatgaggtgatataatgaagccttacaaaaaagaaggatgtaataaattggagctctaaaagcagacttcgaagaaccacaaaatattgcatgattgggaaaagcaggatgtttcagaaatagtatttaacataattccactttaaaaaaactaataatgaaaaatgtatttaggtatgtttatttttgtttacatttacatgatatatattatatgtgactattatgagtatgcagaaaaatatgggaggatacatacagtagatgaaataaggagaagtagatgaggaggtgagggaaaaataaagaaaatatgaaataatagcataataaaacacttatgttaatagcctttctgaaagattttattatttctaataaaataaatatcatttaaaaagaagagtgccattcccattacttctacacaaaatacattgtcctgagagaagtgtctcttttgcatcttgaagattcaatacatcaggattgccacagtttcctatgggagggaccgttttgagcaagtgatagcctggagaaatactgatgggtgtgagacagggctgtcagtgcctagggataagtgaggggcctgctcaacgtctgtagagaatgaagcagcagctgaaaatattaccaaggtgggtcggagcagaagaggaagaaagtgacagccatttgcaatacttgatgaagccccagggaactccttgaaataactaggggaaactttaaagggaatgcgaagatctgcaacagcatgtaggagcatgatcctttgctatgttttagtcagtaaacaggataagtaattcatgtttcacagtggatctaggagcacttatctttctcctgctaacgccagtcaagtgatctgataactgaccactgggatttgtgagtgaaactgggaccctgaacttagagtttatttctgcctcaagttatttccctggactctgagatatttacttcattcttacgactttcaagtactctgcagttgtcaccatttgcctagtggcttaggcctccagcacctggctggccagctctacctggtcttgcctacacagtagcattcctggcacagctgtgagtacaggtggatgcatatgaaccctcaatctgatggttgtgatcccttacacagtgcctgacgtggacactgaggacacatgtcttgcatggcttcccattactgcttggctttgccaagctgatatgtgatatattgccaaaatatttcttctgactagaaaagagcagaaactakttatttataagtaatataaaatgttagtctgctttggctaggaatagcttttaattactgtaaggttttataggctgcacagcaggaacaaaaggacgttttaaagaaacacaggctttccttggagtcatgtgaatggaatgataattgcaactaggttggggttggtatttaaactcatgtgaaaattatttttaagcttactgaaaaaagttatgtgtaccaaggcagaaggtgatgtcacatgctgaaaaatgttaggggacatctgtttccacatcacaaagaatttcttcttatattgccatgagcctgattccttcagtttcgtggcattaagtaaagctctctttgaagatgtgctcattgagaatggagctaaatgctgaggttgcagctgctcactataccatgtcctaaggaattcatagtgtgaattcacaaggatattggtctttcttacaaacttgggtaatgatgatagagacagcagcttttggaaagccctagatagagttgtataggaagatatggggcctatagtgatatttaaattttatgtaatgtactgatttttaaaaaattgccattttgggttttttgaaaagggcactgatagttatatcggcattttggaatatgaggaagcagcttcctaagaaaatattaattggataggatttaagaataacaagagctaactcaccacaacccgcaccccctaccccactcagggagtttgaaacatatgttagcaactactacatttgcttttcatttttgaatttaagttgaggcatagtgaaatgtgcatagctgcttgttgtggcttcatagcaacaagggtagtgggacctcatgttggaaactctggacatgtggttgtgtattcacacatacacagtgttttaattataagcatgtgcattgagtgatattcacaaaattgtatgtatatgtacattaagtaaggctttaaactttaaatcctaggctcaagttcatttgtagctgagaaaagccaaaatagtcctagggcaatgttaatattcagagacatattctcctctctaaggagagaatcttttcaattaatgtaggcttaaagacaggaacatgtctttcagattctgttttattgccttcccattctgccttccctagcatacatgtggaataaatagttgcttgcccttggcattagtttgactttgaacttgcaacctacacaagtgtctgagaaaagataataccaaactggatatgagctattacaatagactgtaagaggcacttgaaaaccccaccaatgggtgcccgagcaaggtttttaaacactgttatgggaaaatcaggctcacatagtgttggaaacagctgtacctaggggtcaaggctacaactctgtttgctcacagattccttctcaatcatgatggcacactgaaagaacataaaatttagagccaaaagttctagtctcagatcggctgcttactatgtgactttggacaagttatcttttttgagtcccagtttctccagctctaaaatggagacttcagcacctgctctgtcgactactggaaggaaaataagacacacatgtaaaagtactttggaaacaggaaatacaatagtagtgcaattatcagcattatttactacagatatttttcttcaactcagggattctttcctagtgacactgtgtatttccaagataagatttagcagtttgacggtatctgactccaaaaggttgcttatggtcacagtgtattgatcaggctggatatgttacatatgtttttgtcaggggacttgtggctgggtgcagagcttatgctggtgcaccagggttgtttgaatttgaaatctatgaagagtaatgaataagtacttattttttctgtatttattttagtatttaattactctaatactctgcattctgatagtccaacattcatttcttgagtatttttttgaaaagagagaaactgaaaaacatgattactgcatatgaatgctcatattttccatcataataatgtcattttgatacctgattctcatttctgcctacattacagatggcaatatgcctatggttgtgtcttcttgagccacacataagaaagaataaggagagaaaaacccctcttcttccagattcactttcgaaatcatacttatttgagcagcatgttaccttgtccctctttttcactcttctgactctgagtcgtcatccagtttgatatttgagacatcattcaaactgctccaaatgaaaggcttttgtaggattctttgaccttggacatggcagaaggtaaaagcagcagataaggatttttttttttttaactttcctcacaatcctactttgcttccttctaagacatttgtcagaaaaaaaagatcagcaaaatgtttcttcactagcctgaaatttacgaatttcaggaaaaattcgtgaaatggaccaatgtttaaccaggttagattgtttggagccacctaaaatttgttttaaaaattttttttttcctgtgagaaaaaaataacttaaccagttagactcttggaaacattaaagatgaaatcgaattaaggcttaagtgccattacttaaacatcaaataggagtataagtggtgttaatgcatgaaaaattaaaggaaatggtaatgtaacattatggctatacatagcacttgcagcagtgttaactcgatttgtgacattacataaaatagagaacaaataaatgatttaaaacttcattaattacaaataatttgtacagagagcaccacatttgatcctcaatagggaccttgtcgtattaccatgtggattaggcaactggaaactgaatttgagtaatttgctcaaaatcagattgaaatgtgggccagattcagagttttccaccatgaatccactgaactataggaagtttytcaggaacagtattaaggtacataactccattaataatttgagttgggtgatgatttccacttagctcattgctgatgataaccatacttggagatgtggctaagagcggccttttaaagttgaatttcttaaggagggaaagggactcackttttgaagtgtccacaggtgtctagagtaactgtgttagataacgcatcaagctcagagagtcagtggatctgaaaacacatgccaaaatgctctgatgacctttcaattgttccattttgataatgctaccttacattgctgtgtaatagctgtcatcattacaagaagtcagtatcatttggtgcctgttttaggttagctgggttatatatgtgacttcagtgtagaagaactgacatctgagaggaacaaagccatgttttcaggtcatcatgagatcttatcccaggatgctgataatatcaagatgaaaatagtcaggtgggaagaaraactatatatcttcatgctatttccactaattgaaakttcctagaaattatatttgctacactaggtttcagttgtgtcacaatttactaatttacttaaatatttcaatacttattccatataaaatgctaccatgtattaagaaactataaagaaatgacatatgcacaggcctctttatatcaatttgattttcattataataaatttgacctgcagatggatatccatgtagaaatatcaaagcaataatttggaaataagtgaatggaatgaagatacagtgacaagatttttattgtctagagacgtctgtctaatagtagcttaaataattaggctttattttttccctcacacagcaaaaagtccaggtgtgggcacttgctgttattgggtcagattcctaatgatattatcaaaggcccaggatttttctctttccactttaccatgctaatcatcttgacctttagttcacatgcttgtctctcactgcatagttgcaagataaatgcaaaagttctaaggccttatgtttgctttataagccaggaagcaaaggggaaaggagtagtacctctgattttgtcccttttattcaagaaagtacacctctcttagacttttttctctaatttcatttgccaaaattgtgtcccatggctaccaatagtagcaaggaaagctgataaagcaagtatctctacttccaaactccttagagtgggatgtgcaaaaaagctggttggaaatgacttttttattaagcaaacagccacagggtttggaataaagatttgggaggcatccttacagaagtgatctttgaaaatgactcgagaaataaacattgaaggagaaaatgatcaaagaaccttgagaaatactgacactgacatatggagaatgaaaagatcagctttcagttacaagattaagagtagtaagaaaaaaagggtgggggagggaagcaagtagtgcagtgtcctgaaaaacaaattatggaagaattttaagacaaagaggaaggttggtcagtgttgactagctccacagagctgtcaaggaagatgaaaaaaaaatggatttattgattgggaggttgctggcctttcaraaaataggtgctgaaaagagattagaatctgagagattaaggagtgagtgattagaccgtataagatgggtagcaaaaagaaggaagagaaaaggagtgtgaatgaacacacagaaaggttgtattagtttagggtgtttaagtgagggttccagaacggagagctggagatctcttggtaattgttcctacctttactagaagtcactgcttttattttttaagtttagattataaaatttcttctacagtattatatacattacagttccttccttggatcaatttaccaaatgagaaataataaaatgcctctcttagacctacctcattgaataaaaaacggaattgataattatttttcatgacatatttggagattctggttgggagtaaattgtgttatatgaagatcaccagtaatgtgacttccttaagaagcatgaagaaattagtgttgtctagtcatttcttaacattaataacaatatcaataaaaagatgattttgatgagcttgacaaaactgaaggatccaaagtaaatgtaatttaaaaactcatgtagaataatgaaagaatatatccgaagttacattcaatagtggcatatatgctgtttcccataccatctcaaaaatttgcaatatggaaagctctctcccacttctccccttctaaaaaatcttctctattctacatcttccaaaatgtttacctatctgggtaagctttgctgagaaatctagatgactgaaagaaaagttataagaaaaaaattatagcatacaaaatgcatctttgcttagaacaatggcctctatgtggttaagaatgtgaactgtggctcacctgaatcagggtttatatccagacttcaacacaattaattctgtaatcatgggccagttacttaagcactgagagccttactttacttatcaataaaatggggaataataagcgtgtgtattacgtagggtggttgtaaggacaaaatgagataattgttgtcccattttatctacaaacrtgttcaaacacaccctaaactaaaacaatctttctgcatgttcattcacactccttttctcttccttttttttgccacctgttttatatggtctaattactgactccttaagcttctggtagagtgcctgtcataccgtggctgctcaatgcacgacagtttatattgctgctgttcttaatattattacatgatttttatttatattccagtactataattaactttggaaaagttgctttttgtttgtttgctttaacaataaccacaggaaagctctcaactgggaatatagccaaagataatatttcctaaatgactctttatttatattaaaatgttctatatttatattttaaatatgtacttgtcttcatccttaccacaggaacaaactcttagtaacactgctctgtatcagacacatttctctaggccttacatatttgctcatttaatcttcacaagagtactaagacatagatactattagtgtcattcccattttctagatgaggaaattgaggcacagagaggtgaagcagctttcccaaagtcacaaatctatgaagtagaactggatttgaaccaggccatttagcttcggagtctgtgctcttcttaatcatcatactctaagatgactagaaatgacatagtaaatattatttattgttcagatacctattatattttgcaaggagtgtttttaattatatattttaagtctcaaagggagcaattccaacaatttcacgaaaacacacttttctctcaatacttgagatttataatcttaggttgtcagaaccttaaaaggtcaaatgttgttactctattcatctcaaacactttctgctttatgaaagggcaccaatctattcaataaagatgcaaaaatagaatttatgacacatacaggacttggctcttcaatcagagctctttccactatgctgcataatatggagttggattttcaaaatagtcattgttagagcctgcagctatttgagactgatttctattctggcatagaatataaatgattcagtttaaaaccatctgtatttcaagtccagaagagaagtgcactacatgcccctgtgtgtgtatgtatgtatgtattgtgtaggcagttatagaaggtaggtcattggttcaaggcctagattgaagtaaaatgtgcttaatcatatgaattcctatttgtgagactaggwaggcagcaggagtcagtgtagtcaagatgctttagtttgacttccagtactagaagactgagctaattactccttcctagagaggagacacttcagctgatgatggaaatggaaaggatgccgtcaatcttactttttgcacttgagaatgtgtgaaactgctctgtcagaggcacacatttctaccagctgtcagaagtcgtactggaaatgaaataagaccttgggaagagagatgtgcccatcattgaaatgcttcccaaccctctctgtcttttccattgtagaacccaatgcatatgatattttctgcttttatttttaccttcctctatgcatataatgattgtacttatttatggggtacatgtgatattttgatacaggcatagaatgtgtaatgatcaaatcaaggtatttacaatattcatcacctcaaacattcatcatttctttgtgtggggagcatttcaaatctctcctagctactttgaaataaacagtaaatgattgttaactattgtgctgttgaacactataactaattccttctatgtaactgcatgtgtgtatctataaaccatctccccttcccagactctggtaaccattattctactctctacctccatgagatctatattttatcacccatataggagtgagaacacatgatatttgtctttcttgcctggcttatttcatttaacgtaatgacctccagttccatccatgtttcagcaaatgaaaggattttattattgttaatagatgaatagtattttattgtgtatatacaccacattttctttatccattcatccactaatgaacacttacattggtttcattattttggctgtgaatagtgctgtgataaacacgtggatgcaggtatccctttgatatactgattttctttcgttttgataaatactaacagtagtggactgctggtatggtacttctatttttagtttttttttttttgagagacttccatgccgttttccataatggctgtactaatttatattcccaccatagtgtataagagctccctttcctcacatatttgccagcatttgttattttttgtatttttgatcatatccattctcactggggtgagatgatatctcattgtggttttgatttgcatttctctaataattagggatgttgagcattttttcatatacctgtttcaatttgtcttcttttgagaaatgtctactcagatcctttgcccactttttaataaaattcttttctgttttttgtttgttttgctattgagttgtttgagctccttatatattctggatattagtcccttgtcagataaacagtttgcaaatattttcttccgttctacaggttgcctctttaatctgtttattatttcctttgctatgcaaaaacattctaggttaatatagtcccctttgtctaattttctttctgctgcctgtgcttttgaagtgttagccataaaatcttttcctagaccaatgtccagaagtgtttcccctgtgttttcttctaatagtttcatagtttcgagtcatatgattaagtttgtaatctactttgagttgatttatgtatatggtgagagattggggtctagtttcattcttctgcatttggatatctgggtctcccagcactatttattgaaaagggtgtcctttcccctagtgtacatttttggtacctttgttgaaagttaattggctgtgaatttgtttctgggctctctcttctgttccattggtctatgtgtcttttataccaataccatgctgttttggttgctataactttgtagtatattttgaagtcaggtagtgtggtgccttcagctttgttctctttggtcagtgttgcattggctatttggggtcttttgtggtttcatatgagttttaggttttatctttttctacttctatgaggaatgtcttggtattttgataggggttgcatttaatctgtagattgctttgggtaatatgattattttaacaatattgttctgatccatgagcatgggttgtttttccatttgtttgtgtcctcttccttgtttttctttgatgttttgcaattttcatcatgaaggcttttcactaccttggttaaatttattcctaggtgtttttttgttgtagctattgtaaatgggattgctttcttgatttctttttcagttagttattttgtatagaaatattactgatttttgtgtattttgtatcctgtaaatttgctgaattcatttattagttctaagattttttttggtagagtctttagtatttctatatataatatcatgtcatctacaaagatggacaatttgacttcctcttttccaatttggatgtcttttatttcttcttaatctttccatttcttcaatgcatagcattatattatgtagacataaattttgaggaatctaaagtcttaagtacttttatcaaaatgatttattttaaaggaaaatctaaagtagttttaggactccagacaatctccacagagatttattgtgcaatggttagtgtgcttcatgagagtgggtcagtattcaaaacatactgctggacactgtctctggctggtaattgactattacaaagacatttatttatatgtggatgatagacattggtgatgacttgggtttgagtatttattggctgtctgtgaccttgagcatctaacttccctatcaagttttctgttaaaggatctataaatgagagtatgcatgtacattccaatactgtttaagcaagcaatatgtttactacaattggtctacgattgatatatcagtatgttctatcacaagttccctaggcatgtgacctaatctaaggcaatgaggcactccctctactaggatttttttttttttttttttgagatggagtctcactttgtccctcaggcctggagtgcagtggcaccgtgttggctcactggaacctccgtctcctgggttcaagcaattcttctgcctcagcctcccaagtagctgggattacaggtacccaccaccacacctgttattyttttaaatatgtttttggtacagacggggtttcaccatgttggcccggccggtctcgaactcctaacctcaggtgatccacccaccttggcctcccaaagtgctgggattacaggcatgagccactgagcccagccttttttattttttttatttttttatttttwtttatttatttatttatttatttatttttttaattttcgagacagggtctcattctgtcacccaggctgaaatgcagtggtatgattacagctcactgtgaccttgacctcctgggctcaagtgatcctcctacctcagcctcccaagtagcgggggactacaggcatgccaccacgcctggctaatttttgtggagatgaggtttcatcatcatgttgcccaagctggtcttgaactccttggctcaagcattcctccctcctcaacattccaaagtgctggaattacaggcatgagttaccacactcggcctaggaattttttgtttttatcctggaaatatggggggatgaagcctctcttagaaatgaggtgaggctctcagaagttattttgatgtctcttggaaagaatctgagaatgttgccaacaaagagaacaatcaaaaccccaagagtgcagcagatctaggtgtgcccacacaagtgtaacccctggatactttaggagagctaacaaattctaatgttccctactttttcaacgtttttcttcctttcctcatttyttgaacccttcctcccagttcctcttcttcctccttctcctcctcctcctcttaccatcatgtgtagagaaatgcccaagctccttaccccaaaacactagtctcttcttgaagtgatccaggcttaactcggcaaatgtctccttttactctcccacactcacttggaatcctgtgtttcccccaagggcttgttcttcctagatgattgggcatcctatcatgtgtctgttttttgcagtcactcttttctctttcactgattgtcttcttacactcacctgcccattatttcctgtgcaactctttgggaaacattctttgattttttttttttcctattaatttaggtcatcattttctctcatcccataacagtttatacaaacatacatttcaacactgagtactgggtagtttgaacattatatttccttgcctgcctccttaactgatatgcctttgaatcacaggtagtatctgtcactgctctgtagcttcggtgtgcctcaaattatgtggtttatgaaagagatatgcacaacttttgttttgtgaatggttacatgctatttagatatcagttattatatagatgatgaaaaagacattattattaatatttaatgactgagggagtaatgatgccattgcccaaaaagttgaatattggaagaaaatgaaattattatttggttttagagacactgaatttttcattgtgatactatttttttaaaaaaatacagaattaaactcaatgtttggaactatagatacagagaagaatcatcacttgatggcaaaccatttattattataatgataactttattttactaggttagtttgaagacatataagaaaagaatctgctattttaatgtcagtagctcaggcagtggcctttattttaatgagttattttatatttgtaaattattcctattatttgatcttggagagcttacacggttgcaaaggcagcatggcttagtagaaaagttacttcaggcaacggtgagccttttggatgtttgtgtttcttaatacggagggacaggaaatacactgggtgataggcacatttgttcattcaaaagtttggcatgtaatatttccaacttcctgttttctatacccatggtttattgcctttgccccaagattaaattcataaggaaaaccagaatccttccagcccagggagcatattagaatctggccaaataaataaactgcatacaattgcatagcagaggtagatctctaaccttattctagtgtcagaactatgaacctggcrcaattctcaaactttgagtctggcatcccttgtgtgactggggaagatgtattatggatgcatgaattgcggacaatagagcataatgttgagaacacaaaccttcgtgactatcagatctagatttgagtcttggcactgagagctactaaacctgtgaccctgggcaaattcattaacattactaaagcttcagtttcctcttcgtgaaatggagacaggaatagcaccctctagacagactgatagtaaaacatattaataaagaagtatcagcccttagtagagtccatgccatactaagagttccatatgtaattgtttttattactactgtacatcatctaacaatatttgttagtaactgtgtgtgaaagctgaggtaggtaattagggggaagtctagggaattgtgtcctaaaaaagtttactgtatcatctttaacctacttcatctaacaggtaaaaagaacataacgaagtcaaattagattttctctaatgactggcaaatacacacacacacacacacacacacacacacacacayattacatgtatacatacacactatttatagcccccacccctgctgaggttctgggattggctgctttcctctcctgccacagttcctgtctggtcctgcagccctacttctggcttcagctctcagcaagtttttagtacatatggttcttccccttaacccttcccagtaggggtgagcagtactgatcacattctttgggtacattgtttggtgtttcactagcacttcttgcatcctttgaccttcctatggctctataaatggtcctttcctttaatcctcttcagctaaaccattttgagttcaccatctgtttctcttcaggccctgactgatacagcaaataggacttgcttttagccagtgaatatattggtttgttacatagcattttgctgacagagatactgamaaactttcactctttctttcttattgactatgtcttatttatttttgcatttctgggtctagagcaatccccaacacattgtatccctgtaagatgctgtaagaaaatctttgttcagttgaactcaaattcacactgaatcctcctatttttattccatcaggcaccatgcatgatgatgttaagctgcacatagattattggtgacgatttgcctacgtaaactaaaatagtcattatataatcatgtttcactttatttcttctttttaatttatgtgatttaccttagttattcttatgctaaaactcaatgcgtcttttaatttagaaatagctgcctctaataatattttattagagccatttattctttaatattttaygcaaaatttatggttgtcattttttaatgtgagaaaacacttttttttttttgtgagcaacaaggctgtttatttcacctgggtgcaggccggctgagtccgaaaaaggagtcagcaaagggkggtggattatcattagttcttataggttttgggataggcggtggagttagaagcaatgttttgcaggcagggggtggatctcacaaagtacattctgaagtgtggggakaattacaaagaaccttcttaatggtgagggagattacaaagtacattgatcagttagggtggggcagaaacaaattacaatggtggaatgtcatcagttaaggctattttcacttcttttgtggatcttcagttgcttcaggtgatctggacatacatgtgcaggtcacaggagatatgataccacccccaaaaattgttgctgccccaacactttaccaccatttcgttttgagaaaacgctttttaaaattattattgaattaaggtaattataagatcaatttgtataatcaggatggaagatcaaatcaaagttaccctgagtaagtgagggaaaaaaattggttattttgactggcatcaataatttggagaaaaaaaaattgtaaaaatttaatatttgttaaaaatagtggcatgtgatctatagtgatgctttgtagttttaagcctcactgaatcttggctgcttttgcaaggcacatgcattctaatgagctgctgtgtggagtgactaatgttgtgaatacacatcgcatttaattgatgtagccacatgtctgaaataaatgttccttgtagtgtcaagtgtaaacctctctagattcctcaatgtgcattgcccacatctgagtgtaaaagaaggaatctaaaagcttaaatactgctgaaagggctgcaaatgttcacttctttgtattccacctattacttatgagttgtttttatttcagtaaatcatttctgtggagaagcacaaayaatattcttctttcactgctaaagctcaccattccttcttcgtgatctcagttgatttttgcatctgcatttatctagattattgagaaggcttagctcagtggggatcaaacatgaaatgcttttattttttacaagcccttgctctcctattgtttatgtcaaattcctcctcccagctgactaggagatctcttaacaagatcctaggcatattccattactttcaaggcatttttcattactcaaattctgcccagttgaaaactctaatttcatgtcttttataaaactttcctttccaatgccgtggatcagacttggggtcccttgatccatggggaagttgtatgactttttgtctactcctcctattcttacctcacttgggagcmtagggtaggactggttggctgacctttaaatatgttctttctctccattttcttgtgtggcgaggtggggagaaagaaaagggaaaaggtacagttagttgtcccttgcatgactggtgctgttgtaattttctttgttgattgctgctgcctcccgggctcactagttgcatagctgattctctcttggggagcacacatgagtttgttggagggctctgttgggggactttccttctgcagtctcctgaatctgatcctgttggcacacatggattgtgtgcctcttactacttgaggctcctcgcctggtgagtagtccttttctgtgggatccatccatctttcttccaagatgcccacttaactttgagaaccaagtactggaagtacaagttgcaatactgaaatcaccttcctttgtcttttgtctttttaaaatttgctttcccttggcttagatggacacagggaagataaaaamtaccctgcacaaatggaaatcactgaaatgctagaaccccaatatctattagggattctcttagatccctcttaattagcgtgttagacaaagggtaggttttacttttcgtgaggccaagagtctattgcaagtgtctatggcttttgatgacctcttcaaagtcttctttctcatttttttttaaataaacaagtaaggaaagtcaggaggctagaatgacattaattctacttcagctgtcttagaaagctctgaagatgagggaccctattgtttgcagttctctttagaatatggggtacttttattctttctgttcttagcattacacattaatcaccattttgaagcaaaaggagaagtcctattgaagattttgttgctgttttctcatattcccaagcacagaaataccagagagagatgttagaaaggaaaataatgaagtaacaaagctatattgcttttctagaatcttcccaccctcactctcccatcttctgctacctctactcacaaaattctgtttcccaaatcgatggaacaagcccaaggatgggagcagctggcatgaattccagtctgattgctgtgtgagctcagcagcacactgtgacttcaccctttctccactcagatcatccatcttgaggaatgcagatgaacctaccttcccctacttatctttcatggatgttggaagacaaatgagataatatctgaaaacctttggaagaaatgtgatgtataaatctagggcaacattatatatgagacaccaccttaatcattcttttacctgctataagaggagatgactttgtgctcttctaaatgtaaaagaaggatcactggactcaatgagttttgaaattttggttctgcttggctttgggcatctatttctttagacaagtgacattatctctttacaaatacttccatatctaaaaaatgtgcagcaaaataacatttactcctcagaagcatgtgaggctcaagtaacacaagtggtaagagaagtctttaaggcctaacacattaaggaatgtatctgagcatacatatatataaatatatacacatgtaacaataatatagctctatataattataatatatccttatactttttggcatgtgtatacacacacacatatatatatatatttgtttatatgcccctttttgtgttaattgcatggcataactggaggagtagcccttgaaatttttaaaattgatatttataaatgaaataggctattcattgcaatttttaaataatttgaaaacttgtcatgtatgcacacatatgtgcgtatgtgtttaatcagactctcacaagtaactaaaacttgattcttagctctaactctgtaccttccctctactgatggttcttgagctaaatggcgccaaaggcatttagagaataaaagtacagggagatcacagactgcattcagagataaattacttttacccctccacattatttttgttgctgttattttaaatgtttgatttagggggtacatgtgcaggtgtcttacaaggatatattgcatgaggctgagatttgggcttccattgattccgtcacccaaatagtgaacgtactaaccaataggaagtttttcagcccttgcccttctccctccttccttccgtttggaaaactcaatgtccattgctcccatctttatgtctgtgtatacccaatgcttagcacccacttatgagtgagaacatgtgatatttggttttctggtcctgcatcaattctcttgggataatggcctccaactgcatccatgttgctgcagaggacatgatttcatttttttatggctgtgtaatattccaaggacccttcacacatcttgtaggctgcactttcttcatttctctcctgtttcacatttctattaaacagccaatcatctaagttcttacccttataactaattattatactttttatctttattgattcccaatttggacataaataatttttaatagtattaactgccctagcccaccctccctgaaaattttgatagaatttatgtaagataccatatccttttccttttctctctttctcttttctcttcacagtgtgttttgttaaatctgccttgttaaagcacacttacctttattccaaactgagtcataatccaaactgagtgcctcaaggtaaggggttaaagaagtgaacaaaagacatgatatatttgtttgcacctactccctgttcttcacacacaacctgaatttttgggggatgccttctgagtttctccagctgagctgagttggctcccacccacgcaccctcatgagagttttattgtcaacttagacattaattctcccataatctcttcccagcatcccagttcatagggatctctctctctcctctaaacttctctaacatctgtgtcatacttatgacacctgtcatacattacggttgtttgtgttcatgttttacttttgcactagaatgtgtccytcttactggaactagccatgtcatatttactgttatatctcctacartgtgaagagtgattgtttaagcaaaataaatgtgtggcaaatgtttgctgacataatagatttattatttataatgtttgataattacttataaaattaattattttcattcttttgtctactatcatatatataatattgtgataataaaaggtgacaatatccacctataaataaggtagaaatggtcattacagaccttgcagagggatcagacactaacaaaccaataaatacatgatataattacaaattttaatcaatgttatgaagaaacaggatttcatgagagaaattaacaataaasaacctaattttatataggataattagagaaagcctctttaagcaataatattcaagtggaaacttgaaagaaggcccttagcatatatattcacttacacatcattggctgaaatctgatagctaaatctaactacaaggaaaactgggataattgccaatcctaacaaaatttggattattacaagtaaggaagaagtggcgaatcgacataaagtagggaaatagcagtgcctctcccacctaccagtactattccaggcccttttcacagattaggctagtttcagatattagttttcaaagattagggatataagtagggccacttcataaagggttttgaagatattctaatttaattttatctaacttaggaatctactgagtggatttaagtagagaagaaacataaacctatttgtacttctaaatgatcacagtagccatgaagtgcaatatagtttaaatggggatggaagaaaacagaacagatgatggtgggtggactggtgtattggcagtggaatggagaaaaggggttggatttagatatacctagaagggaaaatcaaatggacttagtgaacaataggataaagtagctgaagtaaagagaaagcatcaaggatgacactcaaagagcaaacaatagcacatgcacacaaacaatacaaaataacatgtatatagatatgtatatataaatatttgcccttggtgaaattcagctcttacaacaaaagtactgatamagattttgagtcactttggtaggtttctgtattcgtatgacaattagaatctactttttccacctaacatgttataaatgataatcactatttttgtgaattgacataattaaatggcattccatcattgtagtcaccataaccatcatcktgactattatgtaaaagtatggttttctttcctgcagtgtatagctctctgacctggatcctgtgggatttgcagaattaatatagatattacactctccctgaaatgacccaaattcttcacagcctagagagggattttagcactaattattttcagtgtattagtaactacacttgtctttgtaaaatgaagtagtcgttggaaataaaaacgtgtgatatgtacgttcagggtaacctrtgaatttcccaggtctcaactgtgtttgcttctgcaatgatgattttgaaccaccttgactgttaacatctttctatgcagcacaaaacccagatagttttaggtaaccaccctcttctctggaacaaaacaaagtactaaataatgttaaaagtcttaagtgagcaagttttgtaatttgaccctggttttatatctgccagattggctactcatttacccttatagatagcagtctctgaaatggttcatcataattactggttgtgtgtgtattatatttatatgaacattagaatcagaaatcatagaaatgttaacagaatyctgatctcagggtctataatgggggccattttatggttaaaattacctaaatgttaaaattatgctatttcttttaatmtttctttaaaggccctcttatatatgaaatttaactcaaaaacatattgtaacattctagtataatttttaaagctttgaagttctttctacaatcaatatcatgtaataatagttttcagaagttccatttttttaaatgggcacagaaaacaaacctagagaaaatgggattaaagttcagcatgatcggataaactttgacatgaaaaagaatttcctgatttcctgcccaaaaaggttattttaactctataacaagttattaaagtaagtatgggataccaaaagctagacatccttgaaataattgaatctgaatagcataaagcataaagctagatacagtcaatgtgttattatcttctcaacattacttattgataattgtggcaaaaaaggagaggaaagtacttaatatattttagaaaatatgtagaatttgttatctgataaatagttaagaattttggcattttactgctttgtttttcctttgttacaatcagtgaaaataaaggaataggaatttgggagggtaaaaatgggacgaggtttagatgataaaaatgtaagaatacttgaacgagggaagaactgagaagtgtaaattggtaatagtaatactaatcatctttcttaaacacttaaattctaggcatttataattatttaatctttgtgacaacaacatgagggtaggtactgttattattgtgactatttttacaagaaggaaacctaggcatggttagattaattgcattgcccaagattgcaattagttgtttagtggagcctggatttwccaaggccgtttggctccagagcctgttttttttktttgtttgtttgtttgttttttgccagtgttctttacagtcttttaaagaaagggaagaaagaattctgtggctagactctcaaaggttatttcctgkcacaatggacaatatgatatgtaccagcaaacagctactttctatacagctcctccacaggctgggatcatttcctgatgatttctgaactaatttttccaatagcagccagacccagtattgcagtacctaggtcagaatagccctctaaaacacggaaagtatccgaaacagcaagatgacttgccacattgattgctccaacaaataaggactttcaagtggctctaaagtagccctctcaccactgctcagttgagacacagcaatgttgcatctaggcatatacctgaggcattgttaagcatacagcttcccaagccagctgctgaagggtttaaagtgtgggcatgtgcatttgtaacaagtattctaggtgattgttatcgtgggaggaatttgagagatactgctcgacatggctctcaaccttggctgcatgctggaatcacctgggagtttttttttttttttttttttataaatcactgatgtcttgatcctactgtcagatattctaatttaatcattccggggtatagcctaggcgtagcagttttttaaaagctcctgggaagattctaatatgcagctaaattttataatctctgttctagagtagagctgttcatccagtgttcctggaacattgctatgttagaaattaagaagtttgcaatctattgagatttgaatcttctcagcccttggggtgctgggtgtgcttgctgaggcagacatggctggtcctctttcacagtctattagtaaacttttctctttaccccagtgcaccctataaatattattttctaggtctaccatgatgtaaaaacaaaatggaatgcatacctctagaataaagcctatgtatttttaaaaaattcctcagataactgtgatgtttaggcagtattgccaccagtctcccagaatttccttgcaatatttttttcatattagtataaaatttcaagaaaactaaaggttcattaaaatgtaatatgtagataaattgtatgttcacactgttaaagcagttgatatgaacaaaatctctacatacattgtaagaaacatatcaaatatccctctacctactattaattgtaacattttaccatattcacattagttttacttttaaaggaagatgtaaagaaacatatcaagtcttttgtgtgtcctttcttgatcctatttttcttacttcaattcaaaaaatatcaactgtcctcaatttaatttgcattattctatgaatattttacatctttcacaaacatgtatatccacaataatgcaaatatgttattttctgtggttgtctctgtatttgaaaataattacaactagttaagaggtcaaggatttactatagacaaaataataagatttactagaggcaaaagcacaaaatcataaaatgctaatgccagaaaagactgtgaaaatcatctatttaatacccatcttattcagtactcatgttgatgaatatgaggactttcctagataaagatgaggcctctccccataatctataggtttcactatttctgaggtttgtctgaggagaaaagggaggtttgagtgtctgccctccaatttatccctacgaaagtggtagaattgccatgtaaatatatgggaaaaaggtattttttgtcaccatattcacactcacactcaacacttctgtgaccagatgtgtgggttttccacatcaaacaattctcccaatccctgtggacatcaactgtgtgttcagcaatttaattctaagactaaccagtgccgttagcaaagaccccacaggttaagggctcagtaccacaagactgcccctcacttcagatgctaatcacaagtagtgggtccctagattattcacaatttctgtctgacttggctacaaatcagagattcccgccatccccttctagtgttggataatttcctaaagtggttcacagagctcagaaaagcaattctacttactattgctaatttatcacaaaggatattttaaaggatacagctgaacagcccagatgaagaggtamatagggcaaggtctggcaagatcctgtgtgcaagagcttttgtatgtgtaaagttggggtgtgccccctcttggcacatagttgtattcaccagcctggaagcactctgaactcagtagtttagggttctttattgaggcttcatcaagtaggcataatcaatttttaactcaatrtgtaatccctcaccccttcctgcaggatgagggctggggctaaaagctccaaacttgtaaccatgccttggtcttcctggtgaccagccgccatccagcatcccaccaagagtcacctsattagaataaaagaccctctgatcacccaaaaagttccaaggaattagaagctctatgtcaggaactgaggccaaagaccaaataaaaggacaaaagatgcacctaacacttctatcactcaggaaattacaaaggttttagggttctgtgccaggaactaagagcagaaaccaaatatgttatttgtactacttcacaactgaaaccttactaactcaagagcaaccttttatcctcccagctcctcatcactcctgcaggtcctggtctttgctctcctgctaaccaggatccccaacccttgagttctggatggaaagctatccaagctttcctcacatttccttctcatatcatttcaaacatttatataagatttagatttctcccttacttgayccctgtctctgagaaaagtaggccacacatctctgtacattctcattcttacacarttgaattaccctttcttattttcaaatcaacactcactgctctcctctctcccttttatctagaatgcctttctcccctggcaaaagttttaccccatctttaaaggtattctgccaatatcacctcctttgtacrttttctagattaactaatataatctttctcttttgaacttgtattgtaatttgtaccttctgtccagcactttatcattttatacattgtaaaccaattgtgtcatcctattttttgcccttatcaatatgaaagatttggggaggataaaactacatagttctaattttttgtagccccagtagtatctattggagtatgtggcattttaaaaataggtaatcttattgaattctgttcatttctcttgaggttaagaaaagactcagtagttgaagaagtgatcaaagctatccttatgttaaaaaaaaaaaaggcttctctccatgaaatatattggcctatctgaggatcaaagctttgacttcgttcatctcatgctctgataagctgaattgcttcacaaagtttgcatgattaacactgcctgccttaagtgctttagtcttgccagaaactggtaaattttgaatatcctttgtgttgttatataaagattctctgtgcaaaagtaattgctttcctcagctaagaaggtcatgacttttcatagtagataagaatatgtgcttaataaataagctgaccaagtctattttagtttctatgaaacatgcctgtgcctacttttttcttcattgttgattgtgggtttagtgagtgccagttatgatgtagaaattgtataaaagcatagcattggcatgggtttgatttgtyagaagtcaaaatactgaaatatctgaataaataaattaatgacctgtaacatcacttctatccttaaatacatattctggtggggggaaaaaaaagagcaaatctgcatctcattcaacttcctgatttctctctgttgtccggatgtgttagattaaatacgaccacagattctttgcagctcctcctataaagaggtggagtctattttcccactctttgaaactgatctgtccttgtgacttgctttgatagaatgcaacagaagtgatataatgtggcttctgaacttctattttaagacgctttgcagtttttacttttgccttcttggaatacttccagaatcatataaaaagtccaggtgaaagtttgcacagagagagagcttcgcagttttcagggccatgccagtcatcctactgaggccctaggcatgtgaatgaagccatcttagagtcccaagccccactcgagccacgagccacaagctatctgaaccccatgagtgagcccagatgagacaaacataattgcctagtcaactcacagaactgtgagaagtgataaatcaccatcaagccattaagtcctcgctttgttatacagaaatagataactagccgtatgttagttaggtatatttagcttgtctccctaatctctggaatatgcgaaggcagaattttccattcacctttccccattatggcaaagcacataataacatctaaaataagctcaaaataaaggtcattccaatgaaagattggmccttgctaagtttcagttttctaactagtgaagtaaagctattggattaaatacaatttaggattctctttgttctacctcccataacaccagctcattttgttagatgaattctctggaagaattggaactaatgattctattttattttttgtcttccatctgaattgttctggccggtttattccttaaatgcccaagatagataaaaggtaccgaatggaaatagacaagaactccargtctgtgggggacacaagaatcttccactctgcttttcctgtgaaaattctgttcttcctacatataaatgagccgtactcatccaaacctgtgtttgaattgcacatagttatgggataaagatctgctggcacattcaggaagatgatctgtgcttctactgaatttttaggtgtaagagtcagcatacacatttgctgagcccatgtcccaaggctctgagaaggttcgtggcacaagatacccaatatgctagataaaaggcagattgtgactttgctatttagatttgtctgcttaggtggtttcggctattgcatttgagatctttgcagctgactggttgtatgcatttgacttgaatttttatgtgcttgctagatgttttaggttttgctctgtgaccttgaacggcattatgtcaattaaatcacacagtggggaaatgacttagaccaccaagagttattgaacaaaatttcatttagcattgggaaaaaattgttgaagataaaaactcatagaattttggaatcaaaaacattttagaaaccatttagtgaggagagtgggactcacagaacagggtgatctgcccaaagtcactaagctaggtaatggcattctgtgcaactttaaaataaacaaactctatactatttgcaaatgctattagaaattagagaaagatcttgggtgctgtgatattatgggcagtgcaccaaaaagccaaatattcctttgtacaatatttatcttcaaggacatggacataagtggctaagcaaaggcagcaatcagataatcctagatgcagttgtatatgcatctgtatgtatatatgtatatgcacgtatatatacagagagagaaagaaaaagtagtttgccagggcagagatttagtctgattgccacctatggaaggcatggagagtctgagaagagaagttattgcttatgctgaccttttaaaaacttctgaaagcttcagtcccacaaaacatggtccaatcaatgtcctggaatctgaccagttggatcattctctcttaggggaatggaattttttcctcttttcttgacttagcatttagaaaatctaaggggaagagcctagcgctccccctagaggctaatatttatgcttgcaacttagaaagcattgcaatataaggttctgttttcaaagtcttgaaactttcctgaggaatatattatcacgctctctattcattacctgtagacgttttaataagatgaaagtagactattcacagctgcgcctcattaataaaaggttgaagacatcgttttttataatggacttttaaaaagtacgcatttagtggctttttaccttttaatgctttttaccttttaccttttatcctcggtggtagcacattgggcttctatgttccaaaatacagataatctctaaagtcaagtgacaggagtttagttatatgggtagtgagctgaaaaaacaccaccctatatttctaagtgactatatttgtaactgaataggccacttgtcatcagctaaagtttccatggataacgtagcatgtgacttttataggatattgcctcctacacaacaggctgtattcagtaataagtacaggcaattcggatgctgttataatatttaccatgaatttctcaaggcaaatcctgataatattcagtttataagaatgagtgtttacactttcataggtgtttaattaacaaaatgtaattagagaggtggaagggtttctgtttttctcatttcttactttgttctctgttagtggtgtgccataaacccccaaaagggagctgaagtatgatcctattatattaaagtagcaagtgaatttgttaaactcytggtaagacatgtacacatatgggttgggaatatttttggtgtagaaaagtaatatatatatatgatatatattaatttataattacaaatatcattttcacatcatacagaatatgataggtactayagatataattgtacttttaatctatgtgtgtgtgtttcagtcttgaggacctggaagcaaatgaggagagaagaaggaaagttgatgtattatttttgtagcctttgttttcactttcttttgttgtcttartactgccaattgtggaagaaagccatttgggaagtatttgtggtgctttcttcaacttgattaggctttsctgccagggccttcgttgtactatacaggaattcctgtgattttcaggaacacaaagcggtctttaraaacacattcgctgggcagacaggagggaaaaacacactatttggccaaccagaggaagaaagctcatgtctggaaaattttactgaacaccccatcaggaaattcattacttatattctaaacagcagcttccgagatctgtttttatatttatagaatatctggcagcaagcaaatgtaaaagagagctatattrcatttagtattttgcttttgctttttcagttccacttttaaaactatataggaaataatgagctcacaagtattgttttggcattcttcaatgtgctcacatttaacagatcatgaccatttattatactacaagaataacaatacattttaaccccaactcttaatactattagaaattattgaaattgaagagccttgatgtgaaaattaagctggggctttgtacaaaagatctgactttaatagccatgttcatcttggccaacttatttattttctacgtttyttgactggatatgtagagcatttaggagaagaattttattcagtgtccaaaaggaagtagtttctatggaaaaggtgctataaatggatttgataactgagtccaagtcccaggtttttctcttatcaagtgattaacaaaatgttaccctttctgaaatggggacaaaaatgctttctctaacagcccctatagggtgattgaatcaatcagggtccatcagggaacagaaaccacgccagttatttgaacatagatattaaatgtaagtaactgttaactagatataagattgttgttaataaaatcaatgaaagggtaaaagagaactrcaaataatcacagaagtggcaactgtaggatgcagcttccagctctagaggtagggaatagagagaagactttggagttattaaaacttagatcttggaggaaaggactagtagagctgaaatttatcccactaatggtgaacttggacaagacccatagacctgaaattcattctgcagagggaacatgggtcaggctagctctagtatctctgaaagccatgcaatagtactgcaaatgttggaagtattgcaaactggtttcagctgctattacaggaaggagcagctgctccttgggcaaacaaaacagctagggtgatgctgttaggaatagcaggcagtcagctagcccataggaaaacaatatttcttctttcttcaccaggcttttcagtttccatctgggctccctgttagaagagcctaacatagagccatcagagtcaggataaacatggttttgagagtctcagccatagcatcacaatgaagtttacagaatggacaaatagatttggagctgagagataatttcttgcacagctttatgtaaaatgctttccaatgtagacaaaagtaaagtataattttgcagtgtaaaggtagaattttattttcattaacatttttgctcttttaaatcttggaaaataacagtggcttagacattcttaaatgacttctgtgttgtaaaatatcttaccaatagcagggtacttgaaatttacaccacacgaggccttttggttgaggctcaatggtttatgaataatatacttattctgctatagtaaagtaaggattagaacattaatgcagaatgaggtaaacctaggggaaggggaaaygtggtgagaatttgaattacattagtattggtggtgtgtaaggaaaactgatgtaggtcttagttttttgttttaccaaagaaaataattggaagaatgatcaccaagaagagagaggttgaatattatgcattatacactctgacttatctttaaattatcatatagaagtgacaactgcaacatggacagcaattattgaagagaaaatggtacaacaatgattcgatttctatttttttgctcaaataaagcaaggacatacaatatgttcttgaagtaccattacaaattacatctctgaacactcagagaaaggctaatagtgcagactgttcttaatagtggaaagcaacatacaattcaagttcttcagcctcatatctcatggtaattttctttcttatgtcttattgcattctaagcgccgaagaggtagctttgattgtggtgataatagtctgtgtcctaaagcaagactatttttaaggcaatagagtacctttttagaaaactctttatctctgtcatacattaaagagaataaacagatattcagtggtttgatagtggcagtaatgatggattttttttttttttacaacttatctgacagtattggtttcagaaagatctggaattacttgagcataaaattcttgctttgtctattttaaaaactatagctgacaaataagctcatgtgtgattctttgattcttggggagggaaagaatctaaagatgtgccttttatgagaacagctcttgatattacattcagatagtgattaacattcttccttttcacaaaatttctgtttcaaagagaagagtattttgtggatatataggaaatcttcataaaatattttattttcataaattattgatgtcaaaaaaggcctgtattttatattaaactgaaacattcttcaccwttgcaagaaaatggaaaagctgatcaatgagattctacttacwtctaaatcattctccagtttcaaactatttgctaagagagtggttggactttgattctcttagaggaccacttagtgctaagctactataataaagtagatctttcttcctaagcatctaacttacaaagagagagtactacatgcaatacagacaaaaakgaagcatcccttttacattatctttctttccactcatttggaaagtaattcataatatttcttttatctctcgtatatcagttgtccttattctctggggggaaataaaaagaagtatgctgacaatgacctatcttctgtggtgttaaagtttatacagtatctaagttaagayagattgctgataattgactcaagttaatttattttagcttagattgtaaataaatgaccattgccatgatgatcttggctactaaacagactatgtagcagtatctaataaacaggcaaatgtgatagaaatttggaagagaaataagaaatctctctttccaaaggagtgtaaaaatactggaaaactaacatctgctccaacactcttcctcattggtgctggcaaggctgagctgtaaataccagcttcccataacatcatcctccagccccctgcactgagctggctgcgaagtgcctgaaatcacttttccctccagcagaacagctcctgggattaggcactcactgaacttgatatctggggagtcttatgacagataaggttttgctctgataaccttctgtggctatagagggaaggactcttccttcaaattgttcactagggacattttagacaatcattgctytgagttgagcctgttctagtttgcagccttggagcaatgttgctttagattaatgtgtcaccaagctcttattgagaaagaagttcttttatttccttataggctggwtttgcacttgtcaattgtgtggatgaagaaaagaggttagagaaggggcctcccacatactgatgatttttagtgtctcttcaccatctatatctggggagaattggaggggcaggagggagaagctggtgctggaactcagtaattaacctgatttgagtcaggtttaatgacttctctgtttaaggtaaaatattctggaaaaaaatattttccttaaacaagaccaaatagtaaagtgactgaatggtggatgccttactccctcaaaatggcaaaggtcactgcatttttatctcctgccaagccaatcaataatgaaaggattgatttagaggcttgtggagacaggctcttcaatgaccttgttgtagtagcagggttagggtagggatctaccatgcgccctcttcagctctaatgccgttgtccacttcacccctgtatcataagcaaaagctacaagaagcatattatttgcaagatggagcttatagtttatttttgttgatggtggtgattttgtcaaaatgtggtgatgtttatgcagtcacataatggcactatgaattttgttttataattacatagcaaaatttatggatgatcacatttacatgttctatcacgtttctgacaattatagttcattgcttcctcatctctttccttcagggtatcaggaaattattgtgacttaaaatgggaatctttagctttgaggtgggagcagtttgacccatttcaacatttttatgagaatttgtctcccttytytgaaccacctctgctgctatagatgcacctaaattcagaaaaaaatatttacctagtgcaatctctatctcatgaatgctttycttttcagtcttttatgttatcagagagatgtctatagaaaagtttacatagaaattatttactcaaatattttaattaatgaatttttaaactatttttattgaaatttaatttttattttgatatttccaagttggaaattaaatgaaaataatagcatcttttctaattcagttcaggaycaacagattaacttcactgtgaattttttgacccctgaggcaagtgttcaaaccagtattgacttggcttcttccaaccttcattttatgtgtcagctgtgatgcaatacttcaagtgcttcataaagataagggctgcacttttccctcagagcactggccaaataataatcwggtaattggaatgtatgtagcactttcatctgaaaaactcactcctcagactttttttatgttatccctattaagaggttggttgaagaattttgggtctgggtggagggaacatagtaaatattcaatagatgtttaataggttgacatcatcttttatttaagtcttgctaggttaayttgaaaaaaattactatatgaacttacagttgaatgacattaaatgtgatgaaataaaatgaaaccaaaactacatctttttcttatcattttaaagatacggttggttatctaggcatcccaacacaacacattagttaacagagaggttgtttcaacattcttataaggaaggactgggctatatctactcaaagcaaaatggaaaattaaagcaaatagagaatatcagtatgcctggcatcttcacctattaaatctggatcagtcatgaaattgaactgggtcaataataggatggctggtgccactaacccctaactcctgtgtcatcacggaactggctctacctcttagaatgtcattattcaacacttttattctactcaatattgtatctttatataaaatgttgaaagattctgatttataccaaacatttcagttatctagatagtgtaggctttaattacttaatatttacctaatttgatctattttactgagttgttagagccataattgcatttaggaaaatttatctttttaagtagctctcaagccctctgtttcaatttttttgtagtattctttctctttattcttgggcataatttacactttttgattatcattgttcacctagatagtacctcttatctcttatttattcagatgctattttgttttatgaaagagacttttatctttttccacattatcaatatgtcactttttctagtctaatttcatttctcttatttcwtgttatttcatatttgaaaatattttgcctctttgatttcctttctaagccttcttgttcccaaagtctccttaaactatgcagtgatagacagcaagagtcaaaaagaagaaaagtgaaatggaataaagctaatgaccagtttatcttaagttttgatgcttggatttaattacaagcccacagggaagatcctcttggaaacgaatgagaatgtgttgttaatgttttagttcataaatccctaggctgcagagaccatgtctacttaaattaagtgcccagctcagcaccacgtaagaggatgataatgatgtacaataaattacagctacttctaccactgtgtgttcctttctacaatgccacttccttgttgttgtgactatatatgcatgtcttaatgagaaagatttgcaactgcctgtttatatcagcaaactgaggtggacagctgggacaaaaaaacagtttatccaaaaactgccacaattaatgaaaaagagaagatctagaagccattttttcaaaagttcatttactggggtaagagtacactgatgaaggtgaaatactagcaattatagggaaatggacaattatcagccctacatgcatgtaagcataaaccctctattttcttttattattctggtccttttgatcattgttaaattaagtcaaatgttaattactataactctatttttttgtttttactctgaagactgttggaaaatatgggaattaaaccacttaacttgaatgaaatgaattgatgatctagctctgctcggatactacgctctctaattaatgtgctntaatccatgttttggtttcccaccaagtatgtgcttgtgtccatgtgtactattcccacttcaaaaaaccatgcacattgagtgatataactacacccatttaaccacacacatggaatttgagagctgcctttcatacctctctgaatgcatggtatacacatttctttaattttgttgtcactgtctttcaaatgctttatttttcgacagtattttccccgtggtcttaattttaaattagggaacaattatctgatggtgaatatagatccttttcataaaaaaaagccttctctttctagaaatctgtcaccttttatgtgtctcatcatagaatttgattagttataaatgtatctgctgctatataatgtcttttatttactaaagaataatatcatgccctgtaatgcatagattcttccataaagatatttttattgtgtatatttccccaaataagaatgagttaggtgcactttaaggttatgaagttgtgaatttaagactgcacagaaataagcagaacccagcaaaggtagcttagaataatttgagaagtgcttatggtgcrcttctacccaaatcaaatgagatggtagaaaaccaagagaacaatgtattattttaaggtattcatttagagaaaatactgttgtgtactaactacatgacacaaaatgttttaaaaagtggaaattcaggatcattttatacctgatatatattaattcttattttaagttcagaggtacaagtgcaggcttgttacataggtaaacttgtgtcatgagggcttgcttacagattatttcatcccccaggtactaaacctatgtccatgcattatttttcctgatcctcttcctcctcccactctccaccctctgataggcccctgtgtgtgttctcctctatttgcccatgtgttcttccatatacctttacattttaaagaaaaacrattagcattttgagtgatgggcccttatcatattgtcaagtaatatctttaagttcactgaaaagtgtacagctggaaaaaggttgatttttcttgttgcatctgataacttttcccattcatgtaaatttacaccttataggagtatatcactgtcaactcggactttgctgaaatacttgaaaacaggcatggtggaaaaaggaaaactcaccacayatacattttccattataatgctgatctctgaggtactaacccttgtagtttggctaaagggcctttaaaaacactttacattaaaatatacacatagataaaattttattttaaaaatatacatatgtccacagcttcccttgtttaacagcctgcatctggctayggcaccctgcttctaaggagactaatgctctcttccatgtgcaaagatatctcttatttctgtggttatttctctttaaatccgtgctcttcttcacaaaagagcaggactattttagatggtatgaatggattcaaactaatttatagctattattagaaagataaccaaaacacattcaatattaaaagtggctgaatggtgacatcttgaatgcacaggaaatctcaatgataataactgttattatagtttagcttattacttagcaaaagtgatacttartgagctatttatggtccagaaatgataatattaatatttgtgctaattttgtgttgaatttatatagtggcttactggtttcaatgtgctttcacatatattatcacttctgatcccctaaacaaaggagtggtgtaaaaaatgktttttctattttactagaaactaaaaagggtcaaagagatttagtggtttgactaaagttacgattagttagtggctgagttatcactaatagctaactattaaacttcattagcattccagttgatgaggaggaaaataaatcagaaggtaaataaaagtaatcataaaagggatgattttgagctattggtcattagtctgttagatcagstaggatttctgattatggaattcatgtaaaaagaaaaaacaggcaaaattgcaattctccattttggtaaaagaccaatttaaattagtttgatttattagaaactctcggggtttttttttttaagccttaacaggtatagaaatttatgtgaattcagaggcaaagaatattcttatgatccattagataaatgccctatatctatctactccttcatctctagagaatcaatatctttgtcactacagtatacaaaatccaccccttagaatgctttgtgtagtctactcagtccttgagacccctggtaatttaccagtcagaatatcaatttcagtgggacctctttgctccacaggaatgaactgagaccataaaattgttttacatcagctcctatgctggtaatattcaaatgtcttctaattagcatgtttgagttgacagcacataaatgaaatcctttatcttctttttgatgatgattcttatactgaaattggaggatggatgaaattttagttttctcttaatgatgttgatttgtacttgattcacttgaagtactagtcattctttgctttgcatttctccactaataacagggtttctatccaaatttctttatgatagcattcacttacaaaaatggtttatagaacctttggaatgaggccactaactattccagttttaaacgcatccacataagtaataatttattcagtattggtacttgctttttattggtaattaaaatgatctgaaatcaaaatgagagtaataaataaagctccgtttcagagattaaggcagtaaacaagatagttcagactgctattaaggaacatgaatgcttttttgggaaaatttctttatacaaaatttatgaagtctattttgaaattgttacatattatgaaaatgcttgcattctgatagttctctgttattttaatttaactccttgtgaaaatatgcaacaattcttgtattctggaacaagaggcaatcttgtttctggtgtggctgaagctaagattctttacctgaaaatatatttctccatcctcaacataaagtgctgctaagagaaactgaatacctaagagttgagagattggggaaagtaggtggagagggcttgcaaaggtaaggggagggtactcaatattaatttcttttatttctcaattttgtttaggactgggccaaaaattagatgtagtaaaattaaattgtgtcaagtttgtggttaaccagtactctatttgattgtatattaatgattaacactaataaaactcacttttttctgaggcaattatttgtatttactcttccaagatttaactgtttaatatggtagtgtactgtaatacaattactaccaatttcctagtgctttccatgaaccaggtcctgggctgtatgtatgtagtgcatttaaatgctcgcaactactctgggaggctctattatttttattttacccaaaaggaatctgaggattagagaaattataacaaattaccacaaatttagtagcttaacacaacatatatgtattacctcacagcttctctgggccaggacttagtcttagcacagtcctctgcccagagtctcacaaggctatagtcaaggtgttgaacgggctatgttctcatctggaggcttaactggggaagaatctgtttcattgatcactccccttattggcaagattcagctctttttggctgtatgactgaagactccagatttctgctagcttttgactcgtctcagatcctggaggccacctgcaatttcttgccatatgacccactccagaatggctacttactatatcaagtccataagtaccagtttgctggcactagtctgctaaaacagaatcttatgtaatggaatataatcgcaaggtgacatcctatcacctttgccatttaatataaacatcatgagagtaacatcctatgaccttcgccatagtctaggttagaagtaaatcacaggtcttgcctaccctcaaggccaggaaattatacaaaacgggaacactgggtatggggttgccgggggagtcatgagagccaccctaagatctctctgctgtattaagtaaattaaccaaagtcacacagctgctatgattcacagctaaatgttactgactcaaatgcctatgtattaaccactgtattttttcatctcaacagaatgcaaatataactttatgtctgtgcatacgttgctaggtttttttaagtataacttaagtgatataatttttatatatagaaactttgtttattctaatttaccccttaaaatatgtgcatgttgcatcatgtctgtttagaaacataataaccataatgtcaaattagacatcaaatggcatttacataaagaggttcacttttgctttatataaaatgttcagtgaagtcaaaggagagatgaaagtgtcaattccaatccaataascatatttttrtattcactataagtgcattggaaactgtgttgtgttcttctgttaaaaagtttaacttaattgttatcatcatagtgtccagtagaataatggcaaatgcattatgagatgccctttaagttcctggagaatgatgtggctatgaagtttaagctctctaggtcctttctcagaaccagatatgataaaacaacagatctacagttttttttctccagatggtacttaaagacctgttagaaaaagctcctctrtgattttttttgcctactctagaggcctgctctaggggctttaatttcttcctctttagtcatgtcactgattacccatagaggggaagaataaagccgaggttcctccccactggcaggctaacgagaaggaccctggctggttatggtggctcatgcctgtaatcccagtactttgggaagctgaggcaggaggattgattgagcccaggagttcaagaccagcctgggcgacatagtgagaatctgcctctacaaaacaattttttaaaaaattagctgggcatggtggcacacatctatagtcctggcttctagggaggctgaggtgggaggatcccttgagccccggagttggaggcaaaaatgagccatgattgtgccactatactccagcctgggtgacagaaagagaccctgtctctaaaaattttaaagagaaaaaaaagaaagaagtacgttatatggcatcatgttttttaaaaggggaacrttgttacacagtgaagaaaaatggctggctctcatctccacaattgcctctgctacctgctacagcatctagtaagwtggggagcaagagatcctaaaactaagcatttctgactttttcatgtggaaattaggccaccttttctatcaatgaacagatggagaggcctccatggttatttccctcccaagagacaccttatgtatttctagtgaataatttcagttagtaattgctctccatgcgatgtgcttttagtggtattaaatataccccagtttggagagactttcatttctgtaatatgaaaacaacacagcttttcctttagaagacagtcttgtagcttagaaataaaaaaaaatctttctttgtagccccctgaggtatatctattcatgttgctaactataatttgttccttttttcagtttaataattgctttttagttttgtgtgagctacaaataagaggagatacttattatttttaatactacatcaaagcatgagaaaataagagatctatacaatgaggaatagatgaataagcatcaaaactgcctttttttcttagggagagagaaaaaaatggtaagggagaaaaattytgaatgaagttcagagtcaagcattcaytgggtcacttgagacataattcacttttctgtacaaaataatgtctcctttcagatttaaaatgtggtagtgaaaatgaatgaacaagagggtgctaaacattattgtgtgagggacgtgctttccaccagacccctgaatgctattcagctggcagacaatgattggggtctacaacctaatcctggtaaaaagaacctatccttttaaagggaagaataattgtgttctttattacttttcatatttccagggcccaacataatttttatacttcctgattatattctctgagctctatagaaaaagagtacytgtgcttctatgtgctttgtatatgagcctaggaaagcagcacttacaataatctaccttaatgctttgttttgcttctccttttgcacacaagcatggctattaagtctgtatcagtcagagtcccagtagcaaacagacggcacttgcaaattaggataattccaggagggtttatttacaaagggactgtttgcaaagtagaaccacaaagaatagtgcagtaacctggtttaatattggtagaggtattatcactcctaggtctaaaaggaaagggagggaagagtttccagaaaactgagagaactgagtagagaaggccagcttggtcaagagacacaggttcttgacacaactagtcagaagctacccagcaggaagacagcaaagggcaggtatgttccgacctccttctcccctcctggaccctccgttctcccctcctggaccctcygttctcctgctgggacctacactgtggaaactcaactgaaagtcagaggacaaggaagcctgttgaggtagttcacagagcccgtgctccagtggcagaaggcaagatggaaaagggtggagtgtgggatctgaaggaacaagtagaagagcgcttggctcatttggcaccaattccaatatgtgaaaattagaaccaggaaatgaaagtctttaatggcttgtgataatcataagagataaaaatatatagatagcatatttagtacacatgaggagtttaggctttgagaaccttgctttattgaatctgaaaggcaggaaaaacaaaagccaactcacccattagttgggcttatgtcaaggtagatgagcagatttccatatagcagcaatattattgtttttaaaagttgcctggtggctcacgcctgtaatcccagcactttgggaggccgaggcgggcagatcacgaggtcaggagatcgagaccatcctagctaaaaaggtgaaaccccatctctactaaaaatacaaaaaaaaattagctaagtgtggtggcgggcgcctgtagtcccagccactcgggaggctgaggcaggagaatggtgtgaacccacgaggcggagcttgcagtgagcctagatggcaccactgaactccagcctgggccacagagcaagactccatctgaaaaataaaataaaataaagttgccaagtacacttggataggctagtctstcatatggcacttaatcacataattttttaaagtcaatttgttacatatacatcagtactaggtataggggttctgtgtaagggaaagtttcagacacataccaagagtattaaaagcatttgcaaagcaatacaggcaattctggattgatatagttgaaatcagatatgtaagtgctgacaaatcacttctagagtgcaaaattggtataatgatattaggtacattttcaagaagtagtctcttaaagatatacaattatatactcctttttcccctcactttgtcatactgctttcaaatatgaatgtctaagagacgtgaaaaagacaccataaaaagagacaagttgtagagagaggaagaaatatgcaacacatataaattgcaaagaactaagattcattatatacataaactatataaatatatatataaaatatatataaaatatataatatatataatatatataaaatatataatatatataatatatataaaatatatattatatataatatatataaaatatatattatatataatatatataaatatatataaaatatatattatatataatatacataaaataatatatataatatatatataatgaataaaggatgcctacaaattaagatgagataaataactataggaaaaaaaaagaacagaacatttgaaccarcactttgccaaagagaaaaatcaaatggccagtaaacatttgggaatcgacctcattaataatcagataattattaattaataatacagtgatatataattacatatcaatggttggtaaaaactcaacatctaacaatttcaagtatagataaggatgtaaaactttcttatggttcaagggtaaataatataaccattttgaaaaacagttttgcattccagcccagttatagatgtaatctctaaaratgcagcaattattctctagggtctgtaccctagaaagtgatttacacatggtctccagatacacatgcaagaatttcatagcagcagttcactgcagctaataaatgacaataacctaaataaccatcaagaggaatagggataaattgtagtacagtcaggcaatgaattactatctgacaatgaaaataaatgtactttagctgtatgcaacaacatggataaatctaaaagaaattgagttaacaaagaaaggcaaaggaatatatatagtatttatgtattttacataaagttgaaatgtagagaaaaagaaracccacaytgttgtgtttagtggttcattatttggtggtaatactctaaggaaaagaaaaattattacaaaaggacaatgattgtctctagtggagaatactggggttgtattaggagaaagtctcagaaaagaggttttctagtttgccaatcaagttgcatttttttctaaaggaaatgttgacacaggatcctttcagtgccacttggccaaccagaaatctctgtggctggccagtggcrcctctgcctggggccttgttcagctctgtgctcactgctgggctttctctgcccacttggcctgctgcagcccgtgactgggcccaacgtgctacaattggcttccgccttgggcaccagcatctggacgaggaggggaatcacagccatgcccaaaactcaagagattccagcaactgcgaagccccagggggtgttatttctctctcttcttcccccaacccctggtgtggcaaatagtgggggcatattacagcttgttcatgttacagctcacgtttgttcctgcctcctgcagggcagtgaacagaaacgtgttyggtcccgccacccgtggcttggcggataggggcatgttacagctctggctcaaggagtcctaaggtctgggcctccagaagtgtgactgctctttttgctccctctgcctgcagcacagtgaacagaggtgtgtggcycccagcggtattttctcccccactacccctcaagtgggagggagggttacagtattacagctccttttgttcctgccatgtggcaggttccaggctcttgtctcatatccaagaggaatgaggtacatggacaacagagagtgagcaaggcagagaagaattttattaagcaacagaagaaaagctgtcagtggggagggaacccragagtgggtagccctctgtgtgagagggagcccaamagcagatagtccaatgggtagctgagtctggggtttttatgggatcagaatggaggaatgcatgctgattggtccatgggcaggcctggaaaaagcaccatttgattgtctaagagacaccacggaagttctcactaggtcgtggactgtaccagaacctcagcctggttttcaggcttcaggctgtctttttgcttaagtttgggtttcactggtgacctgcccttgtctggcgaggaatttgtctgtctcctgccactatcagtggttacacattggtgttactttgtgtttattcattaaactctacctatgtgagtatgcaggtttctttctgataaaaataaatcaaccatttttaaaagtcaactgactaaaagttaactgactttcctctatgttctgccctttgatgattgactctgcctatctcctaagggtgcttagtgtcactgtttttaaatttcagattgcattttattatttgagaatctagctgtaagtaatttaacaggaaatgtgaatatatgtaaatatccattagacttgcaccagtatttcttcccctctggtacttaggaagcaaagacatccttaaggtatacatgggagatttggggttatgaggagtaaaataaatgcyggtattaatggctaaattctaaaagataagataattgagggagtataatgaaaagtaaacccaaggtattttggactagaaaaataacaggaccagaactgacgttagagaagaaaagcatcctccaccccaagtaaatattaggaatcagttaactagatttttgttgttgttgttgttattgcaagttttaatytgagtcactattaataaagaaaatgggagaagtgaagaagctytcatggaaatggtgaaattcctttctttttataactcctccagctgctttgggaatttgtggatactcagacttttttttttttttttttttttttcatttttcccaggaagtagcaracagagcattaagcagcctgctgagttataggctttwttyttaggaggtcttaraaggccaraattctagctggctttcaggggagtgtttgccccagatgtagatgctccctaatagatttatcctttcactatttaaaagtagctcaccatcaacacatgaaaaggcaacctatagaactggaaaaatatttgcaaaccatgtatctgataagtggctaatatataaaatatgtaaagaacaactcaatagcaaaacaataaaaaataaaaaacaacaacaacaaataattcagttcaagaaagggcaaaggacccgaacagacatttatccaaagaagacatagaaatggccaaaggtatagaaaaaattgcctagcttcactgacaacagggaaatgcaaattaaatccacaatgagatattacctcacacctgttaaattggctattatcaaaaagacatgagataacaagtgttggcaagggtgtggagaatagggaaccctgtgtactcttactgggaatataaattggccagccaatatggaaaacagtatgggggttcctcaaaaatttaaaaatagaactaccatatgacccagcaattccacttctgggtatatatccaaagggaacaaagtcagtatctcaaggagatctcttcatgcccatgttcattgcagcattattcacaatacccaaaacccaagacagggaaacaatccgagtatcctctgatggatgaattaataaggaaattgtgagagagctatatacacatatgtacacatacatacaagtatatgtatttgtgtgtatcatacaagtatatgtatgtgtgtatatgtgcgtgtatacatatatatggtgaaatattattcaggcaaagaaaagtaagaaattctgtcatttgcaacaaaatggatgaaccttgagggcattatgctaagtcagacagagaaagacaaatactttatgttctyacatgcggaatctaaaaaagtcaaactcatagaaacagaacagaattagaatggtatttggcaggggctgaggggaggaggaaatgggaagatgatgatcaaagggtacagactttcagttataaataagttctggggatcaaatgtgcagcatagtgaaaatagctaacaatactatattgtataattaaatgttattaggagagtagatcttgaatgctctcatcgcacacacaaaaaggtaactaaggtgatggacaggttaaatagctggttcgtggtaatcattgcacagtgtatacatacatcaaaacctcaagttgtgcacagtaactgtatttaatttttattgtcaattatacctcaataaagctggaaaaaaaatgaactcattggaccaactgagttaatgtagtccaatacaaaaaaaacaaaaataaaaaatagttgaattcagtacctgtaataaagacaagaccatccagttaacttacactgttgaattatatgatatttatctacaagtctttctttccttgtatatatgagaaccctattttgctataacatcataacatataggtaatatattgtaacaaaatatactattatttttcctttktaatttctgcaaaacagaatatgagagataaaagcgagaaaggaaagatttggtcttttagaaaacattccttcgttttcaacgaatgcatcaattgtttcaggcttctctgactttaatgtacttagggatcacctaaggattttatgaaatgaggattctaattctgaattctaatccagtggtctggggcaggacttaagagtctgcattactaacaagctcccaaatgattccagtgctgctgatacaacaatctcgttttaaggatcaggaaaagagagaacaaagcatatgaccccaactaattaaaccagacaagactcacgtggcccctgctcagcacctgtgatcggagtgggtcctagattggctcttccatgtaatctgtctctgttttatatattttcattgcaattgcatgtctgyggttttagaaggtttttttttttkttttttttttttttttgagacggagtcttgctctgtcgcccaggctggagtgcagtggcgcgatctcggcttactacaagctccgcctcctgggttcacgccattctcctgcctcagcctcccacgtagctgggactataggcacccgccaccacgcctggccttttttttttttttttaatttttagtagagacgggatttcgccttgttagccaggttggtctcgatctcctgacctcgtgatcagcccttcttggcctcccaaagtgctgggattacaggcgtgagccactgcgcagggccccattttagaaggttttaaacaagaaagcattgtctaggcacagatctgttatgatctaattgtgagacttgggaccagtcatttaaccaccaatagcctcagttttyttaactttacatgaaaatggttaaattaaattacttttaaaggtttatytagctcaaacaccccttttccttttttaagcaactttttttttaactatatatgcttttttttccccctttaataagtgtactcatttctcaaggacattgagaactatttctctcttgctttataaaagcctttaatgcttttctatcccattgctgttttcatgaatattgatatgcccatgaaggctactaacttaattattattacaaaatctgtactaaatgtctagctgtagttacctccacctttggttttattttaaacggaaaataaagccaagaataaagggtctcattatagtgtcatatattttttcttttttaaaaaataaaatcatctgaggtccctgaaacatggtataatataagcacagattgtcatgttaaatagcttggtttggaataagctatgaaataaaaattatgcaagacagctgtactaaaaattagcttttcttaagaaggctacattgtctgtatggaaaatacacttaaggaaacctctattggcttaattggagcacatttttaaaattccttaatggatgattttccaagtttagacttcaacacagaaaccctggttatgagcctatttatgggtcaggggatgcactgacaaccttaggttttccccctccaccccccacccccccagctttgtggtacattctgtaagagtacttttctaaacattgcctcataatatgatctgtggcctgtaaggatcacaattagaagctccaaagatagagaaaattttgaagcattcagcactagctgccagggcacttaaaactgaccctggagcacaaatatgtcatgagactgattctggtaaaccagattcttggcgtgcatctttcccatggccaaagtttccattggttttaaaataattccttagcaattactgggaatctgatcgaatagatwgtgcttgttacctctcaaacaaatacgtaaattctattaagctkaagcctaattaaaatcattgatttcagagacacggttttatcatatcatctggcatgtgagaggggggatgattgtattttcatactattgattgcaatatacttgtatttcacgaagatgtttctggacctgatccctatgccagttgcagcyaggttcacagtacacgaggatcccagtagatctgggtcccaaacacttccatgcagttgacttctccaaagtgatgccacagtggtatgctggggcctgctctactgtccctggagagctgatcctacatgtccctttccaattctgtggtcagcgatctcaagctagtagctggaaatgggccaggtgggagtgtttacgccacagaaattgcttgcactatgaatggtagcttcctccatccttgtcctttaaaagccaattgttagttatctgcacaccactcttcttaaagacaaaatacccatcccacttagattaaatcccttgaatttccttgcctgtggttttatttggtctgtgcaaataaagagcaacattatctgaaaatgtttttaagtttatttgtgacagcatcaaagaaaaattcactttaagaagtgaaaaaaatgaaagtacaacttttgataggacaaatttatgaaaatactgcttgcttctcttgttcctgtgaatggacattgcttagtgcacttagwtttaagtagtttcctctaaaatgcctgaacccattagctccaatttagttcacttctttaagccccgaggcagcaagaatactgagtgtaaacccactttacgcacaaaacatacattataaatgacaaatacattccaactgttaagaattttaaatgttaaaattcaaggtttcaaatgtagtttccctgagacactaaagtccttaaacatcccaggtgatgtattttaaaatcttttgaatggcttaagggaacaggaacattttgacatttgttgaagagttatcatttaatggaattgaattgcttcactgaatatgtgtgtgtgtgcgtgcgcgtgtatgtgtrtgcgtgtgtgcacatatgcgtgtgtgtatgcatccctggttctgacaggcagtttactttgtaaaacagaaaaactgataagaaagtaaaagacccatctcacaggcagttaccactcttgctccagtgcagatgaagaatgtttcacaactttaacttaaaaaacccagagatggattttcaagatattttaatccaggcccaatgatatccaaaattatacccagatagaaagatacttctcaaaattcctgttaataggcctcttggtgctagaaagaaggggtttgttttaaaattaaaggggctcttctattttgtattcttccacacatgcatcattatttgctcttcatgggtctttgaatcattgcttgctgatatgattcaaatgcagataagtaacaatgaagatattttctatatactgctgccacaagtgcctgccagaagagctgaagccatccataaacaattttattcatagagctttcattagtaattacaattctgttattatcactcagtttgtttataaattttttccagagaattgagtttcctcatgttttaagttagaatgctttttctgaatgctttttctgaatgctttttacttcataggctgtgttgccctttaatatttacagtgtaaaaaaaagtgtaaatagtggaatatttattatttagcactaaatttatttaaataattattaatccacaagtgtccttgtgactagttgagcattattawcctcatagatgaatgtaattatattaagaggaaatttatatactcactttaattctctgtcagtattaaactgctttctataaatatttggaaacaactcaaggctacccagtaattattcctctaaaaacctgcatatctagcttgaccctgactctaggaaaaagtagaggaatgatgataaataagctctaatttgtaaatggctcctaatttcttatccttccacacttgacctcctgcagtccgttctccacacatcagagtaatatttttaatgcatgacaaatatcacatcactttttggcttaaaacccagctagagtttcccattgtaattgtaacataaacccaatgttcccagagccctgcctttcttccacccaactttcacttctttccccttttttctctttggtttttcagccactttggcctcagtgcctttgcacttgatgttgcattggcctaaaatactattctccctgagtttctctgagctggctcctctgcgttatgcaggtctgaatcaaagttacctgctcagggaaacccacctcagggacagctgtaggtaaagcactcccacctcgttacactgtattttattaccrtattttaatattttactttctttacacattttgatattgtccatgtcttcctgatgctagaatgtagttcataaagtgattattccttgttcatgaccatatctcttgtacttaaaaggacagatcagcgcatgcaaaggcatggagggaggtgagagcaaggaaagttcagggagtcttagtggttcaggctggctggattattgggtgtctgtggtaatcatcacatccacctctgaaagagactctggaaagaagctgtcttaaaaagggtaagattaatgtaatgctgagacccaccatggcagtgtttctcaaacttttggttttaggacccttttacattcttaaaaattatcaagaatcccaaagagcatatgtttatacagttatattaactatgaatattttccacagaagaaaaactccaaaattttaaaaatatttatgaattcatttaaaatggcaaataataaactcattatatgttaaataacacatgcttttgaaaattttgttttggaaaaccaaaaaaaatatactgagacagtgacactgttttatatttttgtaaatctccttaatgtctgatcaacaggagagacctgcattgtcatgtctgcttctctgtattcaatcttttgtgatatctcgtgtcttttagcatatggaaaactccactgtacactggtgaaggaattagagcaaaaaaggaaaataccatttgaatattattgtgaatatagttttgaccttgcagatctgattggatcacacttgagaataatggctgacttatggtttgaaatgtaggaaatcgatctctcagctgccatccacaaggacttaggtttcagtatgtagttagtttattgtagtaaagaagctctcaacataatgaaattttgttcttaattttgtcaatcttttgaagcttgaaatacttttttttctgttgaaacgctgtacatttccttattttcttcgtcagaagagttcatgacatttaatttaatacctttgctcttttaaaacaacactgagttagccatgcagtgggccacagacactgcaaaacagtgtttcttagagaaaagcgtggttctagtgcctgtttagaatgccactatcacaattccctctgtttcaggaaaactgggatctttgctttaacttccctccgcagtctttgtgtagcagacttttgctgtgacttcagccctgagtttaggcaacataggagagggttaaatgcattggttttggaatacagcagattcaagttgaaatattccctcctccacttactagccacataacctgggaagaaagttaacttctctttgagtattattatttattttacaggttgaaagttaaaggttgagcctcagttttctcacagggttgttttgagaattaggtagagcggtgaaagagaatgttgagtgattagaatggcccagttaaaggagtgtagacaagtagggccctggaatcagcagtttttaaaacttcttcaggtgattctaaagtgcagcccatgttgagaaccattgattaaactattagatgctttggtagaattctatagagaaagaaactattgtgacagtagaatagatctactgcagttatcccagttttgcctggacacaaacaggactcttcgttggagagctaccttgaaagcccctccactccatgcccatatacttttttttttttcgattcatgtaaatacatactttgtaggctgattatgtaaatcaattaatttgtatggggggtttggtgatcttcttttgactacagttatcaaagtccaggttgtcaatgatctggaatacataagccgtatcacgatagttttgttttaaagctacttagaaattatttagccttatattgttgggactaatgactttcagtgagcaacagattaatagacgtgtgcttttgttcatattgctgttttctgtctaatggctcgttcattaactcatgactatagtcttaattgggggctgttaatacctaacgatggtgtttttgagtctggtactgtgataaattgtgtctgtttctattccctgaggctaatagatatttgctttttaaaactctaattaagcagccctagggaagacaaagtcaccatcagtctgggctctgaagaggcacacagccatggaaggggcatagattttggaaggagactgtttaatgtctgcaatttgctaatgaagtggccctgggcaaattatcccaggttcctgaaacccagttttctcatctgtaaaatgggcaaagcaataataatgcaacacagaactacaatgaaataatacaagtaaaaaaagacatgccctgaaatgattaacccaaaggttaaacagagttattatttctttgcttccattattcttatatatcaactataagttttacagtatttctagggcagaaagtttctagggtagcctatcaccatccgggtctaatgctgaggataatggatcgagcataatgattctccactttttataatgatggtacaattatttttgcttattgaagtggtagagaaagagaggaaatggatggaggcagtggtggaagtttgacctgataacaactgttagtagaatacatgagctttgaattgagctctacgtgtgtttcatatgttaataatatcctcatgtgaggctttgggagtcagcaggaatggagttctcagcttataaagaacagttgtttagcaagttatcagctattatctttagtgcctataaaacacatttttagattgtggctttccagtgcgaagagctcctttatttctatttgtaaaatatgtaaacatcccttaccacttaaaggaaaactgttgtctgtcctactttgtacagctttttagaggtttctccttcttgctttagttaagtccacaggaccggacttggctcgtaacacatagtgcaagaaaaccgacggggtctgtacaatgctagtgtcccagcctactgttcatttcaggaagaaccagaaataagtactatggaggacagaatctcttatgttttagaaaagctataaggagacctctttgacttccatgaaaacaaaacctcttatctggcatctcttattttcagcagatcctgtatctttcagtgattctctgataaaggaaggtgatgtctacagatattgttgccattcagtattctttcacctgcttgtaatagatctctataatagtcggaaagggaagtggaataaaatgtgggtaatggcagggatactcagaattatatgactctggagccacatttgcagtcactattaacctaaagaactacatgagtcctgtatgactggtagaatttagtataatggcgcattcatatagagaaattagaagttttaaagcgccaccaattaaacataaagagacccatgtgactaggagctgtggtgtgaacatcactgctttagagaaatggaaaacatctaaggttagagcatccaaactaaaagagtgcttttatttgtcttaactagtatttctttttggcatggaagcctatagaatgaacttgtatacataatttggtagagtgtgctttgacatttgaaagatgatcgcatttagtgagtaaaacccaagatagcatatcccactcaacaattattgtttatccaagttggttaattgggattgtgtttaggctgcagagtaagctctagtcttaccaaaggaaccacctgtcattatgcatttgtaaccagtttgtcaaaaacgtaactcaacagacagaccaatatttaaatggcattttttcctctccagttacatataaccatagtctgttgaatatcatttttcatcccttgaccgcatgtttggaagatttcttagcttaccaataacttttctggatattaaggagttcggtttgggtaggatgtggtaggtgggacaagcactgctccttctggcaacacctagaaaagaagctaggctgattgcaaaaatcacatgtttgaaagcaccgttaagctatcagagcaaaaataactagagagaccaaatttccagagcaaggagaacctttcaacgctgagctatcgggagccatgatttttgtctaggggtatttgctgactctgagagtggactgaggagtaggcctttgcctagacagagagctgctgcttggagaaagagaaatcaaaaaagctttcagcagttgtattggatgaagtgagaaatggagacttcaggggcctcaagtaagtggccatttttttctcagaagagacttggtgaactctgacactttgcagaaggctggagaaccaggtcaaaggcttccaaaaagcaaagtgaaagtccccatagtttcacagtgcttgggaaactagagagagaaactgacaacaggcaagagatgccctagggggagtgctgagttgacactgagaaactaaaaagccgtttttcacctggaggtattcacagagtctccctgtggctagaagtctgaatatcaaggttttgccaaacagaaggtggcaactggcaggcataacactcagcagagatttgggttttcatgcatagttggaatgacagttttggagtccaaaagagattcaaactcatggctggtctccctctaaagacttttgtcagattctgaggctgtgtcaggtataatgttaaagaagtatagtggaatgtcttaacaatatccactttttcagggctgagaagcaaaggccagtcaggctgttggttgaaaacacagagggccataccagataacacaggtagacttagaatcttagttggctagggctacgcataagtaataccatagactgggtagcttaagcaacaaaaatttattttctcacaggtctggagtctgcaaatccaagatcaaggtgctggcaaggttggcttctccaaagcctctctccttagcttgtagacagtggccctcttgctgcctctttgcatggtctttcctctgggcagagcttttctggtatctcctctttttcttacaatgacaccagttacattggattagcaccctaacccatgggtctcattttaaattaatcacttctgtaaaggccctatctcaaataattacgttctgagctacttgggagtaagggcttcaatatatgaatattggagaaacacatttcagccaatgacactgaattgtaccaacaattccagcccagctctgtcccagatcaatctctgacttgattgaagagtgactccctacccctcaccttacctgccatttgcctcacataaaaagggggcacctgtctgctggaaggtatcatctggagcttttacagtggcttgacattaaaaaaaaaaaaaagatctgctgggcgctgtggctcacgcctgtaatccctgcactttgggaggccaaggcgggcrgatcacaaggtcaggagattgagaccatcctggctaacatggtgaaaccccgtctctactaaaaatacaaaaaattagccaggcgtggtggcgggtgcctgtagtcccasctactggggaggctgaggcaagagaatggtgtgaaaccgagaggcagagcttgcagtgagccaagatcgtgccactgcactccagcctgggcgacagagtgagactccgtctcaaaaaaaaaaaaaaaaaaaagtcatcataaccgtaataatgaacctcatttctatttcaggcatgtttaggtgcaatgaagacctgttctcattatgacccatttcactcatgagcattcttccaaaccagagcttctcaaacattaatgtacacataaatgaattgggaatcttaccaaaatgaacactatgatgcacgtgtctgtggtaagcctgagatactgcatttctaacagacttctagagaatggtctggagaccatccttctgaccagctgttgaccagcaggggatgagtatgcacactaaaatttaaggaacgtttcctaaaaatgtctgagggccttctagctctgatgatctgttaactttttttgtgtgtccttttcaaagggaaccatatttgatggcttgaacatggcacaatgtgttttaagattcttcataggacttagagctagtttgtgaggctcattcttaccaaaaagtaatctcatttattttatagcaatagttctttactctaactttggcttcacattagaatcaagtggagtattcaccttaaaaatactgatgcttgggtccttcccttggacattctgatttaattattctggggtgtgacctgtgaattggcatttaaaacaaacacaaaaccaaaaacatgttacaggcgattctactgtgttgtcaaggttaataacaactgttttagggtagcacattttaaaaactaattttactaaaatagtagtgggcttgctttggcccactcaccttagttacaaagcatgtttctggtaaaaatcagcatatggtaataatagcccactttcaaaagaattaatatttacccattgttaatatttgaaggaatatttctcagaattttttcaatccgttgaagctgggtagttgtcacttcttatagactagaaatgtgattccattttgccagagtcctctccaattcctattgtctcaaacacccaggccactcctttcattaattttacctacctggagcctgtgggcatgtgagtttgtaacactaccrttatgatactgatttgtgagatagtaagctagaaattccaaatgttgaagaagaaatgttcaatgtacttcccaggaatatttcagatataattttcatattgcctagttttttttttagattaactgagagattccttgcatctctaagattctgtgacctaaatcatttaggtttgtacatgcatcattttctccatgcaagattaaaattaaacaactagaaaaccgttatctaagactagctgatagattttagaaagctgaagattcttagcaattattattagatgtttgactcttaccatgccattgttattgcgtatcaacgaaatataccttgtcttcttaatctcttactctctgagattgccagtgcttataatagtggctgaatcataatatgygcttgatacatgtttgctggccttaaaatagtaaatgaagatttaatgttagctatgttgctttattttctcttaaccatatactaaataaatccaaaatttcattagaacaaatctggaggcattacattacccaacttcaaactatactataaggctatgaccaccaaaacagcatggtactggtataaaaataggcacatagaacaatggaacagaatagagaacccagaaataaagtcaaatacttacagccaactgatcttcaacaaagcaggcaaaagtagggaaacataaagtagggaaaggacactctattcaacaaatggtgccggaacaattggcaagtcacatgtaaaagaatgaaactgaatccttatctctgacctcatacacaaatcgactcaagatggatcaaagacttaaatctaagacctgaaatcataaaaattctagaagataacattagaaaaacccttctcgacattgacttaggcaaataattcatgaccaagaacccaaaagcaaatgcaacaaaaacagagagaaatagatgggatttaattaaactaaagagcttcttcacagcaaaagaaaagaggaaatctttgccaactatgcatctgacaaagggataatatttagaatttacaaggaactcaagtcagcaagaaaaaagcaaataattccatcaaaaagtgggctaaggacataaacaaacaattctcaaaagaaatataaatggccaacaagcctatgaaaaagtgctcaacatcactaattatcaggaaaatgcaaatcaaaactacaatgtgatgtcaccttactccttcaggaatggccacaattaaaaaatcaaaaaaataatagatgttggtgtggatgtggtaaaaagagaacacttttacactgctggtgggaatgtaaactagtacaaccactatggaaaacagtgcagagattccttaacatactaaaagtagatctaccattttatccagcaatcccacgactgggtatctacccagaggaaaaggagtcatatgaaaaagacacttgcacatgcatgtttataatgcagaattcataattgcaaaaatatagaaccagcccaaatgcccatcaatcaatgagtagataaagaaaatgtggtcagccataaaaagaaatcaaataatggcattcacagcaacgtggatggaggtgcagaccattattctaagtgaagtaactcaggaatggaaaaccaaacatagtatttctcacttataaatgggagctaagctatgaggacacaaaatcataagaaagataagtagattttggggacttggggaagggtgggagtggggtgagggattaaaggctacacattggacacactgtacactgctcaggtgatgggtgcaccaaaatctcggaaatcaccaccaaagaaattatccatgtaaccaaacaccacatgttcttccaaaacctattaaaattaaaaagaayggaggatctaaattattctgtcaaaacaaatgtaaacatccaaattttagtgtcttagcacgatggaagtttatttcttgattattgtggtaggtggaattctaagatcgttcccaaaattaccactccatggtgtagcatccctgcataatcctcaatactgtgataggatagcatttactgtcatgattaggtcatattatatagcctagttgaaagagagatcatctgaggagagcctgacctaatcaggtaatcctttaaaagagggtgagttcttcctaaaaacagaagttagagaagatttgatgccaaggagattctctgttgctgaatttaatggaggagggagcatggcaagggctgctggtgtgtggcctcaggagtttagagcatcctcctgtgaacagccatcaagaaaatgaagaccacagttcaagagttgcaagaaactaaattctgagaacagcctgagggagctttgaagcacatttttctccagtgaagcctccaaatgaggacacagccagctgacaccttgatttcagcctcgtgagatttgagtggagaatccagccatatcatgcctggacttctaacctacagagccgtgaacaaataaatggatgttgttttaagcagctaagtttgtggtaatttgttacacaccagtagaaagctaacacaattatttaacagtctactacagtagtgatggttggcagatggctttctttcatgtggtaattttgggactccggtgcagctcagccaccacgtaaagactggactcctttatgtatggccattggaagaagaatgagacagtggagagagtgtactatattcacttttgcaaaatccagcaaacatcatttgcatgtacatttcattggtgagaactagctacatggctgcacctgggatcaagggttcctaggatatggaatcctggttgagtagcttccttccagaaaattcatactgtgaagcagggcaaaacatttctgttgtagtcaaattttaatgtttgattattaagacacttatgtgtctccttccaagtagaacaagtaaatgtgatgatatattctaatttgaggtacatagagaattagagtaacactttcttttttcttttaaagaaatgagacacattcattatcagagacatttccaggtgtgacagttttctaggaagagcatctgggctctatccctgccgagaggtgttcctccactataaccaatgtctttccctctgcctgccagctgaaactgtccagagggaggatgcttctccctcacctaccaatgagcagatgcacttgcatgaggtccaggtgctgccagcctagtgtgcagacycaggacagcatggccttttccttctctgggtctggatctccaacagactcctagcatttcaggcagccccattgcctgattttcagctactcacctgcaaaaaatggagcagtcctcgctgtcctcccaccctcaggacagcaatacccatgctcattgtaacaaggttgactagtctgaggagtatgtcttgcataaatatgagcattaaagtcctatgttccactgctgtattggtagctgaagcagcctcttgttgggaacaattaagatttgtgaagtagtctataggaattccatgaaagagtgagaataacccactgtatgctacctggttttgtttttaagataaatttagtttaattttgaacttctggggttgatagagcaggaaatttattttagatgaaccttaaaaaatattcaagatggaataggaaacatggttttctacatgatcactaccattaattggtctgccttgctttatttgacatcataaaagtctagacaaaaggaagctgtaagaatgttttaaatttgtagtcaggaagacattcttatgttccaggaagggacagggaggggaatagtgaagaaaaatagagagaagaactgctgataagaccaaaaaagggaaaatgaattcctaaggaaggcttgaaattctcaggaggcatgacattgtcggtgaaccagaatattccaaatgctacagtgacagcctttgcttcatcccttcctcacccagaggtctcatctaaatcagttcaggccttagtattttttagtgacatattcctccttctctctcttcctccctgtctcatggtcctcctcccttccttcctctgccttccactccttctttctttcctcccctctttcctcttcattttctctcttccccccatttctttctcacacactttgttcttctctctctgggtcacgtactgtttgcagtgctgaaaaggatgaaatacaacaatctgtagggtctattgtccccatgttaaataactgacacaaaggctgaaaggcaactggcatgaagaggttcaataatttttccaaggtgactcgggaagatttgggatgtgtcaagggctctgatcatgccactctactattcaatgccttccctcatatcctattgcctggcatacttcagtggaataaaactccacttctataacatgggagacagccctctacagtaaatggccccaatttcccaaacatatgtaactcctgccatttcctgcagggccccaatagcatcaacagaatacttactatttcctgaacacaactgagctctggtttatgtttgtttgttcatttttgttttggtttttgcatcttggtgattatatttattggaagagttggaggaaaaagtgacatttagctcaagaagtcatgagttatctgcaaatcaattcatttccagagtggaaaaatcctcagaattatttcttaatatcaaaatgtatgcaggtttctctttcaaatgcyttgtacatttaaagaggcaattgtacaaagtctcctattttccatacaggacaaattctttgtgtcagccaactttcagtggagggacaaccaggacaacaccatctccctggataatgcgcgttggaatactcagtttcattgatttacatatcccttcgtatgtttattcatcaatttctatagtagccacagtttcttctacatctcccaacatcatatttaaatgttgatcataagcatgtaatctgccttgaagccatcagtcatttcccattttcatgtaaatttgctcatctaggctgagcctgataagatcgaggggctcctctgcggttttggtagtttgttgatggtccacataatctgccatatttcaaatcctgcacccttccccctgaactcttactcttccccctgaactctatgacagatgcttgttacataaaactctgcttgttttatcatatccttccttgcctaaaactcctactcatccttcaaaacccagaccacctcttttgtgaagcctttcctgaaactcacaggataaaatagttattcttcattctaaatgcccacaggaaaatgcccatatttctattatagcacttattgcattgtgctaaattattcacacatgtgtctcactcactagcctctgaagtctcaacaagaaacactggggcattattcactggcacatccagtgcttgctacctagcttgtgttcactgcaatggagggtatattttacataagaaaagcatcactgttataacctatgtaccataacatcactaataggataaagaatattaattgtcaaaaattttctacctttgtccaatattaaaacacatacttttatattaatatttatgatccaaatcaaatactttatacaactctatgtatattgaccatcttaccaatttctgactttttcttttcactttatttgtaaatttaagtgtatatctttggaaaatgttatttggctgtcaattttttaaaaaattaatgtatataatagtacacatatgtgcattatatggtgcatgttgtgagtattcattatatgtatagcactttatactaatatgtatatatgtagtataacaaactatacatatacatacagagttagagggagaaaccatatttatacatactatgtataatccatgcacacacaatacattgtccaccaccactatttgcgtatagtttccttgtcctttgaggccagctgatgactttcagataatggactgaatggtaatctgggccaaaaaatgttaatgcagctaccaaacttctaatgctcttagccagcaagtgctgtgtcatgcagtcctgagttgaagagttgagtgtgttctacaaattgtgtttactccattgggatctctcatgtcatttattttgtgcttggatgaacaattttgagttataatgactgacaaattgtgcaagcgatagtgctggatctgtcataaagaaataaaaagcattaagctagaagttcaaatgcacattttattatagcttgctgcttttttcaaggacttggcaactgtgttcaagattagcaggccatgaggagctrattcaagtcttttaatattattaggggtattagaggcatcccttcaatctgggaggattgacctggtatggtcaggtatgtcaagacttaagggatttgaagagaagtgtgcataaagggattttgttaaaatgatcccttaaaatgttgatcctttaagtgttttaggctgttgctccctgattcttcccctccaatcccctttctctccaagtagacaggatgtgcttgtatattgctttatattcatttaacttgtttaactcatctttatttcaaattaagacatactagatatgtttcttgttttttcttatgttccctatctttttctgaagcaagaaaggtaatcatgactttttttatttgaaatgtgttttcttaagagaactgtagagtcagtagctgtacattggaagcagaatatctgggggcatggaggcgcaccaagagtttgaaagggtccccaggtgattctaatgtacagccaggattgaaaatcaccactcagttgaagatacatgtctcttgattatataaggagttagtgtttcagctagaacacctttttggaaagcttgcccagataaccggttctttgacattattccccctcccacaattgagaattacttttccagtaaattcagatgatgatatctgttaatttggcccagaattctcaagtgggaaagatatcctataagaagcatgagtgtgggcgctcattcagagaacattttttaattaaaaaaattgacacataatacatacttakgaggtacataatgacattgcaatacatgtaatatattgtgatcagatcatggtaattagcatatccataatttcaaacatttatcatttctttgtattgggaacactcattgtgcatgcatggaattgctttctctataccagctctttcctgtccctgaatgttgaatgaagattgcctttttaggagattaaagagatctgcctaaatcctggrtatatctgtattagataartagatggagtgaggttccaggcagctctgtccaggaagttcaggaactgtaacagcacagcttcattgcactgccgcaggtgttgcacacaggtgaattcattaatgattaaccacagagtctgaattgacgygagatgaaggaaattgaaacccagcacctgtgcgaggcttctgcactagtttctactccaaagtcttacagaaaatgtttttctccacaggttcgaaccagtgtcctaccagaacataaggatcccccgccagaagttggsgtaagtgtttctaacgtttccagaaggcacacacatcacttctaaattaatcatttggattttctctggcctcctgcttggtaactgacaaataaaattgaattacattaacagggtgtggctcttcaaggaggcactgtcacatatttgctgaattgcatggaattcatttttctgttgtttcctgaaaatcatcctcaagtgaattcatatttagttcagctggctagagatgagcctagactttgccctgcaggtagctgaactgtgtttcagagccaagatttctggaccaacaggaggtgagggaaattacagatgtgatctctaccgcttcaggaaggaggaagagaaccagccctaggattgtggtattttctgtttcctgccacttaaacactgtaatgaaggtcaaaagagaggcagccaccactgttcagtccaatgttggaaaatcctgctgaggttttcttgctgcactgaactattgcctctctagcattcagaatttagagaagaayaagaaggtactgggtgctttctgcttagacaaggctagagtaggcggtggcagctcctaaaagatatagcccacaggctgaatccctgcgatctgtgtgttcagagaggaggaaaaagaccagaagttaattaggtctaagaagccctggggctgagccaactggaagagctatttgaaataccctgaaatcctacaggtacttgacaaccttcttccagtcagtgtgtagggcactgtactaggtaccattaattttctcattgaacacagccactttctcaaacctgccaaggaaggactccaaaaacatgcaccaaagtttgacttgactgagcagaatgtcagttatctctgcagctgttagtgaaaaagcagagggaaaagggygatgtcttgctttctcatgcctaacacaagcctctcatctcttccttgggactagttgagtaactgctttgacttgagggagtccttgcagtttttctgccttcaacctcttgtgccattcacttctactaccaatctctgtgctgactacacaaaccttcatttacttcctccagtgcatccagaaagttctccccagcttcagacctccacagacacaggcagatggacctctgtcagcctgggctgctgcacttcatggggagagggctcccttccacagctcagggctcagctcacatgtttccactagtaccaccctggggccctgcttccaactggaccctccatcctaaatgcayactctcatcacacccctggcactgcttcataaaatgtgagactttttaaagtattaatatggggaatacattattctatcaaggtgttccatttatttatcaaggttcaaggaagcttagctggtttaatttttttctcctgtgttcactgcctgccccgaccccactccaccactgctcttgtgttgaatcccccttgcttgaagctttaatgatattttggcccagtcgtgtagatttctccaatttttttctctcactcatgttcttgggaatccatcttaattattttaaaccttgagtctcttttctgattttattttcttctacctcctcccaccatttcccmctacgggctagactttctgtgactctagcaacgtgcagtggggaggaagcctaatgtgagtcccacacawgtcctgccctttcttcttttgattcctcagttgtggcagcaaagaggaaggagtagggagasagaggtttattctgggcttgcccctggtgagggcaaggttttcttactgctagacttgatgcttctcaggcaatggttacctgttaagagtcctctatgtggcagatactgatttgctggctctctgatgggcacaggtatagatatttctgaggcccttgtcaggttctctccatagcataattgcctaccatgggggacctggctctgggcccacttcctccactgcccacccccattccacaaccacttgttgtgagatctaccattcaagcacatgactccaggtcagccactttctgtgctgtccaaatacatgaaacgcacatgtacttgccatcccacatggaagaaatgcaggctgttccattgtgtggtttcctgtttcggctcagccatctctctgctgatcctttctatgagtgccagcagcttcaggcactggatcatattcaatgattctcaaaggagagacaatcagttcccagtggaggtaaacgtggtttagacacctctaggctttmtaagtgatttttggcaccagaccctcttggcttcagctttgaggataaagatattttcctgggggatgattaagagagaaattagccacatctctgaaatcggacaccttcctaaatgctgatctctcctctcttctagccctagctttatattaactggrtatattgtggctacttatagaccagcgtctctatactggctcctcatcaaggcrtgttaatgagattgctkgcctcaaacactgaaggttctttgaacatacaatggggtacatttattacattgcgtcttcatctttgaaaaaactcggctataattcctggactaaaagagaaatctcaattggtatcctgtgacatgcctatttttgcaattaggaaygtaccctaaggcaagtaacgtgacaaactggcttaaaactaatgaatgggtttgtttttctcatgttatagaagtcttgggaaaattgtccagggcttcagctactcaaaagtgacttgaagcaaccagactctatccatcttcctggtccttctttcttagagaattgcacaaactggccatggtaccccaggtagcacattctgggttgagtgaaaaatcaagggcaaaaagctcagctggcctatcccttcaattctggaaaacaataatttcctgggaaatttcattttgtatactgtcacttacatagtattggggagmgcctaagtccttagctagaagagaatctgggtayaattctcatttaaacaaaactgaggtgctattagtaatgaagaaagggcagaaagtgagttagataggcaatcagtcatgtctccacactcctgctagatgtactccatgagagcaaagtctctatttctaatattcctggctttrtgcttggaagctagcaaatctatgaactatgtattgaataaatcaaaaagcacaccatgattttattttgccaaccattttatgtattattagaaccaccagaaataaatgggtgggggattctagaaattactgtaataatacagtagaaaatctaacaaattttgtgacccatcagaactcaaaatggcaggtaagatttcagaactaaagttcaagcacggtaagaataagtctaaaaaggaacaatttagcatgcattgacttcctaacaccctcagattacgtgttattttggagagagaagttaacacatgttgaccacctatgaagtaccacttgttaatatacatcctatcagcgaatcctcaaaatatttccttggacaccgcaaaacagatcggagagtttaagctcttggccgaggacagagccagtaatggctctgtcattacaacatacaagggctttactcttcaagtactctaattttttttaaaggagtttagattttttattataatctttcaaatatgttaggtgtgtttctttgcattctcaaacagaatttagtggatgcacccaaatattttcttgatgacttagtcaagcaaatactaatatatgctcttagaccttttgaggtatattcacaagtaaagataaaattctgtaataaatgactttaccttaaagtgctttttaatgtttcctttgggctattcatcaacttttaatagatttcttcccaattattttttctttttgatgtatttttcaatgttaatagttcacttggtctttttctcttcctatggggtaggaaataatataaccatacctgttatggttaacagaaaaaaaaaaaaaagtactggggctatgaaaaggcctgcctgtgagttatgtgtaagagatgttgtgtatcagtcttatgatagaaacttcaacttttcaragaccttttaaaacttataccatagttcctatgtgttgttttatgatgataggtcaaaatattattgatatattcatttaacctctwaaccagcagtgttcaatggatataatgtatgtcacaaaatgcatgccgcatatgtaattttaaattttcaagcagctgtgtttttaaaaagtaaaaagaaacaggctgaattaattttaatatgttttatttaacccagtatatgcaaaatattattccaaagtttaatcaatacaataaattatatattcatatttcttttttcatactaagcattctaaattcagtgtgcattttatactgagtgtacatctcaacttggagtagccacattttacatgctaaagccagtggctacccattggatagcacagctctggagaatagttgaataaatttgaggaggtccatgcaaatygtaatataaaaaaaaaaaaacctgtgctttgaatacaggctttgtgagaaggatatgaatgatggaggtttggccagctgtggccatatgtatggtgctgtaccttctctgacccccttaaaggtgactggggagccacagaggatctgctgcatggagatgtcaaatcctagtgagcagtstggatatctgtgacttgctcggagtggctgcaggggcwggtgggttacactattcatgtggacactccctgtagggagaggccagggattctgacagatgcaccactttttttcaccctgtttgatattactctccagctaggtgagagtgatggaaatcatgcagcaaacaatttaatgattatctgctttggggttcttgcaccagaataactgagtgttgagttgtcatgagcaggcaagaaaggctagagctgcatgtcgtgyaggcagagagtctgtcagaaggaaagggaattgccacctgtcctagaaatgaggcatagcatggtggggatgaaagaatgctggacagagaagcaagaaacctgggttctaacttgccttctgcagattaactagttctgtgacatgtgtaagccagtttactcttagaggccccagttccttatctacagactatcagggccttaatccttaaggttctttaaacatcctatgtaatctaatactactaacagctataagggatcataggtaacattttctcaacaataatattcataactacatagtaccttttggcctttgtatcttttttcatctttttttctaaaatttattctaagttatatttcccccaaatctcatatttatttttaaagatatatttttctttttgtagtgcaggcatttctcatagactttttaaaaaatactttgccttttcccaaaagtgtttaagctgcacattagatacttttaaggcatctgacttctggttatatgatcttaatcactatgcaaagttctatttatgggagatgttttattttcctggctagatgctttctttgtctggatttctttaattttctcatagcaataactatgagaaagataagttatcataggcatttttttcagcaactaaggcctagagtagtggagcaacttgttcaagaccgcagacttcataagagagaagacagggaaataagaagtgacagtgcttagcagtagatggtgagcctgggggccggaagaagtaatgtaattgtccagattttcatttttggacagaataaytgatttagagccacacttcagacctctgagctccaactctagtgaagctttcccttttttgtctttattttcccctgatagaaacagcaccaaaggatattyagaaaacactgtcccttgaattatatttaaaatattaaaaaattaaataaattatcttaaattatataattataatgacagtgatagcaaagatataatagctttatattaaattattcttttacattagcatcatgtgctatagagaagactcttctcattcattcttttacaatgtgttcagtgagtattcacatagataaaagatttattttctaactttgaggrtgagagaatccttcttttatttatactgaggtgaagaaaacaagaaaccagctcraaagtaaaygtataggcaatcccattgtttgttgttgcagcataaaacaattgtcctcacattttttgattttattaatgtagtttatacaacatgcagtcctgatatacagttatttttaggattaaaaaaaggatagcattggtacccaaataataactcctcttgtctgacaagtttacgaaatgtaatggtatgatgccatcgttatccagattgatttttaacagattttattatttgtgaccattttcattatcctttgagatcaagcaagtggctgacagttataatggataaacctgactcatgggcattgttcttggcacactgtatgcactcacagtgcagccctctgttccagacactgggctcagctaggagatggacaagccaacgttctgcttccacaggagctcctggtctggtgaacaggagaaacattcaatgacttgcggtcataaattttacttgcagctgtgccttatggtgagtccatagtttatgtctgaaaatagcaattccacctgtctctagctgctacattccactgtggggtgtttgctacttttattgccaaaaagactgcaataatctcatgacatgtgtagccagctttatcaattttaaaaccacccatacctccaaaatcttaaaaggcaaatagaaaataatttgcaattttggagtttcataaaatttatgattgcttaaaagttttctttgagkgtgaataatgagtgggaatttaatttaaaagctatgattatcagtgaaggagaaagtaagatcgacatytctttaaaatacaaaatgctaaaataaaattcactacagcagtatacgatctgcatactataaaattgttttgattttccacatttcagtgaacagtagtttataaatagctgcaaaggtagcttttctcctatatgtaatagaatcacttacttaaaggccagtgtctatgccatttgttcattcattcattcattgtcagtaaatatgtaccagatacctactgtgtgctatgcagtggggggttatcagcaaacaaaagaaagctctttgtagagcttcaattctcaattattttttggagaggtkcaaaataaatatataatatgtcaggtggtcayaagtgtcaatagagaaaaataaaacaggaatagagaatagaggagtgtgtatgtgggaggggagtgtgctttcgtatagggatgtcttagagagcatctctggtgaggtgacataaatactttgattcaggaggatctctccgagtcctctctgcccctggctgaaaagtcaccctaatttctgcatgctttgctgatacagctcacaaacttccttctttatcttgattcactctacttcatcactcacggtcctatcatcagagcttgtttccacaaatctattttttgcctaatgttcctcatctaataatttggtctcagatttttcaggctttggtgactttgtgtctaaaccaggtctttgaattttaagtcaattaattgggtttatcattagcaatatttgggtatctccttcagaaccgagttgcctttcctatcctttcctttcctttccttttctttcttttttagaaatgaggtctcattctgtctcctgggttggagtgcagtgatgcaatcttagctcattgcagccttgaactcctggcctcaagcagtcctcctgcctcagcctcyagggtcactgggattataggcatgacaggcgtgagccaccacgaccagcgtgttttaccaaatgtttgattttaagccttttaggaccagctcatctaagttaaagattttaaaagagggagaaaaattccgacttgaagcttttctttcctctgcctagcagtctctgagtgtggatgyagcctttcatgtgtgaaataatttcctatttacctcgaaaaagatgccattaccctcaaattctttgtccagcctctcattctagtgtagctcagcagcagacctatgatgagagactgttctggaagaagtagcattgacttattgtggagtatttacattttgttaggctgcagtggcataagaaataacatgggtttgatattttcatatttactccttgaccttaagggaagaatgagagctctttttcatgttatttatcccataatattgtgacttttaagtcagaagtagccagggatattagaaagagatgataggttttttatcctgggaaagaaaaaaaaaaaaaaacaatttggagttttattctttacattgagtcaaaaagagtagaaagcagatattcataggtcatcaacacctaatataatagactaaaaaagcaatttaaaaaaatgtaacttaataagtgccattttctttcgtgtattagaatgaaattgtcccatgctagtaaagaaataacaaaggaaaaatgcttttaaacattgctgtgatgggggaaaaatataacatttctatttataacttgtacaaagtcccacataaaaatagctccaactaacagatttgctcatatctggaatacaaagttgttgctgccagtgatttgaggaattctaataagaggaacaacagcattggtaaatatggaaaatatatcatcttttattttccttcagttttcatatgcagagaaaattatagttagtgaaacaactctgggtgctgtattttacctcttgttattttctagcctgttggtctcttttcttttagggaaaatgatacattttcaccctttaatcctaccccatgaggtagatatattattgataattttatctctgttactgaaatatttgtcaggctaatagatttaatatttyattcttctaaagactmattttgtttgattgatgtgacagcaaaaatattaaagaacctcaagttaatgaaaccattctttctgttattttcagcgaagtttcttgggctatgccagttttaaagtgggagagctgctgaagtcaaaggagcaattgctggtcctgagcctgaggtgggtctctttgtttgtagaaatactgttaaagttaataacaagtgatatttattgatggccagtgtgtttgaaagtcacaattcttgcagatgttagatgtcagttctcaaakagctaatgttctccactgcagcaagttatagtgaaacagcaattattcaaaattgcattgaagttcatgtttcaggttgtgaaatgttattagcccttataagaaaaaaacaatattacattatcattaaagtgatgaaattctttgaaagtaagaaagtaaatataaattatgatcatgttattaaatattttttctcttacttatcaaaatgttactttttaatcaaataactttccagatttgaaatatgttagaggcaatattgtagttttatgataatagagagtaagctgattattcttttttcagcctattttggtgctatactattaaacataaaacacttatcagttaaaacacattctttcttgacacagacaatagatcgtagctaattctgagtacagtttgctttaaaatagaagatgagacaacagtctttaggaagtcacactattttaattactaagagcgttaaataaaataaatttttctttttaaattcaaagtaaatttgaaaacataaattttgaaacaatagttttctaatcatatagtaactttcataattatgcatacattggggatactgccttgcactatttttatggtataaatgaatacaaaaattgcatagaataccatttgtaaatcttaagactctcttattttgatgaaacatggagaccactttcaaggaattggacaatgtcttaagtttgtttgtccccttccgccaaggacccacttataaccaacaatttatttcagtaaagatatgatggcttatgctagcatctctatgccaggatttgtctttttctgattttttctaatccttacagctcctcattttgttttgataagataatttaaactatgtaatacttcaagcagagaaataagttgtggattctaatgaggctgccatccgctctagcttcctttaggttatgtctcctaaacatmtggtgtcggtgttggtgttatattttgtatgggaaaacatataaaaatctttatagttttatgatattattacaatacagttttgctgctgttactgttttcagtttgaggtgtaaacggtcagctaaaaagaatggctatcaatgtcacagataacctagaaaatatcatcattctagcctgactattgaatstgacccatatgcccctggattcataacatgagatgtcaaacattgagttgccttaggactactagcagtccacatgttttctagatcagatgcatagcatgttcttcttcatcttactgactcacaagccccagtattcattataacataacagtcattaacatcaggagcatactacacactagtgcaacatttagacattggtttgaaacagaaatcaggggacaagcagttcttagtaaaattaaaattagtgaacacacagtaccttagagagaggacaagaaccgaagggtcaagtttagggtattacccttgaaagagaaaagaaatacataaatttcatatttagatgaaarcaagacaaatttcttcacttttgattttaatacccctgattcctagtcatttgatcttgattatataaaacaaattcaacaaygaagaattgacttttctagaaaaaataatgttagaaaaccaattctgaaatggctaggttattatttttcccagttttgtgctttgccaaatttgkggttttctctccctatgaaccagacagattatagatttatcgtarcctcttgatttctggtagatggcttttttaaaaattctgatgtaatttattttctttccactgattctgtctcttaagtattgagttagaagagccttaggtcagccttaagaagcatttttgttttgtgttgtattttaaaatattcctttgcactgattatttctgacttttattttatagtcattaattttaaaacaataaaattctctgatttctgtaaaacaaattcacagaactaagagcattccatgaataaatttccttttcttcayggttaattttagcttccccaaatcttacagttgtgcttgtattcactgtttctttgggggcttcttatgtgataattcagattctaaaactctcaaactaattcgaccgagcactgtgatttatgtagcttccgtgtcatatgtgctttgaactggagatcaagggcagaggatayattgcttttatttttttttcctgcagaaaacttaaaggaacaagacatgtgcatctaatttatagatttagactcaaacttaatgaaatatgatgttgtgtatttttaaagatgtagagtaaaatgtgtttatatatattggggaaaatgcctctgatgtataaagtggtttctattcgtatgtcacctttagttaaatgcgaatttactatgtttctgagtgtcctarcatctcaaatggacttgggttctctttaataatattgtctacatctttatattacatccactctgtttcactactgtgcatttggtagttcctgtctccccttacttcttttttatctcaattatattttctgtttttgttttctaattcattgccgtgtagtcctgacttctagacttgtaaacaaggtagagtttctgtatggaggattataattatagctgtgaaagacacttgataatattataagaatgataataaggatgacaataaccaaccatgtgctttgtgctctgataattatattagagatgtctcattgacccttatcaaatgagatgctattattaatttccatttcataaatcaagaaactgaggtatagaaagcagttaagtaatttgtgtaaagttataatgctcttaaatgggaaaggcagggtatgaaaccacacatttctaactgcaaaacccatgattttaatgaccgacattttgtctctttcaacaaaagagaaaacagagaactagttgaaattcatatcacatatcacataccttactaatggcagagcaaagcaaggactcaggcccagaaccagtttttcatggtttcttccacgtttgacttcaccacmgtgccgaggcttacagaaggtgatgactagaagagtggtcctatgccagggagarcttgggaatgttaatcatgatggaaaagtgygaaagggcctgttagtttaaggggggattgaaggctgagggaaacctatggaacgtgttcttatcccmgaaccctgactctatcctgatctcgatctggtttgctgccraaacacctgacaatcctttgctctaccaacctgaygtaatttttgggagaccagwtaagcagaactttggaacattgtaataatgtcttataagttgatgaatataaaagttaaatataaaataatataaaagttgattctctctgtggaaatgatactagcagtcaggaaaaaaaattatattgatcttaaagtatttaaacaaccacagatgcaaagcaacaacaactacaaaggtaaaatttgtttcctaggaaattcatctcaggggaatggagacagaggaaagtgttccagccttgtcacagctttgttgtgtgcctctgcacagtttggatttcactcagtgctcattcattcagcaaacatttactaagaattttttatattcttaagtacaggggtagagttaatattttcccattgatgttaccagttatgtgtttaatgaaaaaaatctcattattgagcatctgctagcatgcaaggaatatgtgaggtacttktcatgcattatcttatttaatccatgtggcattatcatttgtcttatagcaacttgtctaaaattctacagctgctgactgtgcaagtgggattagaactcagtttggtctgactccagagcctattctacttttattttactacctagtaggaagctcaagatctaacggaattttttcttccttgtccattttatattcttttgtttaatgggttttaggagtctcaattaatttttactaatgttttatattaaaattcaattttatctgcctgcaacatagtagaggtttaataattatttgttggagtttcaattcatgatgattacttccttatgcttttatggatgctaaatgtaatgctagcaccaagacttcatttctgggtgtaatccatctaaactggtgaatattatgcagtctaagtattagagtatatctgaggcaagcaaatttcagagtaatggtgaaagttgtaatctgttttaaaagctgaaaatcttagaatctacatttatttcagtacagggcactttaccttgtcacagaaactttcagctcatcttaacgaggactttattatttcttttrtaacctacatgtcaccacacccccaccccaccaattaaataaattttatatcattttatcagggtgaatgtgataacactttttcttgaatagagatgtgcaagtatttattcatacgaagggactatgcttttcatttattacttctaccacatttacagtagtgtttttatggaacaaataacataaaacactgatgatcttaaatggatatataattatattttataatgtatagatgtatgcaagatgctatgaaagaaaaacatttaacttatactgttttttaaatttctcctattttatgtagtatttatatgtatacctatgcatgcatatgtacatgtattatagattatgtggatgactatgtgtttgggaatctatatcattttagaacattttgcttcctcacaatgaatatttatttcctattttttgtcaaatgtttatgcctagagatgtaagatccaaattgtgaggtttttaagcttttattttttggcattttggttaattagcctccttaaatacacacacatgaacatacacaaagttcagttttgtagtttctgtaaataaaagaacaacaacaacaacaacaaaattccacatatttttaacgtagtcttccaaaggcgcattcttaacttgagagccagaagcagcgataaggagaggctccatcgtcttctatacaagcatagtcagagtgataaaaagataaaactgctagtggcacctctcaggttgggaggccaggcatgttttataggccacagggcagtggattgaaataagtttgttgctggaatcctgtaagttggtgtgaacccccacagtgacctgaaaacaacctggccatagatagacaacagggttttaaatgacaaattttgttttcaaatgaaataaaacattcttagacttttgattttctattcctacacttttttgcacacaaataaagttgatgtatgtcttcttactttaagcatggaatctatttgttaaatcgtgtctatgatgaatacttctataatggcattttttcctatcaatatctacttaaacttcagagatgactttaaaaaatcatatccaagccccttaatagtcatgtgtatttggcataaatttctttctcttttaatagtcttccagttttttgggggggtggtagggggaggtaccagaaagtaagattctaatgatctccacaacagtaagagttttccacgtctaaaatattttgtatattaaataaggtcaatagaaagtgattgcagccaataaccactctttggaagagagtagcacatatatgattaactataaaacagaacagtgttatacttcgttgaaagcatggatggaaagcatggatggaaaaattagaggaaaaggatggcacataagtagctaagtttatgcttttgtgtagaaaaaaaaaaaaaaactaaaaacttcataagacctaaaagcaatgcatcaaaacactacatttttttctttgaaagtgaacaaggccggatgcgatggctcacacctgtaactccagcactttagaaggccgaggcaagaggatccctttagctcagtggttcgcaactataacatgccaaaaccccatttctacaaaaactacaaaaattagctgggtgtgatggcgcatgcttgtagtcccagctatgcgagaggctgtggttggaggatccctttttgagcccaggagggtgaagttgcagtgagccatgatcgtactactatactccagcctaggggataagagcaagactctgtctcccccccaaaaaaaaaaaaagaaagaaagaaaaaaaaagtgaaaaagcaggaaaacatgtgagtcaacagcaaatgcacactaatgagtgatccaggcacacacatatgagcaagactcactgtgctttttgcatggtgacaggaagttcctccatgacagctctgacactgacttggacctcataaacatrtagggagaggtaaataacactctttggagtttatgatgggttaagaatttcaaatgttttatcataatcttctgttcgcctcaatcttctaaaagatggcataaaaatgattttatttctgcttcacaaataagcaaactgaggaacagcagtccaacttcttaatgttgcacagctgagaaggaatggagattattgagaagaagtgttcgtgatatcaagtatttttcagagaatatgaattttgcttagaattttaggatccaattattattatcttttttttttttttttttttttttgagacagagtcttgctctgtcaccaaggctggagttcaatggtgcaatgtctgctcagtgcaacctctgcatcccgggttgaagcaattatctgcctcagcctccagagtagctgggattataggcgcccaccatcatgcctggctaatttttgtatttttagtagagacagggtttcaccatcttggccaggcttgtcttgatctcctgacctcgtgatctacccaactcggcctcccaaagtgctggggttacaggtgtgagccaccgcgcatggcctgatcaaattattttagagaccagagaagacttcaaacctggcccttcagcttcttcttggacccctttcatgacaggagactgaaactcagaatttttcctcccgttttcagacaggtctagtgttagaaaagtatttctattgtatctcaagttttatctctttaccacagtcccaactcttctttgtggagttaagtagaacaaggctcatgcttttcttctataaccacatttgaaagcagctctttggtccaactctaaatcttctttcctgttttgtttgtttgtttgtttgtttgttttttgccttaggaaggcatgtgaggtagtagaaacaggactttcataccagacttgggtgcaagtccgagcttagtcaccacctgyattacccagacatgtctctttaacatctattaatggaagtagtaataaactcccttccagggtggttctgggcaattaataaatgtagtgaagttccaagcattgccttttgcattagagaaaaactataaatatcgtttccctttattcttgcatgaaacttactaagtccctcagccatcccttacttttkgcttggttygcttgcttaacttgttgaaattcctttttagaatgtgacagctaccttctctaaacttggtgtgttaggctgcatttgcattkctataaagaaatacttgaggctgggcaatttataaagaaaagaggtttaattggctcatggttttgcagactgtataggaagcatgacaccagcgtttgctcartctctagtgaggcctcaggaagctgttacttacggcaaaaggtgaagtaggaacagtggtctcacatggcgaaggtgaraacaatggaggtgggggaggtgccacacactttgaatcaaccagatcttgcaagaactcactcattatctctaggatggcactaagccatgaggaatttgcccccatgactccaacacctcccaccaggccctgcctctaacagtgattacattttaacatgagatttggagcggacatccaaactatgttacttggtcagtgggagaggggttgacttaacyctggatctggatataacatttctattatccaaggaaggsgtgcttacctgaaacctaaattctggctttaatcactctggcatcatatggcttattgccaggtagcagctaccagcaaaagaaatatggacagcaatttggttgaatcaggcaacatgccagagttgggagaaaaatacttatttagactaaaaactttagcaataaaaggttgaaatcaggacagaaattcataagtgtaacacaaagttttgcttttagaggttgctgattcattttattgctgaatatatcaaaaactgtccagagaagtaacttcaagtgacatttcttggggttgaactgtgacaatgaagggtgacatcaaatacagaagtaggaacatcttcttataaaactgattattttatgttaactctgttaaaggcccttagggacacgattkcctgaaattttcaaaaggctctaacatcagccattttgtaataacttaaaattccatcaatttatagaacttggggagaatgcaaagcatgcaaatgtgagattaggacagtaaagaggtagaaagagcagatgatttagagacatatctgtgcccaaatcctggctcttctgttgcctrtcagtatggctgattgttctgagactaagttatcttatctgtgaaatggggatactagtggtacccacttcgtggggttctctgtgaggatcacatgagttactaatgtgaaattcttacaacagtgtctgacacataagttcttgataaatgttagctattatttttatttttagttgattagcttctctagtgccggtttttgttttccaagacaggataagacacattgtacacaaactatctgaaatggcatctaatgcaaagcaggtcctcattgtactacctactatttaaattattatcatcagttcttttatttcccacttcattcaactagactgtttttcattataatttaaatggctctgcagttatatattctgtattttttttatgttcctaatccatttaaataaagctgtaggtatgrccatggaaaccarttagyactttcttagtttgcattatccaaaaggtgttggatttgtcggattgcaaattggtttagagttctcmgtcactgaagggacaacacaaaccagagtacacttcaatagttcctcaatttgtatagaaaagcctgaaacctttccttttttaaaatgcaaatcacgtaaagttaatatctgtacacaaagacctacctgcttaagaagtttgagagctaatttagctttgaagataatttgcaggaatgattaggcctgaaaggaattatatttgacctgaaaattttgtattggatttgcccatatttaccaaagtcagtttcattattatcactgtgtttctgcttcactggacacatttatatctgctttttccagtgttgttttgtaaaaccggtatccctttggttattaatacatgttttttgaataaaggaattctgtggccaaataagtttgaaagtcctctaaaaaaaaaagaaaagaaaaaaaaaagggaaagtgaatttctttcctgtaggacatctcagagccttcagtagcctttcaaggccctcgaagatgctcagaggacacrtgtcrcctgcagcttttcttaaattaatttgaatgcaaraagctttcatcatggaatacttatcaacagcttattagacactatgttccaagaaacatagtcatgttattcagaaaatgctgatttagaagaacaacaaaaatgtatttttcaaagaaatgtgtgagtggttgtctatgtgtattttctgccataagcatattctgtaacacacacatccataggcaggcatgtgatcctcacccaaatgaacactcaccccccaattccccacacatcatgcctccatccacatgcaggtgctatacccccatccacagtcattgacagacctgtggcatcttatactcatgcccatgcacaagtttgtaatatttgtacaagaagtatggcgaaaagtggaaaaatactcactgtttctttgatgttcattgacagattctttttaagcttgcgtaagtgaacacatatttttgtaatcacctaatattttacctaccccaaactgaacttagctcttatgctgaaagctctgccttttgtttgtttcaggttaaactaagacccttcctacattcaggtaccctaaatgtagcccaagctagaaatctctgcatcattttcaacttctcctttctaaaattcttatctggtaatgttcttttctttcttgaaactttatatgtcctctttcccttccccacaccactcctctttcctcagtgaacatgaacatctgcacatctgctcagcccaggtatacaaggtgcttcatccacagcctggcgtaagtctgccyttttttttttttttttttttttttttgagacggagtctcgctctgtcgcccgggctggagtgcagtggcacgatctcaagtctgctttttcagtttcatctctacccacattattctcaatcctgaccacctcttcttacctcatttatggkggcttgtgggtacctaacactttctaaaggtgaaatcagagttcctttatttctctgggatccctattctcatgctttttgagctcagtttcaatttcatccagcaagagagcacatttttgtatgtgcagatggtgcaccttagattgctccccgtgcgtgtccactttttccccaccatttttttatatcccttgtccaaggaagatatcttatccacctggtattctccaaatttactcgtactgggaattgagaggtaatagtctccaggcatgtcagtgagaaggtctagtcaccatcccccaccacagcttaccattggcctctcaatttcctgtgaccaatgactgtctttccatcatcagaagcttaggggctggaaaaaggatgtcagagctcatcattcctactccagttaagatgcttaatgatcattagaaggtcatcattttttaactgcttccagtgaggttttattttgcatttctatttatatattttctttttacaatacatttaggggttacaaaggtagttttgatacatgatatattgcataatggtgaagtctgggcttttaatgtaaccatcccctgaatagcgtatattgtaccaattgagtaatttatcatccctcaccgccccctcttcctcctacccttctgagtctccagtgtctattattccacactctgtatccacgtgtacacattacttagctcccacttataagtgagaacatgtggtattttaactttctttttctgagttatttcacttaagataatggcctccagttccatccatgttgctgcaaaagatattgtcagttctaagtgtgagttgtactgaggataccatcctaaagtggagataggaagttacttgcctcttggcaatgtattaccctttgtagcgtactccagctcaggaatttctaccctaaaccgttaaatgacattcactgttgtctgttgttctgtgtcatagcgtagctatttcatagtaaaactgtggctaagagagattgtttgcaatagtgcttcagtaagataaaggattgagtcagggaaaaaatgaatactgtttaattcatggaagatagggaaacgtagaaaaytcatgaaaaataatagacaagacagattttaagaaggtagaagagaaggatgacatcaaacaaataaaatatgtagaataagacrgaagtaataggcaagtttatgttgttttacttgaatacatttagtgccaacataaacagattgctttttttttaatgctgtgctgcaatggaggatgatcactttgcatccagcctatagttttgtggttgatccgctaagttccctgatcgatgtacttaagcttaatagaaatgccctgtaatccaagcactttgggaagctgaggtgggtggatcacctgaagtcaggagtttgagaccrgcctggccaacatggtgaaaccccgtctctactaaaaatacaaaaaatcagccgggcgtggtggcaggcacctgtaatcccagctacttgggaggctgaggcagtagactctcttgaacccaggaagtggaggttgcagtcagccaaaatcacgccattgcactccagtctgggtgacaagagcaagactctgtsttaaaaaaaaaaaaaaaagggtataaarattaggtaattaccttttttataacatcatcttgggctgattagtttattgcattataggacagttttacatcttgcatagaaagtaaagttttaaaattaacaaattatcaaatgaaagtttaattgaacctgactgaagtgttactaggcatatattacattatacaagaaaaacattatacaagaaaaacaaaagaccaaattagcttgtagagacatgccaaatgttacttcttttttcctatgttcacacacgtaaattgggaagtaaacacacttctttagagcttaatataaaaactgattgataaaaacaaatttaaggtatcataataaacatggtctaatcctcatctatccattgatgaccagagcagatcacttgaattttattgtactttttaatcttcccttatatttctctgatgcagtctctctcagggaaaggatttaaaagtttaaatcctaaacttagaaatggtgtaagtggggattatttttctcttatctagaaacaaattgaagattttccaggactcacacaataaataacagagatggtctctaatggttcttgggtttgcttgtttgttgggcagtctgccaactaacactaaattttttggctattgacgtttgcttctagtatcaggaaaaatgaattgcttctatgaccaagtgagatacagtttttaaagcactttcaggatagacctgtgattgtaacatcgaagaaagttggagtttcatcactgttaccaggagttcattactttgcttaaacatcccagtctatctggtagtgataataatatcactgagattacttcaaattgtggttttataagccagatttaaagaaaaggatctcctatactttaatagaaaaataaagttttcaagctattctttctttcatgtcatttctcctttttcggtactcccactagtccttgaaacaagtagtatttgagtgatgttatctttcccactaagttcatttgaaaaaatayattgagacaaaaatacatataatatatgaaagatccrgggagagggaatgttaaaaacaaatattactggttttgtatttgctgtaaaattgtgtcattttctcagagattgtctttgtaatgcctttaaattatttgagtccaaaaatgctagtcatggataggaaatgatgcagcacaatttcctttcagggctaagtgaagaaaaaaatgaaaatrtaatttttagtgaatattttttctttttttataccttataggtccattcctcaattagagctttatgaactttctacctaatgccttccctatagagagatggagtcagaaatgaaggctaatgattttccaagtgacaaagagggcttccttctggagccaattttaagaataggatgctgggcaactgtgaagcgagaagacagtctgggagtagagagcaagcaacattttataacagtacatgaatacccattctaggaaagagtttcctcttctaattttgagtcaaacatgtgactaatcagcatataaagctgacacatgaggtcccagtgaagattgtcgatggccgtgtacattacccataatgtcagctgggactggaaactaagtcacatcacatttaggaattgtgtctaagttctgtcattagttagacacatcacttcagaaagtcgatctttctttgtacstcaattatgtcatctctaaaataaaaaatttgagttagatgagctttcaatccctagtgttagttgcctgatgatttcctccatcttgtaagagatgagaggaaggaagtaatttttgcrttacttagaagacatgattaatgaattatataaggaaaagcttttggtctttatygggtaattcctatgttcctggaagatagcccttctaggatcagatttaaagaataagtctttagaaacagaggcactgacagagttctgagggcttttcacagcctcatctataattgggacttctaagagcagactgtatctcataaggctgatttgagatttaaaaataataataatatgttcaaaaaaattgaactagtgcctggtacatagctgccaataaatattggtcatcattcctatcctcatcatcaacttgagtgtcttaaaacactgagccctgaatagcccctacattctttgaaaataaatatccagctccaggttgtttgrtgcctagctgtctttggtcatacataccacgtcccccatctatggccagcctggtccagtgggtgatcagtgccaatctcattggaaatgtggcattagaggaaaaacataaaggagaaaataaccatgtagacatcagttgggaagtggcaatggtggtggtggtagtgtttcaaacaaaagaaattgctagtgcaaaggccctaaacaaggagtttcattggtatattcgaggaacagtaaaaagtccaatgaggcaagagttgagtgagcagtgcatggaggagaggtaaagaaataaggccagcagggcacggtggctcacgcctgtaatcccagcactttgggaggccgaggcaggtcgatcaccaggtcaggagttcacgaccagcctgaccaagatggtgaaaccccatctctactaaaactacaaaaagaaagcccagagcagtggcaggtgctagtaatcccagctactcaggaggctgaggcaggagaatcgcttgaacctgggtagcagaagttgcacagagctgagattgtgccactgcattccagcctgggcaacagagtgagattccatctcaaaaaaaaaaaaaaaaaaaaaaaaaaaaaggaagaaagaaataaggccaaggtggtgatgagttccaggtggtatagaaatgaaagccactgtgcccatttcatcctttactctgagtaaagcttggagccatagcagagttttgagcagaagagtgacctgacttatgctgtgttgggatcagaagactgaaggaaagcaagagtgaaatcagggggaccagtcaggaggactctgtcttaattcaagggaggagtgatggtggtttgcagggaggtggtaagacatggtcacattctggatacattttgaagaaaggacaggtagaacattgtgacagcatgaataatgtgagatttcagagaaagggaggaaacaaaacttaattaaatagttttggtctagatttggggaacaatgaagttgtcgctgaataggggaagctgtggtaagacaggttttaagagaaagattgggtcaccatggagtactatacagccataaaaaggaatgatatcatgtcctttgcagggacatggatggagatggatgccattatccttagcaaactaatgcaggaaaagaaaaccaactactgcatgttctcacaagtgggaactaaatgatgagaacacagggacacagttggggaaacaacacacacggggcctgtccaagggctgggggctgggaagagggagaggataaggaagaatagcttgtggatgctgggattaatacccgtgtgatgggatgatctgtgtagtaaaacaccatgacacacatttacctatgtaacaaaccttcacgtcctgcacacgtacccttgaacttaaaagttggaaattttaaaaaagaaagattggaagttcagttttaaacattatcgagtttagatgagttaagtttgtaagaatgaattaatgaactaatatacaaaataatgaaggaaccctggaaggcctagaaaagtattttaaattacagtcaagaaaagcaaatttctgaatagaggaaataagagagaaaaatcatcaccatattttaaaaattcactgctaaaagtatattttagaaagtctctgtctgatgctttcatcagacagtcccataacacatcaatttattaaacaataccagaatggagaggagaaagtataataaagataataacataatggtttaaataaaaaatacattgaaagtaagaaagagtaacttgacattgcagaaaactgaatcagtgaagcagaggataaacccaagcaatattccagagttcaaataatatacttgaatccttcactgattctgcagcttttaccaccagaataccaagaatgtaataataacttactgaatgtttgtacacgttgtctcatttaagcttcaaaatatctcataaggcaggtaatatattattatccccattatacagatgagaaaaataagtttagaggtgttgagcaaattacccaatactatatcgctgttatgtttcagagaaaaagaaaaaaaatagaaaggatgagagagaagaaaatgtataaagcgaggacaatgtatagaactgtaattaaaggcttattttagggaagataggccagattcagtaatcagccttttctttttttttcttcctgagacagagtctcgctctgtcgcccaggctggagtgcagtggccgatcccagctcactgcaagctccgcctccctggttcacaccattctcctgcctcagcctcctgagtagctgggactacaggcacctgacaccacgctcagctaattttttgtatttttggtagagatggggtttcaccatgttaaccaggatggtctctatctgctgacctcgtgatccacctgccttggcctctcaaagtgctgggattacaggcgtgagccaacacgcccggcctagtaatcagccattttaagataaaaatttctagagatttacaaatacaaatcaagtgttttctgtgttcgaagcagaagaaataatgaccaatattaaatcatattctggcaatttgtaaggtttgaggtttgaagagtgttatggatgaatttttgtgttccctccaaattcatatattgaggccctaccctccaatgtaatggtgtttaaagatggagtctttgggaagcaattaagtttggatgacttgatgagtgtgaggccctcatggtgggattagtgctcttataagaagggatacctgagagcttactctctccctcccatgtgaggccacagctagaaggcagccactggcaagccaggaagagagccctcaccagaacccaactctgctgagctcagacttccagcctctaacaactatgaaaacaaaaatgtctgtttttttaagttcttcagttttatatgctattttgttatggtagtccaagtagactaaaataaagatgcattatattctaatagagtttgtggaatagagctttaaggccctattcttattaaatcaactgtgtgttcttgttgttatcgctaataattatgattttaaaattatcactgttgccacaggtctgtggcaagccccaggctaagggtttctgttccacaggatggggtttttaatggttgtcaagaataacgcctgcttcaagagataccaagttgagatttagaagaaggcagagggtaaattaattgtgatgctcggaaatgcttagtaagccgggacaaaaataacacaacatgcccaaactcagggtgacagtttgcgtaaccaacagagaactcatttgtctgactgttatgcctatagaaaaggggatataatcgtctgaacagccgacgcttatgaactcccaaagtatagtgtggaggtattttgtatttagatgcagctatcgtcagaactaccacttaaaataaactttttgggactctgatgggagctatggatggaagcttgtctatccctcaaggtactgaatgatttcctggttataattcagaaagtagggaactcaatgccagaaacttcagaarcacgtcatagatcacaacagatccattggagattatatgcataacctaatggaagatgaagaygcttgtaggaaacatttttctcaatgcataaagaaaattgtaactctagacatagaggagatgtataggaaagctcacactgctatactcatctatgagaagaagcctaagaaagaaattaaagacaagaggaaaatgtctctagctcggaagaaagatcaagtagcttaaaaaaaggcaagtgtcctcatagctcagtagtgggctgttgagacacaaaccaaaccatcacaattgtctgtaaagacttttagataaagacaataaactaattgatcaagcagctaaaacaagatcaaaaagataaaaaagtgaccaccactttatattttggttttcagaaataaattttttaaaattagatgcatctttctgatttcttctactcttggataaatcctagcactgctgatgacttgtaaggtggccataagcccttcatgtaacctctccgggcctgtttctacaaaatgcattgagtgatactgaaggttattctcttccctaagaagtctgatttaagtcaattctgatacaaagagttctaagaaatttatctcagagtaagaaagaaaaaagctatatccagggttatttaaaacaagtaaaccttttatttaaaatacaaatttcgtatcaattctcaaagatttacaaaaatawatacagcaatctctctggaattggaaattttaattctataacttttagtttttactgtctttctacttcctattagaacctctatctgccaaataccaaaatatattctttttcttacatggattcttttatttagagatgacaaaggccatttaactactaatagataaaytttcttataatcggaaatctctaaataatgttctaaaagtgagctattcatagaagaaagtagatggctttcccgtgtactttatgttgaataaatggatgcaggacatttgatttattcccactgatctctagaatctatttaacatgaattaaagcggaatactgtttccacgtagctgagtattttgaactttgctttaattacttttcctccttttaacaaaaaaagtcctgtaggaatctttattgttctatatagactgcttaaatcgtgattcagtcccattttgacctctaaaataattaccagatgatttagtaatgcagagttaagactacagagcagaacaagttaaaatcaggaaatggaaactttcagatctttatattattttaaaattaatgttgccctgtctgcccttgcatattttgcctagctaaactgagtttctttattgtcrtcataagtgttactcattctcaggtgatttttcaccatgcagaatccctgtattcctgggtcatctttcatctgcatggcggatcatccttctacctctctgtccacatcctactctggctctagcagcctctgctctccaactttactctgatacgtgaggtccatcctcagcccagtgacctctcctcaatcattcccctttatttacctagaaactggctttcttccctgcaaccctgccaagtggctgcccttcatacctggtataggataggcatcctctgaaaacacttctggattgagcctcatggcctcagacatggtatacctgaggccatgagcctcaatccttaggtcacctagagatgtcacctcccttcatggtatatctgaggtcatgaacctcaatccttaggtcacctagagatgtcacctcccttcatggtatatctgaggtcatgagcctcaatccatggcctcagatataccatgtctgaggccatgaacctcaattcttacatcatctagagatgtcacctccccttatttcatgaaaatttttacttggggtgcactctgtctcagttcagcattactcctcccagacttcttgtgattcagtagccacaggggtgcccttttcttagctcaatggcctctcaggcttttctctgccctatttgagtacccattctcattgtcatctccgagatctcatcattaatcccaatgctccagagtctcaattttaagcatcctattttctgagttctatcacctctctttccagtacactccctccagttgctctttgactgtcccgagtcattgatgtgaagtcctgctctgtcctacacagcccctcccccacatccacttttcttatccatcactgagaaatcacaaaacgattccctcgcatataccctcaactcctgtgccccgctatcctgttgctatattccacaagcaaaatataaattgattaactgattaattcactgatttaaaaattacaacaaaaactgtggctaagcccagagtttcgcatacctatttcacacttgtattgctgtagctgaacaggctggggaaacttgacttccgtgcttacaggttttatttggtacacgacccctagttatacctagcaagggtataggtacccttgctaatactgtacccactatgctcccctgattcattcactctcccactttctgggaccactattttacacctccacattcctaaaagctctaaaatatctctcctcttcctctttctctgctgatttatagtttctgtttcactgagaagaagaatctgacaagttcccactccacatttaccaacctatcagctgatttatctgattttcatttccctgagaaggaaaatttgacaatttcccatgccatgtttactagtctacctgcaccttctctacctttcttcctgttattatacaaaaactcccttttcgtttctaaagtcaactcgtcttctgtctagtgttttagattctatctcttctcacttatttgagaacattattccagcacttatgtcatttttcttttgcatcataaattattttctctgctagatcatgtgtatcagcrttaaaaaatgccatcaaatctcctgtttatctttctaacttatgtcccatttctctggtcctctttatagcagaaccagagtaagaactatgtctactttgcctccctcctctgattgtcttttgaatctattctcatcaggttttcattcctattactttagcagctaaacagcatttgtcatgatcagtaatggctccatattgctaaatccaaaggataattgtcagtgttcctcttccttgggatatctgcccagtggatcaattgctcactcctcaaaacctattcttcccttgttatctgggacaccagacttcattttcctgtggtcatttcttctctgtttcttttgctggttgctcctcatcactatcacctataaatgttaaagggtcctatacctcagtttaggatgaaaagtctcctcttcactcttcattcactttcttccatctagtcttaaagcttttaatgtcatctgtattctgatgattcctatatgcgatgcatcacataatgatgttttggtcaatgacagactgcatatacaaccaatggtggttccataagattataacaccatatttttgctctgccttttccatgtttaggtacacaagtactaaccattgtgttataattgcccatagtattcagtacagtaacgtgctgtacagctttttagcctaggagcaaaaggctatcccatatagcctaggtgagtagcagactatatcatctaggtttatgtaagtacactctatgacattcacacaaggacaaaattgcctaatggcatatttcttagaatatattctgtcatctagcaacgcatgactgttcttatagctctagccttggccaattccttgaactcctgactctaatatccaaygacctaatgataattgaacactaaataagtgtctcaaatttaaaatctgctaaactgagctcctcattcctgcctgctgcccaccatgtccccaaattctgtttgtcctcaccatctccccatgtaggaaattgcaatgctacccttcctattgttgagggaaaaatccatgtagtctctgattcctctttctcatattctctatagccagtcagtcacagtatcttattagctctaccttaaaaataaaactaaaatcggatacatctccycttcctcctaatttctccaaactcatcttcatgatcctctctgccccctacagtttattttccatattgcagcccaagttgtgtctaaaacttgtcagttcaaaatcttctgttgattatttgacctcactcaaagtaaaaggcaaaggtcttacagtgttttctatagagctctacatcatctcactccccattgctgtrgtaatcagaatgctaagatgttccccaagattctcagcccctggtgyagctgctctacataacacccgccccttgattacaggttgcaccgtgaatatatgctgcctgtaattatacacaggtggctgggataaccatgcataatagtgtcttagcagactggagatggaaattctgaccttgaggaggcaaaccaccatgtgaactgccaatgtggagggccttatggcaagaatggccttgagactgagtgttatcctgataaccaacaagaaaatgcgaacctcagtcttaaagccacaagaaaataagttctaccaacaagctgaattagttataacgtggatttttctaagactgcattccagcctatatcttgatttcaaccttgttaggccctgagcagaggactctgactggacttttgatttatagaaactgtgagataataagtccagtcagagtttaggtcagtgggtttatggaaatttgttatgtagcaatggagaactaatacatacccatctgatttggtcttctagtcctttcttccccacctatctagctttagccacattggcatctttgctgtttctcaaatagggtaaccaggattcacttcaaggctttgggatcatctgcttctttctgcaaaaatcttgccccaagaaggatgtatgactcatttctttacactttaggtgtgtgttcaaatgtcatcttattaaaaagcctttcccaaccactgaaaacaaagtagcagccccaacacagcactcatccaccttttaccctgcttaatttttctccatggcacttgtcatattttgacatatcacatttgtttatcactagaatataagttccatgcgggcagagaattttgttctgttacattattgtgcatggattagcgtttaatagtactagtaagtgcttaataaatatttgtaaattagtattttctgtaattttgaccttaattttacatctttatggtgttttatgtattttaaaatgattttattatgtgttgtcagagtaaatgagaatttaaaaaatttaaaaatcacaggattttataactgagtgacaaacatttaaaacaaatcctaatgcaattaagcataaaaatacagggattaagaattgctcagtttcagagtacatgcctcattgtgtaatttaaagctcagtgaatttctgggtgcacaggtttgaaatacattacactctaaaattatgttcaacactgtataacgttgaccttttaatactagctgttattttagagatttctttgcattctttcctaccattaaaaagacataaaacccaaaagcatacaaattctctatatataattccaaatttgaatattaaatattgtcacatcactagcatttaatactgattgtttaataatttaatactccagttctccatacctgttatctatggaaagttttcagagtgtctaaaagcattttgattggttttgtaatgtttacaaaccattcatgtaaaaagtttttgttgaagaagcaaaaaaaaaaaaatgcttagctatctatccagactgttttcacctggccttataagtgtatctattttttgcttctgaaaatttccacaggaagtcaggtattcccagtcatctatctataacctcctataacatatttctttcttgccacaatcatcttcctctcccaatagtctgtgtttaaaaggtgtagcactcttttcctctttctcttactcaaaactaaaaatacaaaaaaaaaaaatgaaataaatgaacttaacaaaaagtctcaggaacagtttcttttctgtaggtctaaatgtgataattttagatgataggtggccagctgatttatgcatcactggcttggtaaatatattgcacctcctgaatgagaatctagtctgttatgaaatgcttcctactattcaggtgaaatttcttcctttcctatatgaaatttctaatgtctttagatattttgaatttatagtgcatgggataaaatccatactttaatccaacattccaagtaaatgtcagaaatttgcttgacatggaagaggataacgttttaataatgtggtttctgtatgcccagactaaatggctgtgtgatttttttgtttgtttgtttggtattgatttattatcggagaaaatggatgtgtcctttctcatttatcccattttatacattaacatagagtaaaattgactttttattgttgtacagttctatgaattttaacacatgtatgaacagagtccgtatccacagtccagatacagaacttttccattaccacaaagaaaccccttcacacccacaccaacccctggccaccactgatctgttgtccatsaaaatagctattcctttttgagaatgaaattgaataaattgaattgtatagtatataatcttttgggataacttcattcattcagtccaatgtctttacaattcatccaagttggtggtgtatcaacagtttctttttattgccaaattaatattgcatgttgtggatacaacaaagtttgtttaaccatttacattaaaggatatttctattgtttccagttttttggctattatgaatgaagctgctgaatttctcatgtataggtttttatgtgaccctaagttttcatttctctagggtaaatatttagaattgggattgctggtttatgtaagtgtgtgtttaactttataaaaagcagctgagctgtttttcyttacagagatgtatgagagtttcagtcagtcttcatccttgccagccattgtaagggtgttaaagtggcgtctcatagtagttttaattttaattaaaacttaatggccaataatgttcaacatctttggatgtgctatttgccatccatatatccttttttgaaacatatctgttcaagtgtttggatcattgattaattgggttggttgttttcttacaactttagaattttaagagctctttatatactttggatacaagttctttgttagatatgtgatttgcaaatgttttctccaagtcagtagcttgtctttttattattgtaaccatgtctttgacagagcaaatttgcagttttgacaagctttattttattgaggtttttcttttatagatcatgactttggtgtcacactaaagaactctaagaacctaagtccagttcacagaaattttttcctgggtcacttttaaagtgttacatttttatgttttacatttaggtatatgaactactttaagttaactgcttttgtttaatttgtaaagtttaagcagagtttwttttttttccaaatggatgtttaattgttccaataccatctgttgaaaagactacttttagttcattccattgcctgtaactttgtcaaaaatcaattggttatattttctatttgtcagtttgtctgtcctatttcaaaaccagagtttaattactctagatttacaatgtatcttaaaatcagttagttcaattccttcattttattttttccaatactgttttgtctttccttgttacttgtcaaatcagcttgttgatatctgcaagaaatcttactggaattttgattggtattacattaaatctgtagatgactttgaggagaattgacagcttttaaagttgcatcttccaatccattatcatagtatatgtctatatgtctatttatttagaccttctttgaattttttattagtatttatagttttcagcataaagatcttacatatattttgttatagtcactcctaaacattttatttattttggatctactgaatttttaaaatttcaatttctaattgttcattgccagatatttgtgcattaaccttgtgtcctgtgaaacctgtggtttcaatctcacttctgttttccaaatttttatagtgttattcagacctgttcctcatacttgtcatccaggtgacagccaagacctttgtggtgttctggttcatagattatttctcaaagtctcttacatacttttcagtatcagatctttccatgcacaactttgggtgagcccagagttcatgaacaatattaagaagtcactttctggagcttccccctctccacaatctcctccatacttcctgtttcctgtggcttccctttttgatcctccaaccagtaagcttgggtttatttacctactctcctgtacaactccactttcttcctggggccatgagaatagagaaaaataaaaggtaaggggaattcgccacactatcttgggatcatagcttctccaatcagagaggtaactttttgcccctcatagttttaggtccctgtgagccctaaatactgccatcattgccactgcaagactacttgagagctggggcatgagagagtggagagagaaaaaaggatctcccttcatttttctgagtattaggagaccactttcctgcccatgagtcagaactaaaagaattctcctggagctctctctgtctacactaatgcccacacttgcatttcaagctgtgtctaatctaggttgggagaaaccaaaggggaagaaatggtaaactcactgctggttcaatgatatttaagattctgatctccttccccaatatgcatggtgctatttagttttggtcctcaaatggctgytccttgtgttccgtttaggttttatagctgcattcagtgtgcacaatgctgtagagtgtgcatactccatgttacctgcaactggaacccartgggcagatcatgatggccatccatttattattattatttttaaataggtgtttgaggagcagatggtgtttggttatatgaataagtttgttagtggtgatttctgtgattttggtgcacccatcatccgagcagtgcaactgtacccaatgtataatcttttaccactcactcccctcttaccctttcccccaagttgctaaagtccattgtaccattcttgtgcctttgcgtcctcatagcttaactcccacctattagtgagaacatacgatgtttggttttccattcctgagttacttcacttagaataatggtctccaattccatccaggttgctgcaaatgccattattttgttcctttttgtgactgagtagtattccatgggtgtgtgtgtgtgtgtgtgtgtgtgtatgtgtgtgtgtgtatgatattttctttatccacccattgatagatgggcatttgggctggctccatatttttgtgattgtgaattgtgctgctataaacatgcacrtgcaagtatctttcttatagtgagttattttcctctgggtagatacctggtagtgggattgctggatcaaatggtagatctacttttagttctttctacactgttttccatagtggttatactagtttacattcccaccaacagtgtgaaagtgttcccttttcaccacaaccacgtcaacayctattactttttttattatggcaataaaacaaagataaatagatgggacttagttaaactaaaaaacttctgcacagcaaaagaaatagtcaggagagtaaatagacaacccatagagtgggagaaaaatctttgtaatgtatatgtccgacaaaggactaatatccaaaatccagaagaaactcaaacaaatcagcaagaaaaaaaaaaaagaacaatcccatcaaaaagtgggctaaggacatgaatagacaattctctaaagaagatatacaaatgactaacaaacatataaaaaaatgctcagcatcactaattatcagggaaatgcaaatcaaaatcacaatgcaacaccacctaactcctggaagaatggcctgttaattttaatgcaattttggaaatctgacgacatttgcaagatgccaacctygttttctcaccttgctgataaaatatttcttaattcaaggagctagagctggtttatattttacatttagcattgaaatgtttccaaatatatatttttaatagtgtcatgaggaaggtaaaaattgctttatcttatttgtatttgtataattcctcatatttggagagtactgtttatagcagtaaacagtaatctacaagccagttagtctgaaaaactgatgatcaacatttytacgtcatgctcttgaagctttgtggcccaggctatataaatgatactactcatttccatatactgaagaatttttatatttaaacctaagaacttttctttttgatcacataagtcttgtgagataagtaggatggtttacaatctttatattttatagctggaaaatctttacagaggctgagttgcctgctcataattacatagctgtttactgtatagagtcagcactataaccaagggctttgttactcaacattcactgtgctttccactaarccatacttcattatttaatggtatgtgatgaggtggatcagtgtgagccaaaaatactgagtgtccataaactttgacagatcctgatacaaagacttgaaagacaggctatgtagttaagcccctttaagtactgggcaatgtctaaggacttttaataggaaaaaaataaaatagtgaaagtagagctttaagatgaaaacttgacatgaatgaaatggaaggaacagatactggaggaagggaagtaggttcttcaggtataacacaggagaagtaataaaactaattggaatgttgctattgggaggggacacatgaaatagacattatggaggaagaattggtaggacttagtgactgattagaggggaagggcaaggcagaggtagaggaggaatatttttggttttggtttttggagaatgatgtgctactaatgtgggtgaatttgggtttgagagaatgaaaggttaggtctcaagcttgtagaatgtaaaatgagatcagaataaagggaatttggagttctagatcagaaaatcaagatcaagttgggaatatgggattggggtagatcttcataaaaggagagttaaagttcatgatgatggatggaatgtctgaaggtgagcctatactgagaaaagagcagaaaactgagaaataaaccctagagtttaagctattaatattaaacaatactgaaaagctttattttactattaatttgaaagcattatatggcttctgacatttgtgaatttcagccagaatagaggtgtgtttagttatacatacttaaatataaatctaacttctgtgagccctatgtaaatcctgcactgctgtataattatattcaccagaaagatcatcagggtgcagtcactcactcagtgaatctgtttgtttacttatggcccttgtttatttttatgtttgggtgagattttcatttctgcttacatgtctagatggtttaaatgcagggcatgtctcctagctgaagactcctgtgcatagtaccagaactactttatattcacaaaggctgacagtgctaatgatggtttgtccctaggtgtttacagagtcattttttggtttgtatctctgtggcatttccaaaatcgagaagttatttacattttgctgtttaatacttctggagatgtttttcttttttctttttttccctctattaatgatggcagaattggtgagaaagaagttttgaaaaagtgtcattaaattatcctttgttagaagactgttttatattccctttcctttagtcttctaaaaatattaatgtgttccagcatgtgagattgaatatttcattaggaagtattaggggagccattttaaaggcagattttaaggaaccttaatcaccaatatattatgtatgctgaaaacttaggtaagaagggagtgtagatttgtgttgctgaaattttcccgatctttgtcttctatatctttttgttgtggttaaatatttaagtctatcttctgagggaaagagaaacttgacattgtgattgaaatactgcagcagccatgaactgcttrtcttttacttctctctctgctttctgcgttaaacagtggtaatgacctggcaatacactatctgaaatgacatggtttttttccttaagtagattgagatactgattactgcagccccatcttattgctacatgaattgctaggaaaggtaagagtatgaagatcacttctgtttttggttcaatcaaatttgtatccttgtaaacataccaagatccaatgtcataattgctatatacatctgtatgacatatataatatgatattataagaaaagctagctcttttttaatttggatataagtgctaagtcactttccagatttgtcatacatttggtttgtttggcagaaagtggaatgggaaggtgtagagtgaggaagagaagctagaattgacctgagatttttgttgagtccatatcaatctgtgatgccctatgatgaaatcacaggagttattagagcawggggtttgagtgctaatagtatggaacagctgttagagaccaactctttgttttacagtaatagaaacaaatccagagaactgaagtgatatgcacttagtcacatagctagttagtggatgagtcagaagtagaacctggatttcttgattcctagcacagaactctctttaatatattttctacgcagatgtgatgaatttccataaggtaaaattcagtagaattttggtgatgaataatgattaagctattattactagcctttccaacttgataggtgataaattgaaagcatamtttagcatttaagaattttttttcctaaatctttaagwcatctttgaaaaaatctttggaaacatgaaatagatatttcatttgtgactctcctaattgacaagaagtgtggatacctgtattctttgtatggtaaattttaacagaataaatagagartggcttctacattttacattctagttcagtgacagggtgaaccatacttttggatgtcttgtgtttagttctttagtttataacctggatttaccattctgttttttccacaaagttcaattgaggaaacatgctttagggcatgtaaaaaagctgcccatccaaaatggttttggggagaaatttatgctagaattctatagcatcactagattaagcatgttccttgctttgattccacccaggcactaagtgaaagcctatagaagataaggaaaaataggaaacccaaaaggaaggaaaatcattgaaaaagtagccaaatgctttaagaaasggaatagatagagctatagttccaaagtttactcccatatttcattgattattcatctattttagtatttttgaatgattcacttgcattataattagtaaatttgtgttctctgcacttctaggaatgtaaacatcataacatcctcttattacaaagtctttgyatccccagtaagcattgaatcactgttgagatagcatatgccatgagaccttatagcctttcactatagtctcagatatcgatttcagtaaaatttcttgagagcatcaaattaaatataatttaatacattaataamagtagcaattctggttttgctgctactgttactgttccaatactaccattaggatgatggggcagaagtggtaattatcttgtgtaagacattgtgttgagcactttacattaattatctcccataatttaattcttaaacaaggctattgtcatctccattttacaaataagaaaatcaaagattcacatgggtaaatgacttgcccaaagtcacacagctagcagataactcaaactcttgagttcacacttttaaccaatatgacatatacggtttattacacagctcttctgttgcaaatcagtaggtgcattatttggattagttcagtgaaaaaatttagaatatcatacgtaggccttgtgcttctagcaattaagctaacttagcttgcccaagtaaaaagtttaaaacaagccttttgagaagaaaaacgtgtttagtttttatagataagcagttttgatgaaaaagaaatctgcaaatatctataaaattaacttttaagtagtacccatgaaggtccttattatatgctttatttaactactaagtactgaagaattatacagaaacatgctgcaccatgacttatgacaagttattrtgtcatattcaaatgagaatatgacacactggaaaactgatataatgaattatttaaagccatcccaggattagagttaatatagttttcttcacagatcatgctgtcacctgcctacacatcttctttgtgataaatacttgctctctatattaatttcaaacaactgaatcaacattataatttccactgatttcaaaatcaccaagaagcatttcacttcttattttagtaagaaatctatttaacaataaatcacttttatttttaatttttttattttattgcactatgaaatcagctgtgtacatgctatcagaaattttctcttttaattttcttaaaaacataattcaaaagtcgtgttttaatttgtaccttatctagtaatagaatcagcgtttcttttcacctaatttattggttattttaattagcattttggtaaactactcatagaaatgccccttctgctttctgacacttttaatactaaaaaaaagcagcatttagaaggaattagttaaaagaaagacaacattggtgttcagctaaaagttgaaaacaaatttcatgaaagatgtgactaatgaagaaaatgagacgtcacatgactattcagttaattctactgaaatagaagtgacagcaacacatcatatctatgaggtggcttgctacctattttcacaaaaggctcaagtgaaaaatattatatgtgcagtgtttccatggtataatggcactatttattctgtagtttttcttgctcggaaaaggaaactagagaatcttaaagtgtggctcktaaacttatctttagctttcattattattgccaaacataaaatttttatgctgctaaaaataatgatggtgaaaatcttatattattatcattgaatataaaagacttgtcaatgacttggagaagatagaaacctgaaattgccacttcgttaccttggaagggtcttctcatctttttgagtctcagtttctttatctgaaaaagtaaagagttgtactaaatgagctttgggttatgttctgctttacatgttcttatgtttgctaggagagaatcttttgtacttagtagcatgtaaacaaaaatgttagagaaaaggcacaaagtcagattttgtagccaatagcccagtcatagaggaagataagaatatttatactcttttctattttacttggccacagtttctgtgatagacacataggtatctcatgcagttagtatagatgggctgcagtttatgctgttttagatttgatggttccaaatggggtattgatctatgacacaatgttctttccttgagggcacctctgagaacgtttaggaggtttcatcttcctaaggtacttttcgacagtccgtgctcttacctcacacattcatggataattttaatttcaaatgaaaaacaacatgcagtagctcacgtctgtaatcccagcactttgggaggcctaggcgggtggatcacctgaggttgggagtttgacacmagcctgaccaacatggagaatacaaaagtagccaggcatggtggcacatgcctgtaatcccagctactcgggaggctgaggcagaagaatcwcttgaatctgggaggtggaggttgtggtgagctgagatcacgccattacactccagcctgggcaacaagagcaaaacttgatctcaaaaaaaaagaaaaaagaaaacacacacacacacacacacacacacaaacacctaccctattaacatgttttgctgtgttttatgcagatgttgtcttattaagtaaataacaatgctggtggttttcagaaacaaatgtgttttggatatttttgggggagagagaagcttcttacctttccatttcgtgtattttttgttgcagaacttcagatggtggcaaagtggttggcaccatagaagtcagtgtcgtgaagatgggggagattgaggatggggaagccgaccacatcaccacagatgtacagggacaaaaggtaggatctcagtctgctcattgtacaaattaaattaaaaatgatcagctttgccagatgtctgtctcaccaacatctctgtggggtttgaaatctcattatcaaaacctaaatgggacaacagctctgaaattggaatacaatatgtgtgtttcagcctctgaatcaaagggcctatttgcttggaactatgcaaagcaatgctccattcagaagcaccttcctcttccctgccagctccctggttggcactgcctcttctcagttggaacaaaagtattgatcattgtcgcattttaccataattaactctatgtgagatgccagaagattctgggatggctattgcccaaaataacttgttctctactcccaaaaccctctttggaaagatatgcgattttaatttgtatttcacctttacgtgaaggagggcagatttaacaagaagttcctgccttatgagattgaggagagagaagcaggaaatagtattcattgaaggaatagctctggaggagggacaatggcaacggaaggagaagctgcttcctgaaacacagaataaaggcctgatgcatataaatatgtgtccaggattctttctttctttctgttccttttcactaaggcagagaaactatgtaaatattagcctraatttatttcttaggaatgcaattgcctgttttattgagaccattgaagcacatggggtagacttagaaactgctagtagtttcttttaggaaaatgaattttatacactataatttctaccttttaataaatgagcattttaaaaaattatttttaataaacaatcattgtatatacttctggggtacaatgtaatgtttcgatatatatttacgttatggaatgattaatcaggttaattaacaaatctatcgcctcacatacttattttgtgtgtgtggtaaaaacatttaaaatttctccttgcagcaattttggaatctacaatggactattatayagtaaccattttgctcaataactcactaaagcttattcctcctggctaacggaaacttgtaccctttgatgagcacctcccatttccctaaactttccctcccccagcctctggtaaccatcattctgccctctacttctatgagtttgaatcttttagattccacaaatgcaagctaaaaaaatgaccaaggcaggtctcaattaatttagatgtttattttgccaaggttgaggctgcacctgggaaaaaacacaaattagaggagcatctgtgacccctgccttttccaaagagggttttgaggactccgatatgtaaaagagaaagagtaagcaggaagggaagaagagaggaaaaaaagaggggggagggtaggcaatgaggtaagtggtcccatagtgaggctttcattagtgctcagtgaatctacattttatatgtgaaagggagaagaggaatagtcaattatgcattcctctcatattcagtaaatccacattttacttaaaataaaagaagtcaattacgtgtttggctcagggtgggcagagggatgattttctagtcttgtccttgtcccctccctgtggacatataagctgttaatttacattgttagggtgagattcaacaaaactctgtattaaggctattttatagggggttatatattctgaaagagttggggcccacaaggaattgtgagcaatttgtgaaggagggcatctggggagagatgtgggcttctatcattgcagctatctgttcgtcgggggaaaaaaacaaaggcagttttttgtgtgtttcagttcccaatcttaactttccttccgacatagtgagtttggggtcccaagaatctcttttctttctcagcatataaatgagatgattcagtatttgttttgtgcctggcatatttcatttagcataatatcatccaggtttatccatgttgtcactaatgacagaactttcccccttttcaaagctgaatagttttttattgtggtatataccacatttcctttttccattcatctgatgatggacactaagattgcttccacatcttagttattgtgagtaatgttgcagtgaacatgagtgcagatatctctttggcatattgatttcaattcctttggagtacccagagtgggattgctgggttttatggtagttctatttttagttttctgaggagcctccgtattgttttccataatggttgtattaatttacattctcaacagtgcataagggttccctttagtttacaccctytacaccctcaccagtacttacccctcattttttttttttttttttttttttgagacggagtcttgctctgtcacccaggccagagtgcagtggcgcgatcttggctcacttcaagctctgcctcctgggttcacaccattctcctgccccagcctcccgagtagctgggactacagggacccgccaccatgcccggctaattttttgtatctttagtagagacggggtttcaccgtgttagccaggatggtctcagtctcctgatttcgtgatctgcctgtctcagcctcccaaagtgctgggattacaggcgtgagactccgtgcctggcctccctcatcattttgataatagtcattctgacatgtgtgaaatagtatctcattgtagttttaatttgcattttcctggtaatcagcaatgatgagcattttttaatatatccgttggccatttgtatgtcttcttttgcgagtgttttttaggtcctttgtccattttttattgggttgttttcttgctattgagtttcttatatattttgaatattagctccttatcaggtgtatggtttgcaaatattttatcccaatccatgagttgtttccttattgtttcctttgctgtgcagaagctttttagtttgatacaatgccatttgcttatttttgcttttgttcctgtgcttttggggtcatattacagaaatcttgcccagaacaatgtcatggagcatttttaaatgttttcytcctagtacttttatagttttagggcttatttttcagtctttaactcattttgagttgatttttgtgcatgagcatggcatgagataagggtccaattttatttttctgcatgtggacatctagttttccaaacacaatttgttaaagagactgccctttctccattctgtgtttttggtacctttgttgaaaacgaattgcccatatatgtgtagatttattcataggctttctgccctgttccatcggtcaatgtgtctgtttttatgccagtaacatgccactttgattatgataactttgctttataatagattttgaagtcagctgacatgattcctccagttttgttctctttactcaagataactttgactcttcaagctcttttgtggtttcttaagaattttaggatttttaacatttatttccgtgaaaaatgacattggaattttgatagggattcatttaatctgtatattgctttgggtagtatagacattttaacagtattaattcttccaatccacgagcatgggatacttttctatttatctgtgttatctacaactttttttcattaatgttttatagttttcagtacacagatcttccaaatccttggttaaatttacttataagtatttttttaaagtgaatgggattgatttcttaatttctttttcaaatagtttgctgtcagtgtaaagaaacactactgatttttgtgagttgattgtgtatccttcaactttactgaatttatcagttttaactgattttttttttcttttggttgtgtcattagggttttctacataaaagatcacgttattagcaaacaaagacaatttcccttcttcctttcctatttggatatcttttatttctttttcttgtctgattgttccagctagaactttcagtataacattgaatagaagtggtgagaatggacatctttgtcttgttcttgattgtagaagaaaagctttataaatgaacattaaawaattaaggcccattgtgacttattttctggtttagtgtctcttatcttggagcatgtttgatttttcttacccaggaaactgctgcatggaagatggtatttatccaacacgtaacaaattattaactttacaaaaatatcaaatattttctttcaatttttttttctttttcccagaataggctagggtcttctctgctaccctaaaccttgttcttctctgttactctcccttctccttggaatatatcccacattataaaaatattttaagaaggcccaaggtttaaatcaggttattaactaatatcagggccatggtaaagttttggagcagactttcttgagtttgtgcattcgaaaccctgtcttagggctggatcccttcattccatccttgtttgttttgtagttctatataagactcatctttgtcactatcacatgaacacttgcatcawgatcaaggaaggaggattcggaagctaaactggggacacagagcagaaataggcagataattatgcctagacctgtaactgtgtaccaggagaccagtagcagaaacacttcccatttcaaagtagagctcctttctctgattctaaatatattaccagccacttttccactttcctcaaaactagcccaccttttgactccagactatgtcactatagtataaggtagtggaaattaaattatactcttttcataaatggagaacttgatacctagagatatgcccccacccaaatcctacatagtgtttctggcttaggaacatgaactttaaaaagacttaactgagctgttccagaaataggaggtggcagtggcaatacacaccgtgtgtgagtcataagctgactaaaatggtaaacacatcaaacattttggcatcagctctgccctgtctggattatttgtaaaccttgaccttttttgcaaatttttgataaagtaactgtaaactctcttagcaatctttaagaatatcgatgtttgagatatatagtaaggcccaacatgcatgatatttattgtgtaaataactttatctcagcgtttttcaaagtgtggttagaatcacctagagtgctttttagaactgcaaatgcatggacccttgtacatctgctaaataaaaatccatagaaaatcaattaatattatctgttactaacggtgatttaagacatgaatgactatcattatggaaagagaaagtaactgaaatagaagttattcctaaaataacattgctttcaytggtttgcatgagctagggacaaaggaatgaaacttctattagcaccatagtcatgtgccatgaaagtgacacatgttatctaatgtagacgtaaataagagagtgatactgatattgctcagcttgggctgtcatgacaaaataccataaactgtatggcttaaacaacaggaatttattttctcacggttctggaagctaggaagtcccagatcaaggtgccagcctgttcagttcctggtgagggctttttacttggcttgcagatggctgccttcttgctaccttctcagatggtctatcttctgtgtataagcaggaaggggaagtgggggagggagagagagggagagagagggagagagagagagagaaagagagaggaaaggagaaaggaagggagagagggagtgttttggtatcttctccttttctcgtaagaataccagccctgtagtattaagaccccatctttatgacctcttttaatcttagttacctccataatataggcccttatctccaaatatggtcatattggaggctggggcctcaacatatgaactttggaagacacagttcagtccataacagtacctttatataaaatactacattttaatcttgagtcttaaattccagagcatggaataaaatataagtgaaaatccaaactctttcttctcacatacgtttgctttctttttcttgtttccataaatcatattatgaacacatatttattatcaagggaagattgctcagaggtcatttaccatattagattgtttcaaacttcaatatatacacacatagaaatagaagataaagcattaaaaccacatagtastagaaagaaaaaattacaagagaaatactaaaattgtcttttttcgaaactagcatagtagatgaatgttgcattatgtatccaaaacattttttcttttattggagtcacctttgactcctttctgcctctcataaactcacagttagtatgtcagcaaatcctgttgactgcaccttttaattgaaaccagaatttaacaacttttggccctttcactgctaccaatgttgtctatcacctggatgtttacagtaatgacttaaaagtctccctgattttttccttttctctccctgatctgccaccacatgtcactatatcagtctattttcaacagagcaacaaagcgaccctatttaaatgaaacttaggacatgtctttcctctcacagcttctcaactctctgaaagtataaactcaaagcccttcagtgaccaaacacagtcttacaggagtctccccgtcccaaccctgggaacttcattacttctttgacctcctccccagctcctattttttgctcactacagtccagtcacattgtcttccttgttgttcctgaacatttcaggtacgttgccaactcaaggcccctgcacttagttttcccacctacctttgaagtgttttccctaggtaattttgtggttcacttatttccttctggtctttatgcagaaatgtcacctcctcactgaagcctttcctgcaaccctatctaagattgcagtgtctacctcagagctttctatcgcctttctctgcattatttttgtgattagtacttgtcattgttcaatgtctatatatatatatatatatatatatatatatatwtatatattttacgaatttatctcatttgtggtctattttcctcactaatattaaacttcatgagacaaaactatttgtctattttcgttccctcctttatccccagtgcctgaaacagtctaagtcagaaataaatgaataaatkaagtcaattttactttaaagaagtaaagctaaaaattatcycatagaagacagaatatgtggctgcgtataactccataacaattggtggatcaataaataagatggcatgtagtgaagagtgtaggactgtggaagaaaaataaagaaacttacagaacaacttttgaagtagtcaaagacaatgctattagagaaaggataagtaggaaccaaataatcaaatcaggtgaaaaatgagaaaacccaataagtaacagccaaaaggattgcttgagacaggaaaagtcctcccattgagcacagcccttctttgcctgcagcagagatgatcagcttcctgtcaggattaaagcattgttaggagcatcctccagtgaggcacgggagaggcttagtttagttcagcccctgccttacctcttctattagtttaagatctgtgttgtattggaatgcagcrtagcacaagtgaccaaagggactgtgatttctacaaaaggaaagaaaatgtcttactgatgataccagcaaaaatagtgtaagtggaatacaaatacatccccttctgaaaacctgcttttctcaggccatgttgctcctgttctttgaagtactgttttcattgtagtttatcagcagtgctcagaggaaaggtggagtctttgagtggctagtgaccagtctcagaaggtcttatccctttatttcctccaaatataaaattgaaaatattataataagccttaacttatagagaatatttgtaggcaaataatcatcattcattcatcaaaratatcacctactaagttctaagcattctactaggttctggggattcagcaatgaaccagagagacacagatggtaccttcaggggaagaaaacaattaaaataacaggtaatatattattgattgktgctatatgctgtatagaaaaaaagatagggtaaaaggaataggtggtgcttaggcatggttgtttatactagatgttggttaaggaaagattcactgataatgtgatgtttgagctgaaactttcaggaaataagggagtgagatggggatatatgtcaggaataagaattctaggtaacatcaatagcaagagcaaaggccccaaggtggcagcatgctttttgtgttgaaagagcagcaaataggccagtgtgactggagctaaggggtagaggagtagtggttggagttgagggctgagattcatggggcagggagaaacagatcgtgtactcccctgtaagccataagactctgagctaaataagtagttattattcattgtagagtagaacactgatatgatgaatataacgttgatgaaaaattattttaacagccctgtatatgctaaaagaattagaggtaatatygaaaataggaaaaattagaattttatgtatttctagtatcattgaacatcattctagtgatttaggaagtgcatttccaaaattgctgtggattagaggaagtgcacytctgacttcggggtggtcagaaatgcgatttagagaacatcaaattttaagagctgttttcagtcattcattctttcagtcaactaggacctcaataaagaaattatgaaagcacttttgtaccccatcaaaaaatttactgagtaatgtgatgaatgttatgattgtggaataagcagtagactataagaaaacagaaartaacatttaaatcagtgttttgaattctttgtcttcttcctcaaaatgtttgaggaacgtatacattccattgttaaaagtgacctcagtgtacatgattcttaaagagggccagtgcctggggaaggagaggtggagggagacagaacagtggggaaatagctcaagcaaggctgatagagccttggagaagcttgtctgagccctcagagccccttgagcagagccatgcaaaacttacagaaggatggctggttcccttagacctcatcaccaaaagaactttctgcaatttttgtgtgtatgtttgctttcttctgtttgcatttacttgtttatattgggtatatttactctaaaaattcactatcctcttccctgtccccactcacacccccatatttttttctaaagataaaaggaaactcatttgaagacacaaatgctagagtcttcctgtgtgaaaatagatttcgtccaactcctggggccagaagaattttgtttcctctttccattacagtttcataggaagctgagggagagcaccacatttagtgaggaattgttttggacattctctcccattgtggttcattcactaggaacatgtccatgtgctcttctgtatctcttctctctttctgttgagaaattgacagtactgtaaaggtcaggagcttaatcaattcattatggattccagagatcagcttatttataaatgatcctcatactttttgagcaagtgcttgcgttgttttgctggaggcaaaataatcttttgccctatataactagtggcgtcaacatattttgtcttttatttaaagttgcaattacttaaactctagaaaataatttgctttctattgatctgaaattagctcaggtgaaagaaatacaaaatgattcagcttgtcaaatatgatttactgtgctaggaacatatctctagcatgttggggataatcatttttctcattttaactttttccctgagtaccctctacaattatctaatataagcatattctgtatacatttaagtaaatcacaagttaaacactctttgtagtaaagatagagctagaaatagtttttaaaaagtattttattcaaaactttttgaaaccatgtacatagccttatgttttgcaaataaaataatatcattccttattttgattgttctcaaawttttttttttttttttacattttttcctagtgtgccctggtatgtgaatgtacagccccggaaagtgtgagcggaaaagataacttaccttttttgaattcaggtatgtaactcagttttaaatacttagtttcatgcaaaaatgaattttaattttatgtaaaatcaacactgaaccagcattctcacagttgtttgtgaagcttagtaaatacactgggaaatcataaggggccagcagaatgcggggagattgtacaattycacaggaaagataaatgtactagctatattgcaaaacaaatatggtcagccaggcgcggtggctcacgtccgtaatcccagcactttgggaggccgaggcgggcggatcatgaggtcaagagattgagaccatcctggctgacatggtgaaaccccgtctctactaaaaataccaaaaattagctgggcatggtggcccgtgcctgtagtcccagcaattctgaaggctgaggcaagagaatcgcttgaacccgaggggcggaggttgcagggagccgagatcgcgccactgcactccagcttggagacagagtgatactccatctcaaaaaacaaatgaacaaaaaacaaatatcatgtgctgcataatgacatttggtcaatgccaactacatatatgacagtggtcttatcagaytataacacagctaaaatatttctattgcctagtaacatcttgatgatcctgaccccrtgtgggcctaggctaaggtgtgtgtttttgtctcagtttttaacaaaaatgtttaaaaagtaaaaaaaaagaaaatttaaaaagtaaaaataagaaaaagttatagaataaggaaacaagaaaaaatacttytgtatagctgtacaatgtatttgtgttttcagctaaatgttttaaaagtgtcaaaaagttaagaaaatttaaaagtgtataaagtaaaaaagttatagtaatcctaggttaatttattattattattttatatttttttcttgatttgattttagttttataacaatataaacaatttataacaattataacaattttttccacattggcctgtttttaatcctgtacctagaaagagtacaaaatacacacttaaaaaattgaaattcaacacttacccacgcgcccttctccatctcttctacccctcttgttgattgtggtatctgatcttttttttttctttttatttatttatttattattattatactttaagttttagggtacatgtgcacaacgtgcaggttagttacatatgtatacatgtgccatgctggtgcactgcacccactaagtcgtcatttagcattaggtatatctcccaatgctatccctcccccctccccccaccccacaacagtccccagagtgtgatattccccttcctgtgtccatgtgatctcattgttcaattcccacctatgagtgagaatatgcggtgtttggttttttgctcttgtgataatttactgagaatgatgatttccaatttcatgcatgtccctacaaaggacatgaactcatcattttttatggctgcatagtattccatggtgtatatgtgccacattttcttaatccagtctatcactgttggacatttgggttggttccaagtctttgctattgtgaataatgccacaataaatatatgtgtgcatgtgtctttatagcagcatgatttatagtcctttgggtatatacccagtaatgggatggctgggtcaaatggtgtttctagttctagatccctgaggaattgccacactgacttccacaatgattgaactagtttacagtcccaccaacagtgtaaaagtgttcctatttctccacgtcctctccaacacctgttgtttcctgactttttaatgatcgccattctaactggggtgaaatggtatctcattgtggttttgatttgcatttctctgatgaccagtgatggtgagcattttttcatgtgttttttggctgcataaatgtcttcttttgagaagcgtctgttcatgttctttgcccactttttgatggggttgtttgttgttttcttgtaaatttgtttgagttcattgtagattctggatattagtcctttgtcagatgagtaggttgcgaaaattttctcccattttgtaggttgcctgttcactctgatggtagtttcttttgctgtgcagaagctctttagtttaattagatcccatttgtcaattttggcttttgttgccattgcttttggtgttttagacatgaagtccttgcccatgcctgtgtcctgaatggtaatgcctaggttttcttctagggtttttatggttttaggtgtaacgtttaagtctttaatccatcttgaattgatttttgtataaggtataaggaagggatccagtttcagctttctacatatggctagccagttttcccagcaccatttattaaatagggaatcctttccccattgcttgtttttctcaggtttgtcaaagatcagatagttgtagatttgcggcgttatttctgagggctctgttctgttccattgatctatatctctgttttggtaccagtaccatgctgttttggttactgtagccttgtagtatagtctgaagtcaggtagtgcgatgtctccagctttgttcttttggcttaggattgacttggcaatgcaggctcttttttggttccatatgaacttgaaagtagttttttccaattctgtgaagaaagtcattggtagcttgatggggatggcattgaatctataaattaccttgggcagtatggccattttcacgatattgattcatcctacccatgagcatagaatgttctatttgtttgtatcctcttttatttccttgagcagtgctttgtagttctccttgaagaaatccttcacatcccttgtaagttggattcctaggtatttgattctctttgaagcaattgtgaatgggagttcactcatgatttggctctctgtttgtctgttattggtgtataagaatgcttgtgatttttgtacattgattttgtatcctgagactttgctgaagttgcttatcagcttaaggagattttgggctgagaccatggggttttctagatatacaatcatgtcgtctgcaaacagggacaatctgacttcctcttttcctaattgaataccctttatttccttctcctgcctaattgccctggccagaacttccaacactatgttgaataggagtggtgagagagggcatcccgtctagtgccagttttcaaagggaatgcatccagtttttgcccattcagtatgatattggctgtgggtttgtcacagatagctcttattattttgagatacgtcccgtcaatacctaatttattgagagtttttagcatgaagggttgttgaattttgtcaaaggccttttctgcatctattgagataatcatgtggtttttgtctttggttctgtttatatgctggattacatttattgatttgcgtatattgaaccagccttgcatcctagggatgaaacccacttgatcatggtggataagctttttgatgtgctgctggattcggtttgtcagtatttcattgaggatttttgcatcaaagttcatcagagatattggtctaaaattctcttttttggttgtgtctctgccmggctttggtatcaggatgatgctggcctcataaaatgagttagggaggattccctctttttctattgattggaacagtttcagaaggaatggtaccagttcctccttgtacatctggtagaattcggctgtgaatccatctggtcctggactctttttggttggtaagctattgattattgccacaatttcagagcctgttattggtctattcagagattcaacttcttcctggtttagtcttgggagagtgtatgtgttgagcaatttatccatttcttctagattttctagtttatttgcgtagaggtgtttgtagtattctctgatggtagtttgtatttctgtgggatcggtggtgatatcccctttgtcattttttattgcatctatttgattcttctctctttttttctttattagtcttgctagtggtctatcagttttgttgatcctttccaaaaaccagctcctggattcattaattttttgaatggttttttgtgtctctatttccttcagttctgctctgattttagttatttcttgccttctgctagcttttgaatgtgtttgctcttgcttttctagttcttttaattgtgatgttagggtgtcgattttagatctttcctgctttctcttgtgggcatttagtgctataaatttccctctacacactgctttgaatgcatcccagagattctggtatgttgtgtctttgttctcgttggtttcaaagaacatctttatttctgccttcatttcgttttgtacccagtagtcattcaggagcaggttgttcagtttccatgtagttgagcagttttgagtgagattcttaatcctgagttctagtttgattgcactgtggtcttagagacagtttgttataatttctgttmttttacatttgctgaggagagctttacttccaagtatgtggtcaattttggaataggtgtggtgtggtgctgaaaaaaatgtatattctgttgatttggggtggagagttctgtagatgtctattaggtctgcttggtgcagagctgagttcaattcctgggtatccttgttgactttctgtctcgttgatctgtctaatgttgacagtggggagttaaagtctcccattattaatgtgtgggagtcgaagtctctttgtaggtcactcaggacttactttatgaatctgggtgctcctgtattgggtatatatatatttaggatagttagctcttcttgatgaattgatccatttaccattatgtaatggccttctttgtcgcttttggtctttgttggtttaaagtctgttttatcagaaactaggattgcagcccctgccttttttgttttccatttgcttggtagatcttcctccatccttttattttgagcctatgtgtgtgtctgcacgtgagatgggtttcctgaatacagcacactgatgggtcttgactctttatccaatttgccagtgtgtgtcttttaactggagcatttagtccattttcatttaaagttaatattgttatgtgtgaatttgatcctgtcattatgatattagctggttattttgctccttagttgatgcagttctttcctagtctcgatggtctttacattttggcatgattttgcagcggctggtaccggttgttcctttccatgtttagcgcttccttcaggagctcttttagggcaggcctggtggtgacaaaatctctcagcattttcttgtctgtaaagtattttatttctccttcacttatgaagcttagtttggctggatatgaaattctgggttcaaaattcttttctttaagaatgttgaatattggcccccactctcttctggcttgtagagtttctgccgagagagccgctgttagtctgatgggcttccctttgagggtaacccgacctttctctctggctgcccttaacattttttccttcatttccactttggtgaatctgacaattatgtgtcttggagttgctcttctcgaggagtatctttgtggcattctctgtatttcctgaatctgaatgttggcctgccttgctagattggggaagttctcctggataatatcctgcagagtgttttccaccttggttccattctcctcgtcactttcaggtacaccaatcagaygtagatttggtcttttcacatagtcccatatttcttggaggctttgttcatttctttttattcttttttctctaaacttcccttctcacttcatttcattcatttcatcttccatcgctgataccctttcttccagttgatctcctcggctcatgaggcttctgcattcttcacagagttctcgagccttggctttcagctccatcagctcctttaagcacttctctgtattggttattctagttatacattcttctaaatttttttcaaagttttcaacttctttgcctttggtttgaatgtcctcccgtagctcggagtaatttgatcatctgaagccttcttctctcagctcgtgaaagtcattctccatccagctttgttccgttgctggtgaggaactgcattcctttggaggaggagaggcgctctgctttttagagtttccagtttttctgctctgctttttccccatctttgtggttttatctacttttggtctttgaagatggtgatgtaccaatgggtttttggtgtggatgtcctttctgtttgttagttttccttctaacagacaggaccctcagctgcaggtctgttggagtaccggccgtgtgaggtgtcagtctgcccctgctggggggtgcctcccagttaggctgctcgggggtcaggggtcagggacccactagaggaggcagtctgcccgttctcagatctctagctgcgagctgggagaaccactgctctcttcaaagctgtcagacagggacatttaagtctgaagaggttactgctgtctttttgtttgtctgtgccctgcccccagmggtggagcctacagaggcaggcaggcctccttgagctgtggtgggctccaccgagttcgagcttcctggctgctttgtttacctaagcaagcctgggcaatggtgggtgcccctcccccagcctcactgccaccttgcagtttgatctcagaccgctgtgctagcagtcagccagactccgtgggcgtaggaccctccgagccaggtgcgggatataatctcctggtgcgccgttttttaagcccgtcggaaaagcrcagtattcgggtggkattgacccgattttccaggtgccgtctgtcacccctttctttgactaggaaagggaactccctgaccccttgcacttcccgagtgaggcaatgcctcgccctgcttcggctcrcrcatggtgcgcgcacccactgacctgcgcccactctctggcactccctagtgagatgaacccggtacctcagatggaaatgcggaaatcacctgtcttctgcatcgctcacactgggagctgtagaccggagctgttcctattcggccatcttggctcctctgttaatttattattgaagaaagaaaagattttaaaaatgttgtagcctatgcatacactgtttaccaagtctacggtagtatgtggtaatgttctaggmcttcacattcacccaccactcactcactgactcatccagagcaccttcttctagctctgaaggcttctttcatggtaaatgccctttacaggtgtaccatttttaatcttttataccatatttttactgtaccttttctatgtttagatatgtttaggtacataaatacttaccattgtggtgtggttacctacatatttatgcacagtaacatactatacagattgtagcctaggagcaataggcgataccctggagcgtaggtgtgtagtaggctctaccatctaggtatctgtaagtgtactctatgatgtttgcaccatgacgaaattgcctaatgactactttctcagaacataaccccttgttaaactacacgactataaatttcttttagctattggatcatgtattatccaaaacaagaaacactagaagacagtgtgaagctcttgtttagtttgacttcctaattatataactcataaagctgttaaaagaatagatatatggattcagtaggaaaacttaataatcacatttgtacattcttgggtatgtaggtgtgtactgcattattcacataatatgtttgcatttcaacaaggtattaaactgtatgctaaatgtatttatgaataaaattgagacatatagtactgttaaaatatatgtgataatatgaatatgtaaaattatggaaccaatttttaaatgataatgtaaattaaatgacygttagtaaataatgactactggccgggcgcggtggctcacgcctgtaatcccagcactttgggaggccgaggcgggcggatcacgaggtcaggagatcgagaccatcctggctaacacggygaaaccccgtctctactaaaaatacaaaaaattagccgggcgtggtagcgggcgcctgtagtcccagctactcgggaggctgaggcaggagaatggcgtgaacccgggaggcggagcttgcagtgagccgagatcgcgccactgcactccagcctgggcgacagagcgagactccgtctcaaaaaaaaaaaaaaaaaaatgactactatagtgacaggcaatatgctaataccttatgtaccttgtcttagataatcctctgacatgtgctatgaggaaggtactatcattatccatatttcacaaatgaggaagtcttcaagatcacctatgcggtaaacagtgggtccagaatttaaayccactttgattccaaggcctttgctcataagcrataggctgtggttttactaagaaggcattaatcaacaaattggtgtcacagtaaaataccttactcttttttctagccctgccatgttgtacatttaagcagtgacatagcatgataatcaggttaatgaataatacacaacttcagcagyttacaaatacataacccctaaatgattagcagttttctcttgcaagaggcagccaacaatagggaatggggaaggagaggcatccctttggctctgtttatacacacagataaacaaaatacaatttaattgagcartatgtttaaaaacatcaagtccacttacacagaatgaagaattaacccaaggaagaacaggtgtttctcagcctacagccaaatgagatgggatttttcttatttttaatgaaagatataatattgtggggtatgtactaaatagcgttttgaagggtctacccagacagctattaataaatcaaccatacatcctaaaagcatctgagttattagtgctcttaaaatatttaaagtattatcaaagggtcctcctcacatttgtttttcacctgaaagttgactaaacctttagttatttactttaatatgttcataaaccataatttatgtcattcattaaatgttaatttttaaaaataaatttgagtgggatattaagttcatgttaaatacagcttgattcaggttatcaccaaaatcatctatactataattataagacaaattttaatgactgacttatgtgaaccccgtaacttttttatatgcacaaaaagaagtggcattttgtcatgcttattggttaagtataaatttcaaggagaaagagaaacattactttaaaatcaagcaarcatattacttatggaagaagagacacagagatcatattgaaaaatagatctttacctctccatagttgtgccataaactctgtaaggcataagtgttggaagccatactaattctttcagattaccagggtatttgtttgttacatataaattgtaatatgacaaaaactactgacataaaattgataggagcagctgcattctgcaatttaaatatactttgtggagtgaaagatgattaattattgcttttttccttttatggaggtgacagtttggtggtggcagtccacttagttctgaatatatttctaaatgtctgtagtccagtcagcctggaggaccacccagaacctaggatatttgccacagatattttcttggagtcatcttttatcaggggaagatgagactaaatgaaagtcaaatgttataaagactggattttttaaaactttataaaaatacaactaagagctattcataaaatgtttctgttcaaaatataaaggtgcattgtgcagatatagaatatgtatatgactttggcctgtgcactttaatcttttgttctatttatttatctatctatctaaactcagcaactttgaaattaatccattctgtacccatgtggtatttctttaatctgtaggcaaagtaagctattgacattcttctcaagtctttgtattaatgtcttaaatggagcttttcagtctccagtgagttatgaagtacttactgagtgggagagaatgtcatatcttatatcagttcgtcactattctatttacatctctagcgattttggtataaatcaggaagttcacttatctgttgtaaaactaagaagaaaaagactttcccctaaggcctcacccttttcatgcccttgcaagttgaatgtgtatgttgggaatctggtgaatttagggtggaaggagagagagaataaggaagaggtgggacagaatttacaattccataagaaagatatataagtaccttaattacatggaaatacaaacaaggcacactagaagacacagtatgtaataaacatgtgaagctcttacttagtttgactttctaacaatataactcataaaattaagttgttaaaaagcagacttatctctaattatttgcttatttgtttaagtaaaatagtactaagaaaactttaaactattttctattggaggtgaggtggaaatgggagtaggggaagtgaatcttgactgtatagaaggggagatggtaggtctttcacatagtcatggagtttggtgcctaagtcacactaactgaggcaccttgtttgcagcacagcgatgataaatgggctctggtagtattaatacaagaacactggatgcactgacagaagaaatgattttaaagcctaggtttttcaaccagccgtttcatcctgaaagacagttcagcttctttgcctttcaattattttaaaatgaccaaattaacctaaacagtttttgacttcctttttggctctcaaatgtttgaagttgatgtcgcataggttagtgtttgcattgttctccttccttttagaaacacttcatgaaagtattcattttcatcagttttatatggaggaatatttggcatttatagttttctttctcagaggttattatttacagttaaaaagtctgaccagtgatagaacattaaaaaaagttttaaagacaattctgtgtaaatttcttaattctctctttttttggtaaaattattatataattctacagagtacttcagcccatagaccctcaaattaccatgccaaatctaagaagctagtagaccctgtgagaaagtttcccattatggtcccatttagagtgagtttcccccactcagcaagcattagatgtgatacagtatttttgtatacctaacaaccatgatttccatgactgtgtgagttggaatccaaacaaagatgaggagactgtgctgctattagtcataaatatgtgcagtttgccctcctatgtggagaacttaccggtatttgtacatcttgcttcacagctttgattctttttcaccaaatagggttaaaccacctactattgttgttttgaagaagatactagatkgtaagctacttaggaggaaggaacattgcttttttatttgcagtctatatcattttatgttaacaacctctgggcacttaaatgttataaattgaattcttcattatttagcatctaccctctcccattgatctagaaatctccaatcagttagaatttggtgaacaatttattggtagaaaaaaaattcattataaggaataaaaatttccagtcctgctgaatgtgcccctgagatttcaagagaaccaagcaagagagttgatttccccacatggccctttaaataatggtgactcctaagcctaaacacatacacatacacacacacacacacatacacacacacacacacacatacagagagtgagagagaaatcccagcactttgggaggctgaagtggacaggtcacctggggtcagaagttcaagaccagtctggccaacatggtgaaaccccgtctctactaaaaatacaaaaaattagctgggtgtggtaatgggcacctgtaatcccagctacttgggaggctgaggcaggagaatcacttgaacccgggaggcggaggttgcagtgagccaagatcatgccactggactccagcctgggcaacaacagtgaaactccatctcaaaaaaaaaaaaaaaaaaagagagagagagagagagaaacacagagacagagagagggaaaggagggggaggaacgggtgcttttctttcttaaatctcatggggaaaaggcttcaaaaattgatagtcttggagtctggatatagatgtaatccattcactgataccctcttaaagggaaaaatgcacagagctaacctgatcttgggatgggggtggtcagcaaccagtgaagcatcattctggtgatgtacaatataaacatatcctgggagtggaaggtgcctagagtagatgggagcacaggagcctggagggcaggggcaggaggggtgatgccttctttccctcctgagcacacagaggctcttccatacaagaatacaataatgcttgttaaatggtaaacaacaggtgtatcttatctgaatttacacttcagataacagaaaactcaattatttttctttctttgagaaagattttcaaatataattatttaggtttggaataaaatattactttccttaagtctcattaaaaattttgtactgcctctgactaaaggagagagagacacaaaaaacccttccaaaagtcartgaatccaggagctggttttttgaaaagattaacaaaatagatggaccaccagccagactaataaagaacaaaagagaggagaatcaaataggcacaataaaaatgataaaggggagatcaccactgaccccacagaaatacaaactaccatcagagaatactgtaaataccactatgcaaataaactagaagatctaaaagaaatggataaattcctgggcacatacaccctcccaagactaaaccagaaggattgagtccctgaatagatcaataacaagttttgaaattgaggcagtaattaatagcctaccaaccaaaaaaagaccaggatcagtctgattcatagccaaattctaccagagatacaaggaggaactgataccattccttctgaaacgattccaaacaatagaaaaagaggactcctccctaactcattttatgaggccagcatcatcctgatacaaaaayctggcagagacacaacaaaaaaagaaaatttcaggccaatatccctgatgaatattgatgcgaaaatcctcaataaaatgctggcaaactgaatccagcagcatatcaaaaagcttatccaccacggtcaagtcagcttcatccttgggatgcgaggctggttcaacatacacaaatcaataaacataatcgatcacataaacagaaccaatgacaaaaaccacatgattatcacaatagatgcagagaaggcctttgacaaaattcaccccttcatgctaaaaactctcaataaagtaggtattgatggaacatatttcgaaataataggagctgtttatgacaaacccacagccaatatcacactgaatgggcaaaagctggaagcattccctttgaaaactggcacaagtcaaggatgccctctctcacccctcctattcaacatagtaatggaatttctggccagggcaatcaggcaagagaaggaaataaagggtattcagataggaagagaggaagtcgaattgtctctgtttgcagatgacatgattctatatttagaaaaccccatcgacttagccccaaatctccttaagctgataagcaacttcagcaaagtctcagaatacaaaatcaatgttcaaaaatcacargcattcctatacaccaataatagacaaacagagagccaaatcttgagtgaactcctattcacaattgctacaaagagaataaaatacctaggaatacaatttacaggggatatgaaggacctctgcaaggagaactacaaaccactgctgaaggaaataagaaaggacacaaacaaatggaaaaacattctatgttcatggataggaagaattaatatcatgaaagtggctatactgcccaaagtaatttgtagattcaatgctatccccatcaagttaccattgactttcttcacagaaatagaaaaaactactttaaatttcatatggaacaaaaagaaaaaatagcccatatagcaaaggcaatcctaagcaaaaagaacaaaagctggaggcatcatgctacctgacttcaaactatactccaaggctacagtaatcaaaacagcatggtactggtaccaaaacatatatatgtatatatatatgtgtgtgtatacatacacatatatatatgtgtgtatacacacacacatatatataatgtgtgtatacacacacatatatataatgtgtgtatacacacacgtgtgtgtacatacacacatgtgtgtatacatacacatatatatgtatacatacacatatatgtatacatacacatatatatgtatacatacacacatatatatatatacacatatacatatatatgaacagaatagaggcctcagaaataacgccacacatctagaaccatctgatctttgacaaacctgacacaaacaagcaaagaggagcaggtaccattccttctggaactattgcaaacaacagaaaaagagggactcctccataactcattttatgaggccagcatcatcctgatacaaaaacctggccgagacacaacaaaaaaagaaaatttcaggccaatatccctgacgaacatcgatgcgaaaatcctcaataaaatactggcaatggggaaaggattccctatttaataaatgtgttgtgaaaactggctagccgtatgtagaaaactgaaactggacctcttccttacaacttattcaaaaagttaactcaagatggattaaagacttaaacataagacctaaaaccataaaaaccttggaagaaaatctaggcaataccattcaggacataggcatgggcaaagacttcatgactaaaacaccaaaagcactgggaaccaaagccaaaattgacaaatgggatctaattaaagagcttctgcacagaaaagaaactatcatcagagtgaacaggcaacctaaagaatgggagaaaatttttgcaatctattcatctgacaaagggctaatatccagaatctacaaggaacttaaaacaaatttacaagaaaaaaaacccatccaaaagtgggcaaagaatatgaacagacacttctgaaaagaagacatttatgtggcccacaggcatatgaaaaataactcatcatcactggtcattagagaaatgtaaatcaaaatcacaatgagataccatctcatgccagttagaatggcaatcattaaaaagttaggaaacagatgctggagaggatgtggagaaataggaacgcttttacactgttggtaggagtgtaagttagttcaaccattttagaagacagtgtggagattcctcaaggatctagaaccagaaataccatttgacccagcaatcccattattgagtatatacccaaaggattataaatcattctactataaagacacatgcacacgtatgtttattgcagcactgttcacaatagcaaagacttggaatcaacccaaatgccgatcagtgatagactggatgaagaaaatgtgggctgggcatggtggctcacacctgtaatcccagcactttgggaggctgaggcaggtgcatcatgaggtcaggagttcaagaccatcctggctaacacagtgaaaccctgcctctactaaaaatacaaaaatataattagccgggcrtgatggtgggcgcctgtagtcccagctactcgggaggctgaggcaggagaatgacgtgaacctaggaggcggagcttgcagtgagccgagatcgcaccactgcactccagagtggggaagagagcaagactctgtctcaaaaaaaaaaaaaaaaaaaaggcacatatacaccatggaataccatgtagccataaaaaaaagatgagttcatgtcctttgcagggacatcgatgaagctggaaaccatcattctcagcaaactaacacagggacggaaaaccaaacaccgcatgttctcactcgtaagtgggagttgaacagtgagaacacatggacagagggagggaaacatcacacactgggacctgtcagggggtggggggctaggggagggatagcattaagagaaatacctaatgtagatgacttgttgatgggtgcagcaaaccaccatggaacgtgtatacctatgtatcaaacctgcatgttctgcacatgtatcccagaacttaaagtataataataaawaataataataataataataaagtttgttctacctcatgtagcaccatagattttaattgactttcacaataccacacaattgagctaaatattgagataactttctcctcattaccacccccatccaaacaatgcatgattcagaatattttaagattctcaaaactagttcctgctatactcattttgagtcctgatgaattccagccaaaagcaaatgccaaattttttcctatttttcctttcattaatgtgttactaaattcactactttgtcaaatatcagatgatattcattttataacaacaaaaatatattttctccgtgtgatttaaatggatgttgcctcagtgtttgtaagtctctggtatgtaaaatttagggccatcttggcttataacattggcccttgatccttttcacttcctccctagatttatttgtcctttgctgttttaacaaacgtgatgcaatccactggctttgctctattgaaatttccatatgttttcattactgtgtgctaatacaggatttaacttaagatgttaagtagcttcaaatggaagagtaaatttgactatctaatgatgaatagaaccatctcttagatgactttaaatgcttcaactatctttcctaagtccatttatctcctcctcttcctcctttaggtaaactaggagaaaaacaatataggcaaaacagtgataatagtcaaaaagtttacattttgtggaagaacataaaggggyctttcagttacggttaatcttttccctgattctgatccctgtgctctctcttgcattggggcttttaattatgctcttccgtcttgcattttcccctctcaatttccacaattggtggtgtacctgctctcttcatggggagagtaatgacgagaaacatctgagttgccagatctaaggctcacttctgtggaatgtttatatttactgggcattatggtaagtgcaggaggaaaaaaagagaacaagaaaaaccacacagctctctccaccactccccccacacataaagctcatattcccatgggagacatggaccactaaacagactactgtagtacagttggtaagaaccaagatagagacggggatgtgatgtaaaaaggagagacatctatatagggagggaggtagtagaaactgaagaaggcttcctggaggaggcgatagctgagctaagtttataggatgattacatgtggttaggaaagtggggggttcctgtgatttgcatggaatgccttgatcagaggcatactggcaagaaacaacttgatgagtggaatagagtatgggttgtcttggttttttcagcatgaaatagaagctagcttctagctttacaagttgtatccttcactcactgaaacagaatgaacagaactaaggccaatcctttttctaaccacccaagatctcaaatccaaattctacagatgaaattcaccaattgtcaccaactgcagacaaataatacgtttgtgttttattatgacatctgcaatagtttttcttatttttggccaggagcttgtgggtttggctgcattcagggtatctgtttgctgtattttctgagctcctstcatgtttttcttaccctcacttttctgaagccatgctaaggatagtgtttttgtaaaatttctgtttagatttctcagtgctcatccgatctttaaaagagccaagtttcatttattatgtatttaagatatcttcaaatacaaatgaggatgtgtcagtgtctaattggattacagacttatccttagaaagtataatgtagcttttggagaataggcaatatagatacatttagctgaataattaattaaacaactacataattaaaactatggaatgaatagattctctacaagaatctgcagtgtagtaaaataatgaatgtactgcctgaagccaatcaagttggattcatttaaatatgctgcttctatcgtgtactggaagcaagaaagtgtgtgaagataatcacagattagcttcctctggagaaacatataaacgataacctggtgaaataaatgtttgagctttttgattatcccctggaccctgaatctgtatttccaaaatttcttgtccagtcaacccactgatattcctagcatacctttgtttacagaaacagcaaagagaaggccatccctatgatatctctttgatttatcttttctgccccaaggttacttgagcaacagtcttttctatctgtgttggctctgttgaacatttccttggcatccttactttggataatttagaactgcagcagtttggctttcacaattactgaatcccatgaaaaagcaggtgacatgctaccttgttaaatgtccctattacaatctgggagaaacaatatagaaatttgagttgtgctgcaatttcaaaggaaagaaaaatctgccgtttactttccttctatgtgttcatctcaaggggtggatctcaaggggtggacctcaaggggaatgtgtcaatcaagatctggactagtttagaactttactcacattgtcatcacaatacaatgatatggtccaaaatgtctcaactacttttcttttgatataatcggtcgcatgatatttttagcaattgtatggcaaaagcagtaaaaaaaaaatgaagatgagaatacacacagggctctctttaaaaagaacttataataggtattacatagttattgagataagcctattgtatggatagcaagccatctcctgcatgaataaatacttgccaccagtggagagccagagatgaaagtcattcacacagttatttgcttatttccacagctggagtgtgtgtgagcagagtgtgtatgctatagagaagaatctttttttttaaagttgacaaaacattcatcttttgtggcacattgttcaatattcgatacatgagtaccgtgcctttcttttatgtgcgataacaaaacctccccaccatcagaccatcaagaattttgagttgagaacattttatttgctctttttgtaaccagtgcaacaaatctgcatggtatttaaagttcagacccagtttctttatttaaaaaataatactctgttatactgtattttatgatacataggaggtattcttgcatcagacatgataggtgtttaataagcaacactgctgggtcaaactgggttgcaaagtagattccattatatctacattgagataatgataaagatacgcaatttagtactaatgtttggagtatgagtctcaaaagatcagaacccataacataaaagttaaataggcaacatcactggcaattttttgtatgattaaattgcctggtttttaaattgttacaagtattttctttataaatagcagcattcctagagagtccttggatgatgtgtacctggtagttacaggagagttctggtgttcattaatcaaaccacccttgatttctgtttaatctatttcaacaaaggtttatattcagagtgcattgaagagtattagaatggaaacaataaggccaggcgtggtggcttgcacctgtaatctcagcattttgagagacagaaatgggcggatagcttgagcccaggagtttggagtttaagaccagcctgggtaacaatggtgaaaccctgtctttacaaaaaaagaaaagaaaaaaaaaactggcatgctcctgtagtcccagctacttgggaggatgagacaggaagatcactgagatcacactattaagctccggccttggtgacagaatgagaccctgtctcaaaaaaaaaaaaaaagaaaacaataaactaaaaattagaaggattcgttttgagatcaacaaaggaagacttttatattttgtgacataattaaaaatacagtttttctaaaaaattattattgatgtataaaaggcaagcaaaatccaaggatttttaaccttgctttaggagatacaaaagttctgtgtgatcatgaaaaaaaaagaggttgaaaaatagcacttatactgactctagataaactaagtaactaaatatttatatatgttgctaaataagaaacaatttggccattttaaggactgaagtttgtcttaccataaaataatgcatgcttattcctaaccatgttagatatattgggaattcatgagatctcatatttggtatatggacaccataataaatttagtacatattttttctcttcctattccagagatactataatagaagcagtaatcaaattcttatatctttgaaacactgtcactttacaaatgactaaaactttttattttcttttattgattggctgtaagttcttatatttcaggcaaaagaaagtaaagataatgaactctaaatatatattctgtaaacaaccaaattgacaaaatttaaatattgtgcttatattcaaaagataatctttgggagcatacagctctagattttaaaatgcagtattttctctcaacatgctagaaatagtgtactttcttctggcttctgttggtgctgttgaaaagtaagcactctaattcttggcaggacgcatgtacatgtactagaagttttgaatctggtggttgaagaatgggatgttcgaaatcaaaatttccattatggtaccaattttgataatgataatgtccctagtgtacctttgagaatggatgattgcasaggaaaggatgaatagatcctcatttcagtgttcaagaagatatatttttacccaagtagtgaatgaaatatgttgttcttacagaccctaaaattttgaaaagaatttttccctgtacattgagaagatctagccgacataccatgttcagtattttttacagccttctgcttcaatatcaactgatatttttaattagccttattgtaaactgaagccagctaatcatakattcttgactggtgactgacttgatattttgttgcccactaagctttggtgtgtaagtgtgacataggcattcattgctgaagagcaatggaaatgaaattctcccctgatgacttgaaagtgtggtatgagtactggcttcactaataagtatcaaatgttatcataatatctaatcctatatgctttttctgaagttttttaaaattgtggttacatgaccttgttcctttcccctccaccctaaatacagtttcttcacagtctctctgccttgcttctgataatacatggtttcagaaaagtgtgttattgactcattggcactaaagtatgcttggtatttgaatttttacagattttaagacaaaagagtgaacctttctgacacgtaagaaataacatttagtaagaccttttgtaactcctaaaataacatatcagtttgtgacctgctatgtaaataggtaaagttgactaaaagtgatcagaagaaattcagaaatatatttgttcaaagtatatattaggtgtacatacttatgctttaatgtatgtttgtagacacatacactttataaaactttagaagaagagaagaatcaataggtagtaaactagaaagccacagtagccacatttatgatttggagtttgatgtataattttttttaatttaacaaagattatatgtctcagaagctactgaaaaaaataagatgtcaaaataaaattcttagaaattcagatacactaatcaaaataaaattcttagaaattcagatacactaatggattttgatttaaaaaaagacattttggatcaaatgaataataaaaatgccatcttgattaatggttttattaattgagcttcacctgacatgcatttgcttagaatttaactattattttttctttttttttccagtgttaaagaacccagtatgtaaattatatagatttcccacatctgacaataagtggatgcgaattcgagagcagatgtcagagagcattctttcctttcatattcctaaggaattgatttcccttcacattaaagaagatttgtgcaggtaagagaaaataactattttctctcatattaattatkttataccatttaaaaatttttaattgacaaattatatataatctgtgcaacattttgaaatatgtatgcattgtgaaatagctaaaccgagccagttaacatttgccttacctcacgtacttatcaattattattttttctctagaacattttttctatgttatctatttctatagataacatagaaatctagacctgaactgtcccctatggtggccactagtcccatgtaactattgattacttgagatatgactagtccaaaatgaaatgttctatcagtgtaagatacacaccaggtctttaattcttagccacgcttgcagatgatttaataacaaaatattaacttggatatattggggttatataaaatatattattaaagttaacctcacctgcttttttatttaaacttttaaaatatggctactagaaaatttaacattacatatattactttcatctgtggtttgagctatatttctgtggataccttggtatctggccaataatttgagctttgatcttgtaataattcttgtgtcttttcctcaactgcttatggttgctgtttctggaagtaattcctatttgactctcctttggacttctcatttgtagcgagactttcagaaatttattagtctaaaaactactggagatgactgaataaaacatgctatgctaatggacagtattgtacaacaaaattaaatcagttgctataataaggtagaaggatttgagagctgattggttgataagagtatctctggaccatgactaatcaatttgtttctctgccttttaaacaaacctgtaatagcattaaaaatgctgaatgctaccttatataaaatactgttaaggttctaaatctcattaaattagcaacttttaaagcgttaacactttttaattgctgaaatctacagcagagtgtgaaatttctagcaattgggttcctgccatatgctcacattagtacacatagttatttaatagtattttactcttttggtcgactctgaagcccgtagggattccatattgacctaagccagtgaggacaccatagacagggcaggtaaaattggaaactattaacaaaattggttagagtaggcatgactgcagaaatatgaaaacagaaccccaatttcagggaaattagacaggaaactggattattaaaatataatctgcatctagggaaataaagactaaaaatgagacagaaaggtgaatatttgagagtagcagagtgaggataataaaaccagagaaatcagacaacatgtatggactcaggcaaagagaagctatgacatgttcaggaatctaagcacattccataagagccaactgcaagaggaagttaagaagccaagttatcctgaagtgggttttcaacattatccctacctaatactattaggcaatagacatggtaatgtaggcaatagacaaaacacattacctggaaggataaagcaagcttatgtattacagtagaagcataaggagtttggattttggaagtcatataagagtcattatgctcaacatggttgcgttctagaccactggacaccaagaaccactcttactagagccatgtaatgatcaccgttttatcctgaagggttgaagacagtagctagtcctcacaggagttatgtagaataaggaaagactctcagtagacaagcatgagattccaggcaggacctgagaaacacagaagaggagttgccagatgaagcagacttaataatttaggactagggcttaccctttaaatggctctggaatagctacatctagcatagccaaaactagatttctaattacagttaacaataatttattctataattccaaatacttagaagaattgtgatgttcaccacacaaagaaaagatgaatttttgaggtgatgaatatcccatttactgtgatttacacatcatatacaaatatcaaaatatcacatgtatccccaaaatatatacaactatgatatagcaataaaaaataagataaatgaaataaaatgtctgtgaagacatagacaatataaaataatgacatgtcaggtggacgcggtggctcacgcctgtaatcccagcactttgggaggccaaggcaggtggatcacaaggtcaggagatcgagaccatcctggctaayacrgtgaaacttcatctctactaaaaatacaaaaacaaaattatccaggcgtggtggtgggcgactgtagtcccagctactcgggaggctgaggcggaagaatggtgtgaacctgggaggcggagcttgcagtgagctgagatcgcgccactgcactccagcctcggcgacagagcgagactccgtctcaaaaaaataaataaataatgacatgtcataaaacactgaaattcattaacatatattcattaacataatatattattatactatatatagtatttaacataataactaattttagcctaatatttttgggttgaaaatcttagttgatggatcattaacaccacttcatttaaaaattcaacaagctaggaaacgaaagagtaaagatatagactccrtcttgtgccyctgtcttgggtcttcagtttagaaacctcttaaaggatgagccgctgtctttctactgcttgtctgctacttttgagtccttcacagtgctatcttcaaagtccacctctattttcactaatactcctctgtctccattcattgatagcaaatcaagggagaaagaatgagtagggatttgggagaaagaaactaataaactattgaatttttgtaggcatagccactgtcattactrttgttgttatttgaacacatcaaagtattatccacctaccctcttctctcttctctttatggctttctctgtatctcttttgttatttccgtatgcttcacagcaaaacatttgctaacacatggaaggggctggtgggcacttttgggaaagacaaataaacactgcctcccaatatgaagttccattgccagagataaaattagaaactggaattgttcaaagaagaaaattacattttaattctacaaaaacaaaaggtataaaagcctgatagattccaaaaattcaccagggtctatgatgaccaggctgtatagttttggctttctccaataccttttctgtataaatctcctatcattagaatttatttaaaaattcaacaattaatgtttaacattttataacgaaaaggagatttttaaaattcttcctggagactcaaaggggaaataggaaaagcttgtaggaaaattggccagctgtctcagtagagtgtaagaagatacagttattgtaaaacagaataagaaatctatacaaagagaaccaactaaagaaaaaaggtcatgaagaaaagtgtaatgcactaaataatgaaattttaaaatgcagtggccacattaaatccacagagccagcagaaaaagatttaacactaagaaatcatgtctgtaatttggaagacaaacacaatacgctcttcctaaatgctaaagaaaggtgtaaaaaagttcaaatggatgagagaaaagatgttagatgtgcaggacaaagagctggacattgctaaataattttaagtgttcttaggggaagaacagttagtgcaaaaacttgataaaaagcattaaaaagattcctgaatctacagttttgttttatcttttacatgctaaaatcaggctagcattatacttccctgtagaacccagtggaacagtatctgctgatttctgagagaaaaaggcagtggctttacattattatatagggttaggttataaattttttatggacgaagctgatgtacttacatatgcaagagctcagaaaccattacacaccaaacattcttgaaaatcctacttgaagatatatcctatccaactgagaaaatagtttaagaattacatttgtaatataatataaaaattaaattatattatgatataaaattaatataccataatgtaagaattaaattaggcatgttaagaatgggaaattgtcctgtaaaagaacctgaagcattcttcttggtgtaatctccagggcaaagctttactctgaagttttttctcagctgctcttccactacctctactcagatcccagaaagtgttttatttgtaccaacttccctcccagtctcacaattcagatagactcttaccttgtttaatgaaaatgacaggtgctttagtaccattatgtttcaatagttgcaaagagtgcaaaccattcatttatatgcttggaaatccaaactggaagaaccactaagcaaaaattttgcttgttttttctccataaagacagaagttgtgcctgagaaactttatgttacagtcatttacattgctaaagacacaaaataactattttctgaaattttaacataaatattatctaaattgtaacttttttggtgaagagcagtaaaccaatgagtagcagatacaaactgtgtctaagtccctttcatatattgttctgtataggacctgtgggaatacacatacactcactcacacacacacacacacatatacagacacacacacatgcatacctgagagatattgtgcactcagtttcagaccacattcatcaatgatagccaccgtcatcaatgatctcagctagatcttctggataacttgctgcagatcctccatcagcgcttgctgcttcaccttgtacttttatgttatgaggagggcttctttccttaaacttcatgaaccaatgtctgtcagcttcaaattttcttctttggcttactcacctctctcagcctttatagaattgaagagagttaggactttgctctggattagaatttggcttaagggaatgttgtggctggtttgatcttctatccagaaaactcaaaactttctccacatcagcaataaggctgttttgctttcttattatttgtgtattcactgggtagcaattttaatttccttcaaaaactttttctttgcattcacaacttggctgtttggcacaagaggcctaactttcagcctttcttgacttttgacatgccttcctcactttaatcatttctagcttttgatttaaagtgagagacatgtgggccattgtagggttatagattggcctaacttttatatttttgtgtttcatgggatagtgaggcccaaggagaagagggagggagatggtggaatgtctgatcagttggaacagtctgaacacacaacatttattgactaagttcaccgtcttttaggtgtggttcatggcactccaaaataattacaatagtaatatcaaagatcactgatcacaggttgccatgactgatatactagtgaaaacattgaaaacattgcaacagttctaaaatgtgacacagagataggaagtaagcacatgctgttggaaaaatggagctggtagaccttcacgaaggattgccaccaatcttcaatttgtaaaaacaaacaaaaaaacacagtatctgtgaagagcaataaagccaagcacagtaaaacacaataaatatatatgtaaaatatatgatttttaacaaaaaattagtaaatacaatatgaactcattcatgccctacatgaggggtaagcaaaaactttttcttaargggcaagatagtaaatatttttgtctttgcaaggcatgtgatctctgtccttactacttagctctgccattgtaatacaaaagcactcatcgacaatatttgcatgattaattgtagctgtttcaataaaactttattgacaaaagcaggcctgtctttttaattaccaagatgatgaatttgtaaccatagtcaatccttgacttctatgaagtcaggatttttaaaatcctatactttctttttataataacttgaccctttacctcttttttaaatcccgatttgaaacatttatgtataagctgatgaataaacaattgtgagttggtgtgttgccatcactctatagaagtgtttagacaattatttgaatattttcttacataacggtctctacttttccaagggagtggaaaagggagaatttaaaaggctgctatgattgatatcaattttttcacctcacagataaagatttcttgaatttttactgtggatttacttgtgaaggaaaatagcaaaggaatagaattaagaaaatgttatatagaaacgtctaaatatatagtcaaactatatattacaaacaagatattattagtggtttcataatttttttaaatcagcgagaatgaaatcccactcataacattaaagtatattattaactttcacacatctaaagttggtgtatacctgaaagcataagtccgtgtgagtcttgtttgcagaaatcacgtatatgtgcactgtttgcttatttgtgtaaagcatacacatatgtaaaattgagaatggaggaagttattctttgcagccaatcctgacattgagtggaaatgttggcagggacataacggcgcagcaactgcttttgcatcacttgcacatagtgtctgtcttgcctgcagctgccatcaaaaaacacacttgctgttagtctcttagtctcacagttagtgtgacatttggactcaacatgaactgtttttattaaatttgagatggtacatacacaaagtctcagggttgtgatacactttaaatcctttgggggctcccttcaattggcttaagcattaacaccttytgaattcaagtttgaaacatagcagtttttgaattggcggtgaagtgttctcataacactatacttttttaatattatggtttagttccaaaaaaattcacaaggaggaaatgttagatatctctcaagttgtttactgctgtgaagaaaggctcatatgggggcttagtaattttctgattctttgctcctgcagccacagttacagatatataaaatgtatattgagtttttgccatgaaaataatacatgctcactatgtgaaatagtaaaaatatagaaaatttataaaagagaaaagataaaatcacttcaaatccacaccaaggaaggcaattttgtttttcttttcttttttttttttttttttttgaggtggagttttactactgttgcccaggctggagtgcaatggtgtgatctcggctcaccaaaacctcgcctcctgggttcaagtgtttctcctacctcaacctccaagtagccggaattacaggcaagcgccaccacgtgcagataattttgtatttttagtggagatggagtttctccatgttggtcaggctgttctcgaactccccacctcaggtgatccacctgcctcagcctcccaaagtgctgggattacagatgtgagccaccgctcccggccttgtttttattttctacatctactgtcatcttcatgagcctcgctgtggtagagagaggtttgtttcctgtgaccatcactctctgttatcatccttaatttttcctgcacatctgagttatattaggtatacatctgtgattctttgtataatgttaaataaaactataggctactaatcagttaaaaatattttaatttaatacattaaaaagactagaaggaagtatactaacatatgaacaatggttatttcttggtgatggatttagagtagtaatttgtttcacagaaaaataaaatgaatacacgaacccttacaagtagtctaggctatttagacttgccagttagtggtaccttggtttcttctagtttaaatagcttacttcccatctaaatatcaaagtctgttcaaaatttagcttctcctcaggcttggtttaaaaagtttggatgactctatctttttagaaaaattagcagtaatttagaattttactttccttcttccctatccccccaaaaatatacaggtaaatgaggtcagcttactatgtcttcatagcatcagtaacaaagggattcttgattccttgtagtattatttggatgcctaggagtttctattatgggatgaccgataatcatggagatgcattagcttcatctggcttttgagtgatattctggcatctctatttgtacttccttgcatctgatcttgaggtgcctgcacttgagagttgcttggtcctgatcatatgcctctatcaaaacattggcattttcaggacttccgtaagccctcaatgggatgtgtataatcttttagatttcttatacaccattcaccggccatgtggaaagcagggcggtattcatctacctaccaccttccactatcagtaccacaaatggcttatctatcatcttgaataaggcaccattgtcaaagccttatatagttcatgtattaatagtgctgtatattttatataggaatctaaatactttattgagaatcacactatgcttcattttataactttatttttccccgtttatcatgtatattctgacatccttcacaaatggttccctacagtatgatttgtaatggtcatatgatgttctgtcatagaactgctccataagggaaatataaattgttgcttaaatttatattatacatcaatatatattaaacatattatataaataaattaaatgtagaaaaccttataaatacatattcgtgtacatcttcagtattctctaggtttaaatacaataagtgaaattactgagacaaagtgtgtatgtattttagggccttggttttatatttcagcttgcctctaaaaagtttgcatcaattttacttccatcaattacataggcaaaacttaaactcttattactttttaaaattatagtttttgattacctgtgtgrttgaacatttatctatatatttattacaaatatccacacaaatacacataaatgcttatgtggaaactgggatattcctatttttccttttgacttacaagagctacttgtatatttagtatatattcagtatatatttcatgatatatatttttcaaatattatctctaattgtatatttaaaatttatttttattataaaattgcatgtgtattttttctattgtacttagaaagtttaactttattctgagatcagttcaatattaaacagtaaacatgttagttatttggaatttattagttagcatgttgtaaaagtagatgtcatttagtgcattttcatttctttctcacctccttataatactgccaactttttatgtctcctcactatcttcaccaaagtaattaagaaaattaaacagtgacaacaacaacaaaattacttttaaaagaactgatagctttggatattcattttttacatttaagtatatggtctgctcaagacttcttttctacatacaatgtgcttttatagttttgttcctatagattttgcatttttttaaaaaagtaatatatttgatttgtattgatcttttaaaaaaattcttatggatttatcaattccacatttcctgttgtcttaattttttctttttatctgtattatctttaatcttttttaaaatacagacttcctgcatggactgcatgctgcttttatttytattctgtctgtttaaatgaagaaactatttaaaaactatgtgataaaaaaatatttgtgatgagcagatcttagatcacatacacaaaccttgacgtgcatgtttccatttttagtatttttgaaagtctttaattttagttttattccatccttgaccaaatgttattcagaaaattttctttttgaagatgttagaaattttgtttttacccttggtttaaaatttttaagtatattctgtttttctatttagtttttcttgaaacatactgtttaattttttttcttttttttttttttttttttttttagatagagtctccctctgttgcccaggctggagtgtagtggtgtgatcttggctcactgcaacctctgcctcctgggttcaagcaattctcctgcctcagcctcccagctagctgggattacaggtgcccaccaccatgcccagctaatttttgttttagtagagacaaggttttgtcatgttggccaggctggtctcaaactcccgacctcaagtgatccacctgccttgacctcccaaagtgctgggattacaggtgtgagttaccatgcctggcctaattttttcaaatttttcatgaatacatgaaaatatattgcattctatatctgagatgtaaaaagctgtaataactttcattamcttaaaattatcaattatatttttaatgttctttcttcatctctttttttgttatttatactgtcagaagttaaaagggctatatgataaaaatcgcgcaatgacagctttattattaaatccagtgtgcactccttacccctcatatttttggcatcccagcagcattcacctgcttcttggaaacaatcttccatcagatgctgtggctgcgcattctcctggtagtaagatgacctcccttgctatgccttctgtgtctccagagtagactcttctttttctatccatcccttacagactggtgtttcttcatgcttggttctaagtatcccagctctcccactccattttccctttgtaatcagttgcatccactgccatggagttcatcattacctacatgctattgttttctaaatcctccaactctcacttgtattctgtgctctagatgccactacacaaccacctgccgaatgtttctgtttgtttgtcttgcagttagctccaactcaacgtgtctaaagcttaacttatctctttcctttcaaattcattcttcctcaattagttcctatctcagttcataatactaccctctgcctacccaacagttcagtgtaggagtgtagaacatgtccttttgtttttatttaactacatgtaaccacattctactttatcaatttctaattctaattccacaatttagcccaagcccatttaatttttatatctgctgttccccatactcatattacacactacatcgtttctttcctataataatgcaaccatctactaayggtttttctgtctacaactttactcttttcgttagaattcatgattcatgttgcaggcgcacaaaatctgattgaaaatgttataaaatgcatatttacagtaggagttttctggagacagctttgatattcaacctcttaagaattatattggaattatcttttaggaagggaagagtaggcaaataatattagctctaaagcactgaatataacatcttctttttgagaagtttaataaattattccataatcatgatatgtaagggactaactatcaaaaaacaacctctttgatctagcataattgacagatgggagaaatggcagctggtttattgtggagtaattatgggtgcaaggaagacagcaacagcaacagtttatgttgaaaacagcatagagatcctatgtgtatttaaggtctgtgtgtgtgtgtgtacttatatgtgagtgtgtttgtttgtattcatagtgcttcaaactttatagtccttcaagcttgggttgagtgcagacaagttatgtaggtcttgccaaactaccaccagtaaaacttttacagtatgttttaatgttgccatatattttgtttatgttgagtattttcttcaaattttgtactatttcaaaggtttgctgtgctcagcctacattgaaatatgttagttactagataaaatgatgggacatgtataacttaaactccatgacagctacaatgttttgttatatcatgtgcacctttatatgttcagatgagagactgtggtagccacaaaatattggctttatcaaaaaattataaattcctaggcctaaaacagtgttagaaaacctatcatgagcacaaaatgttttaaagtaacacctagaaatatttcagtggaaatgaacctcataaccaataaaagttcccaggagaaaattaatttgatctatgtcatattttttttctctttttctcctgccccctttcattcctatatacaattttcatcattaattcaataaatgggaagtgaggtgggaggatctttctagcatataatacaaggactttagaggaaaggatacaaatattccaaacaatgaacttaaagcctttcttaaattgtataatatatatacatatttatatatatacttatacatatatatatatatttgtgtgtatattagggttctctagagggacagaactaataggaatatgtatatatgaaagggagtttattaaggagaatcgactcacatgatcacaagtgaagtcccacaataggctgtctgcaaattgaggagcaaggaagcctttagtggctcaatcccagccccaaaacctcaaaagtaggagagataatagtgcagccttcagcctgtggccaaaggccagagagcccctggcagaccactggtgtaagtccaagagtcaaaagccaaagaaattgaagtctgatgttcgagagcaggaaacatccagcatggaagaaagatgaaggccggaagactcagaaacccagtagcttcttccaccttcttctgcctgctttttccagccactttggcagccgattggatggtgcccacccacattatgggtgggtcttcctctctcagcccagagactcaaatgttaactcttctggtaacagccagaagcacccagatacacccagaaacaatactttgcatccttcaatccaatcaagttgacacttaatgttaaccgtcactttagtataaaaaacacagtcgagtttgggacatataaactttaaatataacattttatgggccagttctttgagagaatacacgcgccttatcttggatatcacagtttgcaaatgttgtatgtatactagattcatggtgataaaatattttttcagtgataaacatatacattttgtttagcactaaatacttcagatattcggtattctatattttagagctatattttagaacagtgataaayatatctatgtatgtatctatatcctaaatctatatttttatcatttcatattattatatatgaagaagatggccgataagagtctttaaaatcccagctttgaaatcctagttgctgcacaaggaaatatgttaaagagacacattctctgtgtttacttaaatgttttcatataatgtagaattggttttctaagcagtaaagctattctgagagacagaagatattttattttctgattctatatcttaaaacattttgtgactataatttaaatgatggttcattttatttcaaaatgatagcacttcaagaataccttttaaaaatattaaaaatatatattaaaaactccaaattaaattcagatttatttaggtgaattctttatcaaaaacatctacattatgcaaaacatagtaggattatattacatagtgacccagactctccatttagcatgatttgacattctaagatttaayttatgtattttgtcaaaatatatttatcatcagacaagggttccccttcacttggcctacaaggtaggcatgattttatatctagctatttctccagcctcgccttgtgtcttgattttttttggcatggctgaagcacgtgcattttgggatgtctgttggcatttgaatacttaggtaaaacaaatgcacagtgaaaatctttactgactttaaagaaacattgattagtgggaaaagcaatagggagcagctactctgtttaatctcatatatatcaaataaacttcgtagatgtgtttgtaggtttctgtctgtttctctgtttctctttcttgcttgctctaagaacaaagaacgaaggatccaaaaaaaatatgcattaaagatatcacatcagggctctaccattgactcacacctgattaatattatttcttctgttcattcttctttatgcaatgttgatgcacaattagaataccatgtggtatggtattcatcatgtaaagtatgtttgccctaccaactcctagtattgagggcagatgctgtgtgtcattaagttcattgttatggattcctggtatcacttaatgagaggtcctgtagagcacttagtgtcaccaagctggtgatagaaatacgtgttttattctcctatttggatattaaaatatccccacaggaaagaataaggcaaaactcatttagaagcacatttttttcaattgtgccaagatttttgtatttcaagtgaatggaggagggaaaagtgtatggaaatgacaaaagtacagaatgagaataaatataaacctcactcaaaatatatatctactacttggcacatagttaaaatttatagaacaccatttaatctctcaatttcctgatttttattttattttttgattataccactatcatttgtctggcagagctactatagtaattgagtgatcaagagagtctagcacttatgactatagtgtgtgtgtgagtgtgtgtgtgtgtgtgtgtgtgcatgcacatatgtgtggaacagccctgggtttgaaacctggctgccccaaagccacttaatagctatatgacatggcccaatttacctagccgctctaattttcagtttcctcagctgtagaaaagagactaactactatatgcacatggttattgtgaggtttaaaataaactattgataaaaaaaatgtagttcacagattcatatgcctttaaaatgtggaaaccatgcctaacatttatgtaaagaaccatatacatggtaaaacaatgtatcagagctactatgatagttcttttgcatttcagctgaaagttggttctgtctcagatacaaatcttgagtctgtgatttattttagtgtcctctggcttagaaacctagcacacttcataggtatgctgactatactatgccacgaattctcaatggacagaagagcagacagggcatgccatctgtccagaaagctggtgtgtttggagctgagacactgatttcggaataatactcaggcttcagattagttaggagctgctgagcaacataaaaataattcctcagttttgttatttgtattattcttggaatttagcacaatacctaacatataakaagcactcaataatatattttccttaagaacaattgaaattgttagcacagggcaacatgattacatttagaaaatgggacaaaagtgtagagggaaaaacaagttaggagatactatgggtgcctaggcttttgatgatggtggcttagaccagggtagtcatgtacataaatttcagcttttgtaaggaactgaatcaacagaacttggtgatggattacatttagaaggtaaatgtcaaggatgactcaagcattctggcctgcataactgaatagataagtataattcattggtgtaagaaatagtgggtaagggctgggcatggtggctcatgcctataatcccagcactttgggaggcctaagcaggtgaatcacctgaggccaggagttcaagaccagcttggctaacatggtgaaaccctgtctctactaaaactacaaaaattagctgggtgtggtggcacccacctgtaatcctggctacttgggaggctgagccaggagaatggcttgagcccaggaggcagaagttgcagtgaggcaagatcgtgccattgcactccagcctgggtgacagagtgaggctccatctcaaaaaacaaaaataaaaacaagaacagaaatagtggataagcaccaggttaagaaggaaaggacctcattgacttagttgaatcatctagaactgaactatcccataccatagtcacttgccacatgtggctatttaaacttattttaatttttaaaaattaaatacaattaaacatttagtttctcagtcacctgcttacattgtaagtaccgaacagctacatgtggctagtacctatcatactaggtagcacagatatagaacatttccaacatcatgaagagttctactggtcaagactgatctggggtaaatagctgcagcatctgtaatttatttaaaaagagccatagtaacataaaaaaaaaacctcctttcttatggcccattggagtttaatgtgaaaaacgaaaaggctggcatcatactgtctactcaatccttgtgggcaagatagaaatttggtgtttgttttgttttgtgttttcctcagattggtaatgtcaagatagatgttctctgctaaggtttctagtgggagagggattgtgttatatttcttttttttttttttttttttttttttgagaaggagtcttgctctgtcacccaggctggagtgcagtggtgcagtcttggctcactactcccgggttcacaccattctcctgcctcagtctcccgaatagctgggactacaggtgcctgccaccaagcctggctaattttttgtattttttagtagagacatggtttcaccatgttagccagcatggtctcgatctcctgacctcgtgatccactcgcctcggcctcccaaagtgctgggattacaggcgtgaaccaccgtgcccagccggattgtgttacatttctaatagagagtccacacagcatagcagtttaaagcatgagctctgttttgggctgaatcgtgccttgcccctgccaaattcacacgctgaagccctagccccagtactacagaatgtgactatattggagacagggtctttaaagaggtgattagcttaaagagaggccattagggtgggccctaatccaatctgactgatgttcatataggaggaaatgagggtacacagggaaacaccagggagtatttgtactcagaagaaagacatagtgtgaatatagtgaagaggctgtcatgggcaagccaacgagaggggttgcagaagaaaccaaacctgctaacaccttgaccttggacttgtagcccctagaactctgtgaaaataaatttctgttgtttaagccaccaagtccatgatattttcttatggcagtcttagcaaactaaaacaggctccaaagctaaactgcctggacttaatgtcatctctgccactcactaggtaggtgaccaggagtgaatcgcttaacttctctggttaacttctcatttctaaaatgagaatgataataattgtgcctatttcaatgaattgttatgaatggcaaatgagtgaatatttgtgaagtgttcagaatagtagcagacatagaataagcactatataagtaattgttaaataactagaaagtaaaataaaaattttgttatgttggttggctttccagcagttgctatagccaagactgtctgtccaatgcatattcaaagaaaatatttcaaccggctctgttgagccatatgaaagttacattcagatgagtccctcaggtgggagcctctaatcttgtccttctgttcagagacactttcataggagaaactgtactcccccaagaatttaaataaaaaagataacaggatttgaattcctaggaagtgagtacatgtcctgaatctaccatttactggcaatgtggcatcaacgaagtcactgtacttctcagtcatttgtgtagagtgatattgtccaaaagaacattcattgatgatagaaatgctctgtattgtaccatcctataggatagtcatgtggctactgaacatttgaaatatacctagtacgattgaattttttattttgtttggtgcagctgtggggcaatgatctcagaagattgctatgaaatcaaaggaagggatcttttctatgcaaaagtaaccttgattatcaaaagggataacacctggaaaatcttatggtgtccactaaccaaacaaatttgacatagaatattcaatagagcctggtgwtttccttctacctacgaaactggacaacatcctccgtccaagtccagggttagaggaatttaaaggggtggtatccagaaatgttctctatttctgaaattgtgggcacaaattattaaaatgtgatgagaatgctagcactctgtcttgtttaaacagcttttaagtacgtttcataacttccacggctacttagaatgaaaaggcatgtaatgaacatatgtggatttgtgagaaacctttgcacaatgcaactaccactgctttagacaataagtggagcactaagctttaaaatactaaaaaataartgctggccatgtttaataactttaaagcaaactgtgaagggtaaactgatgttatttagaagtaaataaataccaatttaactttatcaacaagagcaaatagattcttagtctggaaaaagacatacttattgttcttcatttttttctaatgcagttacctaaaattaaattatagaatctggctgtttatcagatacaaacagattttgtgattgcaactaaatcctgtaataactgtgttccaactgtcagtctttgtatataacttgaggctttattgtgtatatagtacaataagcagttattttaacttcaagtgaaaatcggagtgaatgaccacttggaatattcagttgtttttccctgaaatagtggctcatggcttgcaacattaaccacattgtcatttataagaatgtattttaaaaaataggcccgtgatttatggatgcaatttttatccatgtgtgggttaaagcacagatattttgaattgtaggctgaatatactgtgaaacctgacatccagttgaactttgctcagttttatggtgtcacccaaccactttatgaaattgaagccacctaccagtcatttatgtagtctattcttcactgactatttagtatttaatttttgtcctagtgaataaattttttatgacttcttttaagtttgatttaaggtctaattttgtttaatgaatgaaagcatcttggctgttaaactttctacccatgcataccatgtgtagttttactgtgtaataactaccaaaaggctttatttaagttctacagctatttttattttttaaaatggtattatagagctcattgtggaaaaatatttctatttacttaaattataacagtctcaaataacacttttatatctctcatactgggctatatcctttgctgtatacatttttatcaagctattttgtcttacgacttttccgtaaatgaattatctattattttcagatactcattattacaataattaccttccataatttctgacatttttgaatttatatacccagatttttaaagtttaccaattttggttctcacttccaatatcataggtgcttgcacacagaatgttggcctcagaactaaagagatttcttgtgcatgtcccttagacaagtcgaacatcactatagttgtttttcttttgaacaagtcaggagagtatttgtaaaatgtggtaggagggataaaagcccatggaagagcctaaactatattctagatgattttcttccatctccctcccaccatcaccaactggcctgtctctcagctgtttatgcactaagcagagagaaatcagtgtgatggaatcccagcatagttagtgtatgggtcagggttccaaagagaaacagaatagaacmcacacacacacacacacacacacaatttattagaaagaattggtttacatcattatgcaagctgacaagtcccaagatttgcagggtgagtaggctagctggagacccattagagccaatggtgtagttccagtcgagtgtgtcagtctgagtccaaaggcaggaaaaaagcaaagtctcagtttgaaggcagtcaggcaggagattcctctcttacttgggggaagtgtcagtctcttattctattcaggcctccacctgattgaattaggccgacccaaattagagagggcagtgggccttattgaggctaccgattcaaatgttaatctccctcaaaaatctcctcatggaaacactcagtataccrttgaccaaatatctgggcaccctgtggtccaaccaagttgatatgtacaattaaccatcacaataggaaatgccatatgaagataaatttttcaaatctttatccctaaggaagacttgcttaatctaggattacagacctacatcatgcaagggtagaagaccgaaccatgtctcatttctccattgaaacttggcagagcttagcactatactctagggttagtctatattttgactttatcctaaattttaggaaaatataagaacaacaatctgcaagcaaacttcatttattcagtcaacaagcccatctcagatacttcccatgggtaggagactgcggttggacaaaaagatgaataaagctagtctctgccactcacagactcaaagcacatttgccccatgttggaaatccctccttgaatatatcatcagtgggctttaatgctatgttttaamtagaagctttaaatagagctacaattttctattttggtgatcttaagccttctgtttcttctttttttgtttttgtttttttgccccagtaacgtttattttccaaacagaattgtacacagaattccaatgtaaattaaagggatataattggagctactgggtgggtacagtaaaggaaagaacctgaggcctattcatttactcgccctaatttgtccaacactttctgggtccctatacctacaacaaccccaggggtataaggaataaagtttaaaaaatactyatctgtttaatattccggccaatattttacacattatatgtaacaaaattaaagcacatttggttacttttctcccagttcttctatgattcactctgtacttaattatttctctttattcttcacagggttgttttgttttggtttttaatctcattttctcttcatgtttttaaatagcttgtgttttaaacatgtcatataattagtagggtgttctacattgtggaaggttcggagtatataatgacttccaggaacttgcaattttactgaaaataaaaagcatgtgtttttgaaatatttaaacacagtaagacaaaacgatccatatagacaaaaagtacttcataaggttatttccagagatctgtatgaatatttcatcaagtatcaagaatgtgatactttgctgttggaatgccaggatctatagagcactagatgtttcctgaatagacattagcaattatatgtctcctttggagatttgttttgtataatttgccttttatttttgtagtcaggaaagggaaatggagcagatggaagtaagtcccaaaaagtgtttaatgtgtaagaggcctaagcttattaatattttattattgagtcttttctccctaacttcttgcatcaacttgttggactcttggagaactgggagaagctagagacaggttagaagatttgttttggagatagaactctagtgagagtaaagcaatgaattcatgagattgtatgtgtttagcaagggggtggattttccaggaagaattattttgttgttgcaaagtagtgattgaaagagagaacatttgaaagtagaagctgttgtgactgtgagtaaaatgagaatgtttacagataggagtattctaaaacctattttatatgaatttaaaaaagcatttatgtagctaatctcctttgctacccatgccaaaggctttgtaatggtatgcaactatttaattacaacattagtgtcagattccttcttttttttttttttttttttttttttgagacagagtcttggtctgttgcccaggctggagtgyagtggcacaatctcagctcactgcaagctccgcctcctgggttcacaccattctcccgcctcagcctcccgagtagctgggactacaggcgcccaccaccacacctggctaattttttgtatttttagtagagacgaggattcaccatgttagccaggatggtctcaatctcctgacctcgtgatctgcccgcctcggcctcccaaagtgcaggttgcttcttatatcaatgaagcaacatgcagagactggaccacagggtgctgttatctttgggtcttataatgctggacaccattatgctcttgaatatgttttagaaaatttcagttatcctgtagtaactggtaggcatgccattcaaactaaaatatccaggagttaaaaatcccaaataataatttatcttttgttcaggtttagtttttaaagcacgtgaacgtttacaaatgtaattctgtaaatcaactgcccaggttccaaatcccactcacaacctacattcattaagtacactctgtttgtttgctgtttgtttttatttttgttgctgtttgtcttgtgtttctttgttgtgcagtagagaataatatgaggtaagggaacagtgggtttggggattacagtctaaaagctttatggtattctagtgactctgagataaacaagcagtttttaccttagcttctccatctgtgaaacaagaggtttcaggttattctctgagcttccttccaaccgtagcatcctgggagtttatgaatcttatatgaactctgatatcctataacttagacaatctagtataaattttttgagaataaaagtaggtattaataattacagtggaataacaggtgtaaactggcatatctggttgctacacctctaacatattgtggtacgatgacaaataatgaggaaaataagtaatataacacatatgtgtacatacacaataaaggtcttttttcatctatacaaataaacaattaatgtgctgggtcgggcgcagtggctcacgcctgcaatcccagcactttgggaggctgagacgggtggatcacctgaggtcaggagttcgagtccagcctgactaacacggtgaaaccccatctctactaaaaayacgaagattagccaggcgtgatggcaggcgcctgtagtcccagctacatggtaggctgaggcaggagaatcactggaaccagggaggtggaggttgcagtgagctgagatcacaccaccgtatttcagcctgggcggcagagcgagactccatctcaaaaaagaaaaaagaattgacgtgctttgaactatatttatgattcacctatcattaagaccttttgtctagtgcttaaccagccgctaatcaacccctttataaatgtatgttaaaacattgagttaaacagcagaatgtgacaagtggggcccgttcaagaaggacatctcagaagatcmagactgtattacaaatcctggggttaccaaggagagccaatggggctgaaagtgtctgtggtgagaaacaactctgctatgtggaatctttaggaaaagcaaataggaaagtgtcagtacagacctttagagttctagaatgtactagtgcttcctgcctcaggtagccacttctcatttgaaaaatagctcctgttgtaatactgggctttagtagagactgaacccttgatgatgggacacaaagggactctgtgactagagctgcccattgagaacttggtattgatttaccccactgtatggcatagaaataatgtattgttacataagagtgataaatttggaacattggatccattggctccatacatttgggctcaagcagatccacaatgtatgaccatatatcatgaagaggtgtcccagagtcttctatcatctgtcctactgcaccgatggttctttctcaactcgcaccctcgagagttccctgtgactcactcacggaggaggaaagaacttgcactggtataaaaatgggtcagcctgacatgttgggtggacttcaaggtcaataatgaaggaaatacccagtgggaagatcagcaaaccgtttacttggtattcgcttcatgtagagaaggaggtaacctgaggtgcatatgtatgttaagcattggcagagctaataatctgatgggcctgaaagaagtaagactagaaaataaaatacaaggaatacgagcaagagacatgtgaatggggttgtaggagtgagcacaatcaaaatcacgcctatcagacataaaatactgcagaggaagctttctactaccaggtggacattgtcacgtgtccagtggatattagccagcctcctttctcagttactccagggtttgtgcaatagacccatgaagagaatgatctattgtggttggacctagatcttagtgacagaggcagggaatatgcatggacccaggacatggcctccctttccaaagctaatatagctattgtcacttctaactattaaatgccagaaacagactgacaatgagccactgagatggtaccattcctccggggtacgatagagacccaacacctgttgggtggcaggcaaattaagttgcatcctctccactttggagtgggcagcaatttgtcctaagtgrgtgaattatggtctagatatgtgtttgcatttcctctcacagtgccttcactggcatccacatccgatagcctaagaatgcctaatccaatgatatggtgccccacataatattgcttctactaagggacatttgctgctgtatcaaagaaggcacaacagtgagcttatagtcataatgtgtttcagcacacaacagccataggcctgatggtacagtggaataatattaatcatgaaaagttcagccaaaacaccagcatgaggaaaaaccttagaattgaggtactgccttctaggattgggaaatatgccaaaccaatcactgatgtagratgctatatttatcatacccaggactcaacagttctgggactaagggtaggcccttcctataatcagtagcagtgatccacttgtggtatttgcactacctttccctacaaccttatactttgccagttagaatcctggttcttgtggtggagtcaggggagcagtgctgttctgtcaggggacacaattagaatcccacttaagtggaagctgtgattggttctatctgtgatctggttactgtgtgttcctcatgacaatagaccaaaaaagatggtgtgagatatccatgctcaccaccatgaggagatagggctactgccacaaaatctgagcaaggaaaaatacgtctgaaacttagaagtactccacgccctgatgggaaggagaaattgcagcaagcaagactccatagaagcaagaaaactaagggcttaattcatcaggatttaggtctgcaacacccagcagcaactcagaccagctgaaatgctggtagagtatggcggaaaatctgggattaatggtaaaggagataggtgatgaatatcaattaaggcctcagggactagttggaggattgcatattgtggctggatttattactgctcttttaaatctctggggaatcgcacattgccatcactctaaaggactgtacttaaactctcctcttgggaaagatgtgagggatcttgttttgtatgctatcgggttatcaactcagatggtacaagtacatctgagttgtacacggggttgtctgtcctgggcccagtttgtgtgcttttctacattggctaaatcctaatcctaaggattaaatccttataatcctaacatgtcttcacatttttgaccmcttgctcaatggtgagcctcaggtattgccaccactgtcaccttatctcttaacaccattaactatatcagcctctctcaaggtgaagaccaggcattagcrtatccccagtagcaactgccatggaaggattcacagtagttttggcaactgtgagatagggacacacccaggaaagttctatctccattagagtattgtttctccagtggctacacaaaggggcagattataaaatcataaaggcagaggacttaataacctgtaggatgactctttatcgatgaaacatagagtatggcaagcaactgacatataaatgtccctctgactaactattccaaggtacaaagtttccagatgacttctttagatttgtttcacatgaccaaataaccagctatgttttcttgtgaagttctccccagctcagtcatgtaccaccttgtggctgctttcttctcttccctgtatcacttatttttttacttccttgtggttgtcctagcattgcttgatctcaggctgtgctcctagagaatctgaattgagatgccaaggaaaggttttaatctaggaggttttttgaccattgagtgacaaatgaaaatgtcattatgaataaatagccctaggcttcctgattggaaagtttaccaattttcatgaaccaagttatcttctatcctcatctattttaatgtatgaatgtacctcttctttactttaatgaaattaatgtgcttattaatttctttcctttttaaaaaatgcagtgactctcttactctgccccattttgttttgcaatgttttcattactgtgtctggtttattacacttttatcatatagttcccctatattggaacttttctcaatgtggagagacagtatgmtagttgtttgtccttttcagaatgcgtaccttttttactgtcatctcttagaacaaacaggttcatcagtatacttctctgtataaattgtggcataatggaagagtgcaatacattttaaacaaaagttatggagtcctcacagcttgtatcaagatactcctcacagaatactaaacttttctgattacattttgccaaacttatcttaggcaaggaaatgtacaccacccccagtatcccagaatgtggtcaggggcttcactatcactcttctaccttcctcgtcatcccccctttacttattctttctgataataatttagagataatataaattgtaactgtatggtgcatctattagtaytaaataaaaattgttagcyaatattttcattataactgtatactgaaagcaaagctgaaactttgcatattaagttgatatattatacttgctgtatatctcagattcaacctaattgctcagattcttctagacttggatatatcaatcttttggaattacttgtttgctttagtggttgttgcttttttcctgaacttgtacatcctgccatttgagtgcaaacagaattcaactccccaatcttctaccttctctttgtctctcttttggtcatgatttttttttctttactctattatttattgattaattactttttctcccatgagtgtttcatcatgaatactaatctttggaaaagttgagagtgagatgaatgttcacaaaaattataaagacctcagatgaaaattgcagcagttctaaattgcaatcccattggaacaaaacaaagacagctacaaccatttgaaagcaagtcacatttttgcacaccatccattattcttgcatttaacagaatgttaaagattctacagctcgtgaatttattagcttggtatttagcatgtttcatggccaaaatagcaaagaagcttcattattactggttaaattagcctcatgaaaatgttgttggtaaaaggttacagaaatgaataagagatctaaccaagcagcatattggaccatttatcactatagttttaaaaaggcattctgatgatttaaattaacttggctaaagggtagagatttagataaaagttaataattgaagcctaaatgacatggttagctcttctttttgataaagagggagcaacgcatacacatacagtagtttcatacattgtccttttggcagaaactgaagccaataaaaccatacrtgacaataccatttatttattatctgggcttttttttttttttttttttttttttgagacggggtcttactctgtcacccaggctggagtgcagtggcacaatcttggctcactgcaacctccacctcctgagttcaagtgattctcctgcctcagcctcctgagtagttgggactacaggcacgcaccaccacacctggctaagttttgtatttttagtagagatggggtttcaccatgttggccaggctggtcttgaactcctgacctcagctgatccacccaccttggcttcccaaagtgctgggattacaggcgtgagccaccgtgcccggccgggcttttgtttttttaaaaaaatatttgtamctatattatatataaactgaattgactaagtatctcatgtttgcttccaacatggtcaggtagccctttccacattctttgattttgtacagttgaaacttaaaaacttagccatctttacatagaggttttacaatttgctttttaactaaatgtcttccctatgtatataagaataggaagtctgccatctttgtgaaaaatttatcagggaatttaacatttctaattttttgccctttgacataatgtttttatttgtgtggttaagctattcatatttttttgtgctaaaataatttttaaaaaatatttaagctaataagctcatagaactttcctgggaattaggatgaaataatttcttattatcttgacaactctgactaagggttatgcgtttatggatttawgataaaaataaagtttctcttctcttccactcttaacagaaaccaggagataaaagaacttggtgagctttctccacattgggacaatctgcgaaaaaatgtccttackcactgtgatcaaatggtgaatatgtwccaagacattctgacagaacttagcaaggaaacaggtgtggaagcaattwctctacttactcaaagtgaattgcatttcctgcatgtgaaatgaaaaaaaaaataataaatagattttatgtagataggagaactggagattttttaaaactcttttatttctaactttaacatcttaaaacaaagaaaaaactaccctattttaccttacagaattattatatgaataattgagacaatttttaaaaatattgaatttgtaaaagaaaagcaactcataaatataggatatgtttttctttctgaagttattttaacatttttctgtcaaatttatcttttaacacacatattaatttatcattatttactaataatgtttaatttctggtttccatcagggtcctctttcaaatcaagcagcagcaaaggagagaaaacattagaatttgttccaataaatctacatctgcaaagaatgcaggtacacagccctcacttgaaaggtatcataaattattcttttaaaaatagcaaattatgttacagtgtgtacttctgtaaacagcttgactattggcagaattcaaaagtttaacaattatataaagttgaaaatgaaacagttgaacctcataatgaccctaaattctgttaaagagactatgatatttttgttgctgtatttttgagaaatactttatgaatgtttcacctggattgaggtagagatgaaaatgcaaactgagtaatagcacccttaagtaatattaacggtggctaatagttaayatttaagctcatttgaattagaaaaaaataaataaaaaacaaaatttgttcatatttttcctgtcttgagaaaccaaagccccaaagtggactaatatgccaggtttttttttgacttactgataactatcaatagaaactcccttttttatgggaaaaagtgagtatagtaaggtagaaggtggtagartatttaaatgtactcagttgtaagaaatatttgtcaaagagaaatatataggtttttctgaatgtacctgaaagtggtccagagtgaccaatatggtgtcatatttactaccattctacataatctcttgccatttatcaaaaaagtgttttccaatgtcttttcatctcgctttttcatgaacttattgctatagcaattatgcaaatttaggatgactatatgccctggtttgctggcaaaagtcctagattatgtccctgtcctccatatgcctgtgcccattaatgataccctcgcttcctttccttcttaaaagtctccccgtgtaaacgactaatgctgtggtcatcctactaatacccatcttttagggggcctgaagttatcaaattctttagggtaagtacatgaaaatgcatacaaacatacttacagagacatctaaattctcattctgacactctgttttgtagcccttgtcacaacatagtagttacaggtttagaaaggttaaaacacaagagcaattgtacaccrttagtgaaaatgtaaactggtatagccactatggtaaaaacaaatatggaggttcctaaaaaaactaaaagtaaagctacgatagggtccaacattcacacatccgggtgtttatccaaaataattgaaatcaggatctcaaagagatgtttgcactcccacattcattgcagcattgttcaccgtagccaagacagagaaatgtccatcaatgggtgaaaagataaattgtgttatgtacaaagattggattattattcagccttataaagaagaaaatcctgccatttgagacaacatggatgaacctggaggatattatgctaagtgaaataagccaggatacagagggacaaatactacataatattacttatatgaggaatctaaaatagtcaaactcatagaagcagggagtataatggtggtttccaggggcttcgggaggttgaaaaaaggaggtattagtcaaaggtacacagtcgcagttatgcaaaatgaataagtcctagagagctactgtacagtgtagtgtctatagttcacagtactatattgtgtacttaaaaaattgctgagggggtagatcttttgttaagtgttcttatacacatacacgttaataataatagtaatattaaagagagtaagacgaaacttttggagatgatggataggcttatggcataagtcgtggtaatggtttaaagagtatatatttatgtccaacgtcatcaagttgtatacatatatatagctttttatatgtcaatcatacctcaataatgtggttaaaatgtgaaagtgagatctcagttctgctttagaattgtctgaaacttcataatctgaaaaattaaactttattgttttctagtgtttgcataccaatcatatatatataccaccagctgatttgcaagtttaaatgtgattatacttattctgatgtattatgttattatatttggtgatcaagtatatgaaattttaatttaggtcttattcactacgaactatgtcaagtgaaagaactgaaaaaaaaaaaaaaaagagagagagagagatggatgggcccaaggcatttagaagctgctgtggcctgaatgtgtctcccaaaattcacgtgttagaaacttaatccccagtgcaacaatgttgggaggtgagacctaaggggaggcatttggatcaagagaactctacacttatgagtgaattaatgccatgataaaaagagctttcaggagcaagtttaccctctttagctcttttgccttgtaaattcataaaatttcttctcttgcttttccaccttctaccatgtaaaagcacagcagaaggctgttatcagataccagcgccttgatcttagacttcctagcctccggaactgttagagaataatttatatttttttataagttactcaatccataatattatgttatagcagcacaaaatggagtaagacagtagttcttccttgattactgagtgtctgtcaatagcttgaatagaacagtaggtaatgatttttaaaataaccagaaacaaagtgttacaagtattaaagaagctaaaatacttaagaactatctgacaatcaacataatgttattctaataggcaaaatgaaaagccttttatgatgcagtaaaatgtttatattattttagagtgtaacagccctgggcttgaattgtagcactaccgctttttacatgagctgagtctgctatttaatctttctaagcaatttcattctcattcctgattgagttagggtatgtaaaacacatagaatgataaaataatggtagctttattatacatgtggcattttccatcactggaacaaaatggatctgttttatcagagctgatgaaattggagaaaattgatcaagtaagagcctattaaaaatcaacgaagtcttgaactaaggaaatagccaggtttagattaaagatgacttaaagatgcattttgaagaaatcatcacatgcaaatacttactgactgatggaataaggcaaggagggaaaaggataatttgctttacagccatgggtagatgacagtgtcatcaaaccagatagatttgtttggggccacatacatatgaattcatatttaattatgtattcaaatgtttgttgattaaccttaaaatacttccaccaaacaaagagaaactatgaccaaagtggcattttatttcatatttctttcttgaaaatgaaagaaccatgtactatgctgttttccaaggtaccatctgaaaaatagagtaaaataggatgaggacaatatgtttagtttctgattctctgatttgaaagaracaatctgccaactaaaagaaagaaatttagaaaagcaacaaaaggggtgtgtgtgtgtctgtgtgtttacacgtgcaagcattttctaacttgtttggtttgggatatgtattggttttctagggctactataacaaagcaccacaaactgggttgctaaaatagccaaacttatttttttcacaattctgggggctggaagtctgaaatcaaaatgtcatcagggccatgcttccccttaaacctatggagtaatccttcctcrtcccttcctggtatctgctggtttgctggcaatcattggcctgctaatgtaacacacctgtcctctatcttgctcatggtgttctcctgccctctatgtatgtctgtttctgtatccaaatatcccctttaaggacaacagttatataggattaagatccatcctaatggctttatttcaagtggattatatctgtaaagaacttatttccaaataaagtcacattctgaggtatctttcttgcgaggtacaagtaaacccacaacaggatttagaaaggaaattcttacttgtaatgacaaatatcaagcaatacagaaaaaaaaaatttaatgttacagattagggtacaacccagaaactagaagatttttgacaaagcagttagcagaaagactggttctggtctttgaagagctaagaagaaaatatgggaaaaggctagatatcctaagagccacattaatgggaaaagtactgaattgtattgcatatataacagcatgctaaattatcaagcttatgttttaaaaatatgtaatattaaaagttattatttgaaactggagttcagattaagtagctgttatgtagactaggtcaccaactacatgttataatacaggttgaaaactccattgaaattttgggtccttaccacttactactttgactttaaccatgttatttgacctctctgagtgtcattttattatttgcaaaatgaaaacgttaaaagttgtcataggtggtagtgaatcaaatttttctactttcttttataacatgtatttaacagattttggattgcagttaaatttatttaagttttgtggctactgatttgaatgtttagctgaattattattgcaaggtaataatgcaagtaagatgggctaagccttggcattttactggcaagttatttggatgtggtctaattttttttttcatctttaccattagtaaattgtgtctattcacatttgattaataagcctgctatatttggagaggaagctttgcaaacaatagctggcagagtcaccagatacaaggctaatatgtagctcttgaaataagtaactgagcagaactaatgttgtcatgtctcatactgacaaatggaataacctgcagttaacttagggtgccctgaaactcattaagttaagtttttcatccttattcattacttaaactaaatgcaacaagtagaatactcaccacaatagatcttagccagcagtgacaagaatgaaacataaaccccaaaattmaaaacaaaagtttttatactaatatactttaataaattttattttcacagcacatcagttgtgaatattatggaatataaattcttgtaatgtaatattctgttttattttatatgctatagatatacaatagaaaagtattatattttgctataaaatttaatgaattcaaactaaagcaactattttgtttcacagcagacatagtttatggatctgttgtaatctatagtactaaaagccttctttatataactgcattattaatgtatagctaactctaagcatgagtgttttgtaaatattagctatatagctatggttttactttgtgagcctggtccctttagatatagctgcttgagtgatcacagtgcctgacacagcatgtgcaaaaaaataaaaagagggtctggggtgatcacttcacccaagctgaatcaatggagtttcactcgtggattctctttggggattcagagacaatctctccttctgaatttaactctaattgtgttctagagaaccaaaaagtgctcatcttttccgtggggaagaaaaatcagacatacagtaataaaggagaccacaaaaagagaggaaaggcagagatagtctctcatggcttttcagttcctgatttgagcccacagggaatgaatgggcttgcccttagtttgcatgagtgaaacacacctgtcaagcacggccccgcccactctcattgtttttgtttgttgtttttcagatatctcaagtgggattccgcaaattggtatgaaaagaagcttaactaatatatgttttaaaaaatgagtttatatcataaagctgtaggtgaaatcaggtccaacagtagccaaaatttactgtgttaactatggaggagtcagctaacctctttggcctttcattttataatctctacatagaaggaaggagcagaagagaggagcttctagagctctctgatttctgtatctcaagaatgtgagagtatcacctcatcagtgaagcataattatgttagatgtatttaataacgatgtcaaattgcttggactattttgacacagatttcccttaaaaatccctaaaggcttttgcaattcctgccaaagacatattacatgccattttgaaatcagggattatatttaaattgttccttgatatgaggtcagcgtgtcttcatttttgacattagcactattttatagttgtaggaattttagaaagatcttctgggaaaaatagagttattatctcatttctattattaaatggcttttaaaaggctacaaggcagccctattattaaatctcaaatcaatctggtgtctttagtttgacaagactcaacaacttaaattctacttatctattactttttatctattactttggatactatgcaattttcacaaagccaaagacaatttttgagacactataaaatgtcaaaaaggaagacacatttaaaagaaaaaaaactgtattttgtttgcttaaattttctataagatattcccacttagatttttctaattgtctcttgataacaaaaatctgaagacttttattacacagctaagggctattcaaatcacaaagatacataaagaataggatatagccatggtaaaagctgttcaaaaaatcgtaaagagcagggtacaataaaaatattttttaaatgataatacrgattttaccgaccaaattgttactttagaattttaattttgttttcttataggtattgttaccttagaattttaattttgttttcttataggttatttttttttcttgtacatttttttctctttggaggaaaacaatcaattgcagttaattctaaatttaaaggaatacaactgccccagctaagaatgaacatggtactttaagtgtataccattcttcatcarctgaagagaccaggaaataaatcacatggtatacatagatcaatctattttgtagtagttacaagtgaaattcaaggctgaaagggccaaaggagataaaccatgctgtttcacattgagatattggtagctgataattatgaaatgacaactgcaaaatattaagaagattacctaagataataaatttgcaactttcatagaaagtattggtattttaacaatttgagtgaccagttttaaatgtgagggaaaatatctcaattaaagttaaagattacacaactgtacaaaatgttatttcagaccatgtgacaaacctaacatacccatagctggagaacaaagctgtttcctttggcttaaattcatgtcagttctgagaataacattcagcagctactttccaattgtttccttcaaagccactctttggctatcaaagttaaaagtttaaaacttaaaacaagttttttgaagacctgaagtgtaaaaatgctatttaaagccaaactctttgaacttctataaaatatgcacacaaagattcaagctttttgaggagtggttagaatcagaatgcaattgaggaaatacaaagacagggagactttgctttataagtatctagacataaaccatatctagtgtcttagtggagaagacctcttgatattaatggaatatgataggttgaaaatgcctttctagaatttagataagatgctacacttctgctagctgtgagagtttgtcaatttgaaatttattctatraagttcaaaactgaagaatatttggggacttttaccctatttttgctctctagtactttcacatttgagaacacataagtgtgcttattgtttttcaaatctgattgttttcttgcttatcaatatgtctgtcttagaatttcttatccccaacctgctttattttttaacttacttttattgtgttgtttaagtgataataagtgatcaataaaattataaaaaatgataataaaaagaatgaaaaataaagaatagaggcagataaggaaataaatatggaagtatgtatacataattactataggacacgtattttctagtcctagctaatgaaagggaaagcagtgacaccatagtagcagtgagcataactagtcctcagtgcttgatttctaaacactattctctwatgaaaaggatcaaggtttattggaaagttggttgattgcagggctgggtcagggaaaatacaagatgattctggagcatcttgtggctctagaaagtaatgacatgctaaaaaaattttttttaatagaataggtrtacataaagggcacaacagccaaccttaaggcgctcccaaaacacaaagttggcacaacctgaacagcaaaaagatattactgagtcattaacgaaatgaaaaattcccatgggtctatattaatattaatagatgactgaataagtaaatgaatggaggagaagagttaaccatgcctttcagaagaattctaattaataatgtgagagaaatgaaacaaaaaattactattcagatatatcagtaacaattcaagatccatcaatgaatgcaaaaattagtgagtaaaagtttaagcagaaaaaggatatttgcatagtctccaagtatgttcccccagatttttactaactttccaggggagaattaactgtcagtagtggcaggcactccaatgcatcaaggttagcctcaaagtagtaccgaaacatacactgatatgatgctctgagaagggtacatcacctctgtagtgttctgctccatattgcacaacctaagtctaatgacaaaccataagagaaacccaagctgaggaacattctacaaagtaactgataagtactcttcaaaaatgtcaagattatgagagacaatgaaagactgaggaactgttatagatcggaggagcttgagaagacctgacagttgaatggaaggcaggatcctagaagagaaaaaatgtgtgagtggaaaaaccaacctgaatacatcttcttaaaggaattctatattccttcctgtttagacagcatattaaaagttaattcaaattccatggaaatattgatagcaatttagttataagctctttgatcttttataaactataatccagaatatatatacatattacatacacacatattcctgagatgtgtgtgtacatgtgcatctttgtgtgtgtgtgaatgtgtagccagattctaatgtttttattgacagtgtatataaatattttattcctcagttaagaatattaattccctgtatgatctaatgacaaacaagacaaaccgaattgagcatctaaatatttatatatttatttttttatcgacattgttgaacacctacaacattacaatgatttccgtttggagaaaaagacattaaattcacaatgccatattttacattgtgtgagcctagagaagaaagtaaattaactatcaaaattattttatgtgatacgaaaactaatactctgataaagatatgaatttaggactataataggaaagaggaagaagtaagtatttctagctggatacattacacaaagatctctatgtaggaactaacttagcaactaggcctaagtacgaaatttacaagggtaaagaacagaaaaatgaaggagggaagggcagtttaggtaatgggaagagccttaggagagtgtgagaactggaacaggattaaagaaaagtcatttaattaattgtgtcatttactttctatattctgacatcttaacagaatatgtagaatatttttccatgaattatattgagttacaaatatgaatcataaattcatagttcacaaactataagtaattcaaggaattataaataagacattgaccctctgaagcaaaggaatmctgtagggaactcagggaaggaagccaaaaatgagaacaagaaaatgaacagagtggaaagaaaagggaattgtggatatgacagaagactgtggaaggattttttttttaagtaaaaatagggaaaaagcatgggagaacgctggaaaagaaaagcttaagaaaaaagtattcttttttttaaaaaaaggaacacatgaaaactataacaagaatagaaatgataccaggatgagaaagataattaagatcaaaattaattttgcttataatttaagtatgtacctagttgctgctgtagtaaatcatactgaaacctctgtatgtttgataaataagaattacatcaattctaatacagaaattttctgtccttaattttaaatattcacaggaaattagggtaacccttgaaaatagtgtgtgttcagtgggtgtttgtttagtgaatgaataaagattaggataatataggtccggtcagtttaatcatttttttatttttataaattgcaagcttttgtttgccctctgagaccacaattaacaatgaatgtttagtcttctttttgatgtgatcacaaaaaatctctattttagaaataaacatctacaatgtgaacacaaatcaactttattgagcatccagtatatgctcattgttgctgcagctaatggaaaatctaagcgtgactaagatgttgaaggttgtttacagtataagtttttttgtttagtgaatcagactttggaaaatatatcagatccaaaacttaccagcataagactagacacattatttaatctcatggaaaatctgttttattatctataaagttggggaaataacatttatcttatagtattattttgaaaattaaatgagatcctgaaaatagagtacctactaaagtaacgattcaggtatgcgctgagtaaatgccagctgttgtcataattattcattcatttagtaacttttattgtgatcttactatattgttgccatcattattattaacattgttgttatttattaaatacaattcttatccacaaattaacatatatccagtgaagaatatgagtcttaaagcaattgtaacaattttatgaccatattcattattttatttgaatatagaaactatcataaggaattaaatcttcaaggtaaagacaaagcaatgtggaagtatagataaaaattattattctgactggaatattcagaaagatttcacagagaaggtggtaattgagtttgattgcaaaagagcagtggaatttcagtggcaaagaaatgggagggaggttaggatggaaaaatatccaagtcagagaacacaaagatgaagatgtaaagacttcaagaaatgtggaattgctgttgtaactggacaacaggcaatcatgctataaatraggagtacctcccatgtgccaagcattgaggatatactcttgaaaatgaatgactacaataattttcactttcttttttttttttttttttttgagacggagtttcactcttattgcccaggctggagtgcartggcgcgatctcggctcactgcaacctctgcctcctaggttcatgcgattctcctgcctcagcctccccagtagctgagattacaggtgcctgccaccacccccggctaattttctgtrtttttagtagagacggggtttcatcatgttgaccagcctggtctcaaactcctggcytcaagtgatctgccctcctcagcctcccaaagtgctgggattacaataattttcactttcatggtgcttataatacactggatgatgtgaccaaggaagaattggacccaggtcataaatgatctaaatatggccttgagatgttttaatgttcttctatgaacatttataaggaggaattaagtactgaaggctgtgtttcagatagagtaaccgaccrgccactcatrtaaaagtgaactactgcattgtggatgcagagaggctaacattgagaggcagtagtcatcctgacagraaatggggaaggtgagcactaagataaagataagtatcatgaacagaaagaattaaatttttgtaacagaattgttagaactggtgagatataatgatgagggaaggagaggagtcgaacatgatcttgaggactctactcttggaggcttaaaggaatgtgttgtctgtaattgtcacagggaatcaggaaggaagagccagttagggtcaagcgttagaatatgttaagcttaataggctttgacactcagatgtgcccatcaagcagttaggaattggattattttgtttggaagaggtcagaactagtcaagagatttcatagtccttggtaaaaatatggtgtgaaaacactaaaagggatgagttcgtaaatagaaaatagaatgaaaagaaaacgtcagaacttacagaacagcttgttcataactttaggagttataatatagatggttctaaaaaaacacaaactccttcatttagatttaacaataaacaatcagttcttttttatgagaggaggagactattcaaacaacatgcttcttctcctttaccttctatttcaaaatgtctcggtttcttcatagatgtctagaattctcatgagcagtgaggtggatgaatagagactgtttctgttcccagagagtagctttggaggatgctaaaattatggatgaattgaagacacagattcaccgtaaagctgaaacagctgaagtgtcagggcctgccacttgcatagtcctcgtataagacactacaaggaattataaatatgcttgtggtcaaatgtttttgcaaatttggcaaaagttmgttatttaaactttcattaattcagagttcwgtctctattcagatttcccctcccttttccttcccttcttattgggtagttctagagaggctacaggcaatgttttgggggaagttgaagtgagaatacatttagtttaggcttagtggaatatatgtctacattttttaaaaaacagctttactgaagtaaaattgacctagaaaaacttgcatatatttttacaacttgatgaatttggacgtaggcatacccscatgaaactatcaccacaattaaggtaacagacaaatccatcaagtctaaaaggtttttttgtggcctttttttggttgttgatgctgttttaagaacacttaacatgagatataccctcttaatacatttttaagtaaataatacagtgttattaactataggcactatgttatacagcatgtctctggaacttattttgcgtaactaaaactttatgcctattgaataacaactttgcattccccstctccatttcttgacagccaccattatattctctgcttttatgaggttgactattttgaaaacctcatgcaagtggagtgtttgtcctggaactggcttatttcacttagcatattgttctccaggctcattcgttttgttgcagatggcagagtttccatctttttaaaggctgaataatatttttagtcattctgtatattgtyggtattgctggtcacccagtttttggcagaaatgccgcatattttgttgcattgtcatgataatttgtctttttgcatttaaattaacatgggaactcattccattcagaagactgagccccagcatcatttttctttwcagactcaaaagtttatttttatggggatatagacacctttattggtgggatagtttcttatacagaaaataataatcgtagataacatttactaaatgcttaccacttttagctactttcaactacawtttataggtaaggaaactgagacatagagaagttaaataagtggcagatcaggaatccaaagccagcgactcaggttcccatcagtaacttaaaccaccagggaacactgactctctgtcactgagttagaagccagaagtccctgagtgtaaaatccttggggttttagacaaagcagttaacttctaatgatcctcagccttcttatcagataaatggacaaagcagttagcttgtagtgatcctcaggattcttatcagataaatgaaggtagactagaacataatgttggtaactttggggtgatcttttgagcctttgagaaagctgtgatgcctttccatgacatagaacagatgtaattatgtaattaacaaacattcttggacaccctgaaaccagtgtcttagccctaggttaaaatcccctggactagaaaatatttaaatttcttacagatctaatgttctgctatcttaataagagctgacttctagtttattagtgactttttaaagaggacacagtgaactattaagtgattttcattgtatgccttattgacgggttggtttgtgttgtattctttcttgtgatcttgcattttctgaatgctgctgacatctttcacttgaagactttttttattgaaagaaaattttagatgcatctggattgaactactctgaagaagttatggtatttacctgaagctaataaaataatttatgttttcctcgtaaatgagatctgaagagcaaccaaagtrtcaatagcaaaatcaatttgaaaaggatctactatgaaattaggtttctcaaataaaatgtagtttarcaagaaagcattcactgtcttccttcttatggggatactttgcattagaatgtaaaaatgatggcatgttttgaagccataaacttaatatgtatcaaacttcatggctttcaagatcaaaggattaagtttcaatttaagtgtatggattttttgttataaaaacaaagtgtcttactagaaaacagaacaagaaacattttgtgtattctttctatgtcacctaaggaaattgcaaaagcatctatttgaaattgtgtaaaatttagtatacacaatcaggaaagtactctgtatagattttttaaaatgcactagtactaatctgcccttgagtcaaaatgcttaatattttgggttttttttctatgtaaaatttggttgaaagattgttygttattgttgaatttcaacatgattgcaaattaaatgatgcaaaactcaatgaagtaaaatacacaaaagagcaattaacatgttatctcagtaagtatatagaataatgagagaacacactgttctacastgtagcatgtaattaagatgtagtcataaatcaggaaaayaytatatctygtttaggtgcacaggtggcttttagaaagattgattattagctcctctttcccccttgagatgtgrgttcatagttattcctaaaaaattaaacagaataatttctcatacttcctacaataggtatgcttcaatgcaaacagcatgacggagataaatgtttgcaaagtgttcatctccttgtctgtttctactccagatgctctctacgatgtcatcactgtgggagccccagctgcccattttcagggatttaagaatggtggtcttcggaagctactccatagatttgaaacagaaagaagaaagtaagtaaagacaggaggaaagcacagattccattaataacatctcccctttggggaagtytatatacaaggtgattggtccatcacaatgtatagttcttgacatcttaacctatttagtaacatagagttgttaaatatctcaaaactaccagagaagaaattagattaaacaaattgcctaagtgtcttgcttagtkagtggcattgtgatggcagaaaatcttcyggaagtcrtatgactaaggggtgatattctagtgtcaactattgcttgctcaaaggagtgttcagagatttagctagaaatacagtctgacttcactgtggagccaaagatactgaatggagaatatggctcctaatttatgatttttaccctactagtaatttccatgctggcctgaggcacatttaattgtgccacttgaaaaagacacaacaatacagaattctaygttctgtttcttagggaaaggcatgagtattaccactattatttataattttgatatactctttccccagtttttgtttttacatgcttttaaatattgccttataaagcttttgcagcagtagtttattattctcccccatgtcttatcagttggggttatcctataatattctctggctatgaccaygctcatgtaaaacataaagtgcattatccaggtatgaagaataactactttccttttcaaatagttattcttcttaagaatcccatttttttttttttttttttttttacttttagattccaagggtatgtgtgcaggtttctttctttcttttttttttaaccrtggtgaattgcatgttacagggatttggtgtacaggttattttgccaccgaagtaataagtgtagtatctaataggtagtttttcaatcctcaccctcctccaccctccacccttaagtaggtcctggtgtctgttgaagaatccaaattttgaaagttagggaaaaatagtcattctttagtcacagttgatttagtaatagtattagaaaacctgtttgagtgccaaaaccagaaaattttttaacgttttatcacatttatcaaatataaaatttgttttttggtgcccagatgtttaggaagaaagcatttaaaggaggttagaattgaataattgacttactattatacaaatatataaactaccaatacacatatatttttcttttttccttttaaggaattgactttggtacaatattaactcagttgtagttcttattctgatttttctagttttttgttcatttttgtttgctttttggtggggaaaggtttatagttttataaaattatattgcatgggtagattagaataaccatcactattataaacatcatatagaactgtttcatcaccacaaagaaactccctcaggttacccattaatattcacacccttctcacaaatattattgcaatggggagtggaagccaaagtttcaaccatgggctctgcaggggagaggcatctcctatttactttatgrgagttgsaagttaattcaaaccataggccccatgggggaagggatgccatccctactgatgtgggggtatgagtggaagacagggttttgcccatggaatctgagtggggatgaagggtgtttctcactgattccctactgtaccattcttctagtgggggaggagcatgacatttttgtggtattcacccccagaacaggttggtatggctgggccaccctgttccaggttctttggctttccctgggtgctgttttttgttggtgctttgctgcattgagaaattctgtggcacccagtttgggacattatagraggcaagaaaaatcccgtggaactcactgtaatatcattgcttaagtcctgaggcccctaaccaatatacctcctttagtctaccttttagagtcttttgataggtgacatatatgttttgtctagagtgtttcattgtgattaacaggggaagtaaaatagattgcatttacttcatcttgtctggaactgtgtctcagtcttgagagttgacttaatctattttttttcctcaattaaattttaaagtgtataacccaattagaagactcaaaactgcccatagggtagtcagaatcctgttgagcatagaaagcatcagtatgtgaaatatggaacctaaccctctaattttatgaaacatatttctgttaaagacaactgttgagttctgtggttagactctgaataatatttcttaaggtttaaatatttgcataaatattttccttcatttttcttcacttttcactgggatgttacatatcaacacacacgcacacacacacacacacacacacacacacactcttacagatcttgggttaattttaagataaaagtaraaacatgttcaatgcktgcaaacactgattgctttaaatttttcatttgtgtttcattgctttatggataaaatacaataaagattttaaaagaaataaaaaacaactttgtggatcttaaaagaattctccatagggcagtggkttgagacaaatacagcttgctgaggcaatatactggtgagcatggctatcagcctacccgttaaattaagagctgacttgagcagagacttaatgattacagagttatcgcaccatgccaatactttttctgcaggctttttcagcaacaaatattgcacgtcagtcaacagcaatgtatagaagtaaaaatgactatatgaaatgagtaatttgggctttaggttaaagtaaacagtgacattttgcaggacatgaaatcacaagtgaggaaatttttctttgcctcatctttcatttgatattgccccccaccaaaaaaaaacaaaaacaaaaataaacaaacaaacaaataaaaaacccagatagccaagtcttttagaccaggttttttgggaactaccacagccactgtactatttcaccttygtttatttttttctcagctaagccaataaaatactgtcatctgagaaaagatataatttatgtcccttgrtgatctcttttgtgattaatacattggccacataatgaaaagggtttagcataagaacattgcttatagtatttatataaagcaattcaggtcatacaaccatatttattaaaattacaagataattagggagactgaacttttaaagcacagtttctgagtaccttactcttgtgcttaggaactttgaggagtccatacttatccactgggcattcaaagcatccatgattttgcccaccagtgtctaccctcatcacccacttcttctattgttgtttctaaaacgctatataaactatttcctaagtgggcttcatgtatttataccttttcctttttcctcgttctgtttccttttattctgttctcctcattttctactatttttcatttctttctgtgaaagccatttacataatcctattcaaaattctacacatggtccatgtgaagatttcacccttataattaggctttcctgatttttcaagttgatttggctctcctccctaatattttacttttgcttctcttgtagccttactaggccacagtaatgtattaggtttttttcttgtacgccgtttctgtaatacattgtgcttttcttgaataagagatggagcaccttgtatatataagtatgctatagatcaaatacaacaggcattggaaytcacatagaaatcagatayagttgctgacttaaaagtgctaaaaactagaatgggagaaaaagtttcacaaataatcataatgcaataagattaataatatagagagcaggggttaccaaccttggctgcccactagaatcacagaccacwgcaaacaacaacacagagctaaagmagccttgtcacctataagatcagtggttacacagtcacagggcaaaaactctgggactgagaagttttcttactactgtaaggaggaataagggtagatattttcttattctctattataaataggagactttttgcataaaaagggraaaatcatatcaggcaaataagctgtccataacctataacatagtagacatccgataaaccaggaatgggagaactagaggcaaaaccttatactgttacctttgaaatgtgtttttctgatagaattattaaccactaattaatttgggagatgcaaaacataaattcacatttctatgccttctccagtaacaaatgagcagactaatcactagttacaaaaatatttgttttaatcaccttcacttccattcttaagaataaaaatttttatttctttttatgaaagagagagagtgatttgaaagcattcaatgaaagcaatgtgatcatattatttgattggggatggtaattctttttttccctacttggatttttttttttctatttctagcatgatccctagactccacttagacctttgacttgtcagtcactgacagtgcaatttggagtctaagatcttaactatgcttactattttgtatgaactcataagtcaagctatatatatttttttttttttttttttttttttttttttgagatggagtctcactctgtcgcctaggctggagtgcagtggtgcgatcttcgctcactgcaagctctgccttccrggtccacaccattctcttgcctcagcctcccgagtagctgggactacaggtgcccgccaccatgcctggctaattttttgtatttttagtagagccagggtttcaccgtgttagccaggatggtctygatctgctgacctcgtaatccacccgcctcagcctcccaaagtgttgggattacaggcatgagccaatgtgcccgaccaagccatatatattttaagtagaaatactttgatcctttattgatatatattttaataaataatttaactgataattttccagttttgtaaagaaatatgcttattggaaaatggaaaaatcaaaagacagagattaaaatcatacttgtaatattcctccttaacagcaattactggtagcatactgggtgctctcttccagtctttttttcccacatataatctacatccttatatttttttctgttaaaaatttgaaacggcaaaactgtttaaaatgactaattttaaagttatatacataatataggccaggcatgatggctcatgcctgtaatcccaggactttgggaggccgaggccagtggttggcttgagctcaggagtttgagaccagcctgagcaacatygcaaaaccctgtctctacaaaaaaagtgcaaaaattagtcaggcttggtagtatgtgcctttagttccagaaacttgggagactaaagtggaaggatcacttgagcctgcaaggtggaggttgcagtgagccaagatcaccccagtgcacatcagcctctaggtgacagagggaggccctgtcycaaaaaaaaaatgtgtgtctgtgtgtgtgtgtatgtgtgtatatatatatggtatgcaaatgtatatatatttatatatagatagatatacacacacagacacacacacatacacataatatgaatataatactcttcatttataaaacaactttcatctttgtgtttcgttggaagtcattcccaatactccaaatttaaaaatgtcagtctygtaggctatagctaaaatttatctccyrttcattttcaatatttcaataaagtatatttcaattaaaatatactttatttttttcttttcagaaagaacattctctgtcacaaaattttcttttaaaaattatggtaaaattacatgggcactctagaaataagaataatttaaataaaagcccctgtcagttcctttttttcttttggactgtgttcagtagctgacaatatatcattttgaaggagatggtaattaaagtttttcttttgattataatttgattccttgggagtacattttttttttcctcctgtgagttagttccttgttggctactctcagctcttaactgttcatattttggcaaatacgggctaggtctgccaaaactgcccaccaggtttctcttctccatgtggactttcctatatacaactccttgtatataacaccaaatcttcatagagagagagtaaagtgcttttaattaagtagtcatgctgaggcttgaacatactgtatgaagtaaataatgaggcctgcaaagctttgaactaaatgtggtactaagtaaatggaaggatttttgctcaatttcacatgatcctgagtgaatttgtaataagtgaatttgtaatgcagtttttcctccttytttattttcattgtagctgtatacaaaaacaaaatttgtttatggcccacaaattcaaagaataaagaggcttgtatagttgaaatcctacctgttctagtcctcttctttaaaataaaccaatctgagcagtttaatctattttgcagcaagatttcgtcttgtaatgtcaaattatttaagttttagcagtgattctcttagcccacaaacacaaatgttgagaatgtaatgttcttgacttttctgtaactctgtttaatttttctgtcctccattctggaacaggcagaaactttcatctcagacaattcatagactccgctcccagtgtagatttgaattctgattgtcacatactgtctttgtgacattagtcagattaccacacctttctgtaccttagtttcctcatctgtaaagtggaaataatagtgcttaccccagagggtggtttccaaaatttgatgagtttatatatgctaagcatttataactgtgcctggcacatgatgaagtcttaatcgatattagctattatttatgtaaatatatagaaaggatatatttccacaaaaaatgtttaggcagtttctcaatttagtgcatgtaaatcttattctttctgaaaactaagtaggattttattgattggatttaacataattatctaaccaatacaccattgatggtcatttagattgtttctaagtttttgattagaaccacctgcgcttgcaaggtatatccttattcatatatctttgcaaatttctaggtgtttcttctagrtaaattcctacatttagtataactacacttagttaagaggacttctttttttttttttttttttatgttttgagatggtgtcttgctctgtcgcccaggaggtagtgcagtggcgcaatctcggctcactgcaagctccgcctctcaggttcacaccattctcctgcctcagcctcccgagtagctgggactacaggcacctgccaccacgcgcggctaattttttgtatttttagtagagacagggtttcaccgtgttagccaggatggtctckrtctcctgacctcgtgatccacccgcctsggcctctcgaagtgctaggattaccggcatgagccaccgcgcccggccaagaggacttctttcttaactaagaaactaagatttcttagttaagaggtagttaaattttagaagtaataccaccaaaaagttgtattaatatgcataatatgcctaatttctcattcagtcttgagtactgagtttggatattattcacgtgtgaagtagargtatggctgatgagatatatatatatatatatatayacacacacacatacacatatatatttataaatatatatctagcaggtagctccactttactcatatcttccatacacctcaagattgagatattgaatcattttgcatccctttggctctcaaacttgcttcttttgggggttattttccttaataaaaaggtatgaccatccaccccactgttcaatgtagcacctgaaaatccttgacaactttttctcccttgctttcacttaaaattaatttactttcttatatatctggaagttatgcattttaataatgaaacatgggttaagataatcctagcacatagaaccactgtcttttaaatattctactaccaaacctcttaattaccgtccttccttccagactggctctcatccaatcagttatccttatcttggttggaattatatttcttaaaggcaaatattcttgtgtttcataattttaaaaatttctttgctgcctcttgcttgcaggagaaaatctaaggtgcaataatatatacatgtgttctggccatggtttcttctccagcttcatcttgcaccatgacaccatcatctttccctcccctctaccctccatagtgaaccagaagagaactttctcaccaccacagatcttaacttaaaatcatttctgcctggaagcttcttctgactccttgtctaagccaagtctgctttaagtctccagtgtacaaaatccctctagactgtatgtgctctgagaatatgaaacatgtctgtccagtttaccacagtatccccaggacctaacttgaaaagagtttsatgaatggatatatatatgggggaatgaatgagtaacatcraagkgttgcctgccataagaataaagggaagaaccaatgactatgcctgcagaagagatcagtgtgatagaattaggtagcagacacagagactttttgtggaattaggaaaaagaaacagaaacaaaaagacacttgtggaaaatgtcttataggctttgaaaacaactatttggcaggtataacattagtgtttccttgcacctcactagctagggaaaatatacttttacgtcttccgaaagaagaagggagacaatttatataaagatggctaacttaaaaacctgattcaatatcagtaatgcaatagtgactttaacacctccaagttgtgacattcttccaacaacctgtccaaaagcttgtgaggcaaagaatgatctgatatttaggcaagaggcactatatatagtgtgacagttcagaattttaaaaaattgaatatttattttaaaggaaatgactttaattgtaaatgacaaaatgtgtttgctaaactgtccccaaatttttaatgatatcaaatttggtgaagaaggcagtctgaaaatgacaaaatacataaccactcttggattttcttgtcttcactatagctgtggctacatgtgtacacctagagatatatcagaaaaaaaaatcaacaaraagattagggtttaaaagtaaaaatgttaagtctaatatgaaaattacagaaaaaatacattttktctgtttatttttaaaactaaatatataaagataatatgatttgaggatttattttctgtaaattagaagttacgtttctcctttgctgcaaactgaaacaacattttaaaccatgacacagtatgttatctcagaagtattcactgaatccaaggaggaacttttgaacttgttaaactccaagtgatttccagaatatttttaaagctgtctgttgttctagatatttaatagtcatcattgcaaaggcagcatacagcagaaaasaaagtcatctataaataaattgccagtcatctacaaataaaatatactatattttycagagctttgaaagctaagtgtagaacatctcaaactttaaaaaaatgtacatatggaatttatgtcatggaaaaatcaaacacttggctgtgttacatgatataaatactgttattgcaaratctttattagaggggactttgcctgaattatttcaatgtcctcttccttgtgatgaggcttacattaataattgattattgtggtaaccccatcagagaaggaagatggattggcttatagtgtcagcacagatggagagaagataaattacagaggtatttaggggcaacttgggggttgtatgtgtgttaggagtggaggtaagaacccagaggtatcaaggaagactcccacatacatctggggaatgatagtgccattcactgccccttggcttataaactccagcaacacagagcagcttctagagtgtaggagagtatgaaaggacgttaggctgggcagggagcaaggaccaaatcttaaacaattatttgctatgtcagctcctggcagttcaccctataggctatggatactgcaattggtaggttttcagctgaagattgccgtgatcatagtatttggagtgacagtgtagagagaacagaagaatggcaracaattagactattataatagttgcatgagggaaaacaggtacctggggagttgaagattttaaggaaatatctaacagaatttacatccagttggctgagggcttgagggagcctgggcaggattgaaggactcttaggtttctggtttctataacygggtaaatgccaagacagctgagaaaggggatacaggaaataagccattcatttccattgcttaattaataaggtcagttgtttatactccattaaagagacattttgagaaataagaaaataatcatgttgagtccgtgctgtttttcacattaagaatcttttttttttttttttttttttgagacagagtctcgctctgtcaccaggctggagtgcagcggcgtgatctctgctcactgcaagctccgcctcccgggttcaagcagttctcctgcctcagcctctcaagtagctgggactacaggcaccygccaccacgcccggctaattttttgtrttttttgtagagatgaggtttcaccgtgttagccaggttggtctcaatctcctgacctcgtgatccgcccacctcagcctcccaaagtgctgggattataggcgtgagccaccgtgcccagccaagaatcttttaaatcatagaacttagagaggatcccagagaccatgaattctcctacttaktttattgatgaaaawaccaaggaccaacgattgagtcaccaatgcagctaatgacagaaccagagctagaaaattagacttctgtccttagtctcaagttcttcttccatactcatttaccctcaagcagtcaaaagatgttcaacacatgacatcctcttaataagtgtgcaatgttagcttaggaagggattttgctatccaccagagagaartaaaatgtagttggtctagtcaattccttatgggtctttaagagaatataatttttaaaataaattatttgtgctattaaaaaacatgtgaattgatgtggtgatttgcactcagagtcaattactatattaatctgcctaaaatcgttctgcctagtagtcagtaaaaatatttttaaagctccagccttatcagttttctatctgcagccctctcaaatacacttaaggaacaccacttttttaggaatatggccacaataaaaataaaagaagtaaatttctcggagttgttcaaagattaccattcataatagtaaaatattataagcattttgaatgaatgaatgaatgaatgaataagcaaactattctgcatcgctaaagttgaacattatgtagccatttcagttattcggtggattatgaggtatgtagagctgaatgtaaacaatgtgcctgaaagaaagtatgacatgtatgcagaagacatcaatctagacatatcagtgaatgtgttggaaaggttaataagttagaatgccacagataaatacagttatatttatttttgaatgtttgttttgtctttcctcctttttttttagttgtaaaataagagaaatgttttcataaaatctttttgcaacttctacttccagcaaatacggaaactaggtaacaaaaacattctgcaatctcagagtacctagaacagttggatgcaatgtgccatccttttcccttcgtctcaggaatggaaggaacttcaatgcagagtggttagtaagcaagccctgaaactacagctgtcctcaggatattcatagacaccaagcatctagataaagccttaggtttgcaagctcttatgggaagaagactcagacaaaatagtttttccctttttcttctttcttactaccagcccttcatgtagcgtttagtgggctggcatcatcacacatgatccactgattaccttgagtacccctggttttttgctttccttaattcattgactgagtagtagttattaaatatttgttgaaaataatttactgtgagacaattctgaaattctttaatttgtgttacaaaatagaatcatacatctctaatgaactttgttttaattaggtgagaacgtctttaattatatttttaatatttataagcaatacttattcaattaaaaatgtttcccatattagttatagcattttaatttttccaaatttaaaatgggttgatactatgttcaagagatagtaaaacataattaggagttcaaactgtgtaacaatgaaaacccgggtttgaacctggttttaccatctatgctagtttgtgtgatccaagtcaagttacttaacctactcaggcttcaatttctacatcttgaattaatatttgttcctcagagggttgttgtcaaaattaaataatataatccctgaaaaactagcatttaacgtaatgctaggcccatagcatatatgtacccaatgattattatctattaaagtgatagaggaggagatttaaattattaggataaatacagtataaaatattggctttattaggcactctcttaaagtattgtcagatttaacatggaaaaaaataaaatggcttgtatatrtaccttctgttttttttgtattcttattccagaatcataatcattagtctataatatcatatgttggaaagatttgttttttctaaaagaaatttattatagtatagtttgtctagaataaaaatgaactattataagtatataattccaagatttttagtaagtttacagagttgtgcagtcatcatcacaatcccattttaggacatttttgtcaccccaaaaaagtctctcatgcctgtttgcagtcaaaggaacttttatatttgcagagtattggggtatgatttttactcctggacctttcytactctgtactttgatcaagtatattagggcataaggtctaggatgaagctgagaagattttgaggttggaaggaatcaggagaccaggtttgggtattatctccatagggacaacatgaaaataccagaagtcaaactaggcagaaatagaactgactagaccttggaaggtggcaaacraaatcaaagcaagtgaactcgtggataagtgggaataggccaggaaaggaaataaagcacactggactttgcttatttaaaggtcatataatagtacctggaaaatttgaattaaagcaagaataggactaaataaaggatgtacataaaaaagacgtttcattggtttagaaagtacaagtaagaacttgcaaactaaaaagtggaatagtagaagccactgtgttctgaaccagtaaacacattttcttagagggggaattttcagcaaaaatgaatgttttttttttcctattagcatcatttttcacagagctaataaatggcagaatcaacttttgatcacaacactctttgattctaaaattttcatgaaaccttttttttttttttttttttgagatggagttttgttctgttgccctcactggagtgcagtggggcgatcttggctcactgcaacctccacctcccgagttcaagcaattctcctacctcagcctcctgagtagctgggactacaggtgcatgctgccacacctggctaattttttgtattttagtagagacagggttttactgtgytttccaggctggccttgaactcctgaactcaggcaagctgcccacctcggcctcccaaaatgctgggactacaggtgtgagccactgcgcccagcccaaaactgtgatttgtttaaaacaggagtaaaggtaaatatcaatttaagtacagatcatataactcatttaattatgtaagtgaaatccaaaagaggyaaaatactgttttgttttgtttttttctaattcttttctccaaaccccacttccagtagaaaatggaaagggtgcattggggaaagcagagaggcatgaagcccgttattaaaccctgtgagaccagaagggtatatttaagtacactaaagtgtgaattttcttttgtgatccatattattttcttctcagtcagaactgagagcatatatattccttcctctggattcaagagaccacatttttttttttttttttacaagtagggtttgagctagaaaaaaacaagtggaaatagttctagatttttttttctctggacacttaattctgccacaggagaagagacacaccactctaagtcatttttccctaaactcaccaatcctaatccccttctgttcatgtcccaccttccctgtcttttccttcttgttttyctccttgcctgttaatcatctctcatctctattttttaatggctccactgcataaaatagtagcttggttgagcaaacagattaaggagtggaggtagcaatggagtgggaagggaaaggatggataagtaacagagtaagtcccacaatgtgcacttgtggtcaaggagttaaggaaaataaattatatttctcttcttgtctgcctcctgccgtcttcaaaccctaaccataagtcaaggacttcaatatctgagagtattatttatcttgcaatagayaagtttaagtatagagatacggaaaccagtttgtgagctattacaataatcctagtggtagaaatgttggggtggttgcaataagtgtagaaataagtggttggattctgggtatattttgaaggaaaaggcaagactttctgaaaagttggatgaaagataagagacaaagagtcatagacaatattaaatggacctgccataatctaagatggggaagagtgcaaaggagctgggtgttgaaagtggggagcagatctcgggatcagtttgggacaggttaagctggagctgtgaacaggagagcttttgttttcattggagtccagcgggaaagtccaggctagagatggagatttggaaatcattagtgcaacatgtgtatttaaaccatgagattacttaggagggacatatagacaaaagagttccaagagctgagtcttggagcaagaggataggaaaataaggaagaccaggaaaaagggactgggacaaatatacactcaggaatttataagtccttgttttaattgtattttggttagcaattagagcttatgaatgtgaatgttacttcattatgtgctttatatttttttcacatctccaaaatatgacatggatagtaacaacrtatacacacacaaacgtgaggatggggatgtaggtgtgcattcttatgaaaataatattaaatatattaaattaccgtatttaaatgaatatattaaagtatatagtacactttaattcactctctcaatagaaaaatattatgaaactaatttcaattttcattatctgtgctttgcagtactatttatattctataaaatattttgtccaagtaaatattttgcctttcttccagagtcatctgattgatcgttgactcaagtgtttggatccagtttaaatttcatactactataaaatagagtttagttatgttgtttttatctagataattaaattatacttattacttcccatttaagaagctataactgttaaaatatatgacatgtttgaaaagtaaggcactgaataggtagataaaatttatgtatacttaaaattattttgtgagtggtgatttttttttccataccatactatttcatcctttcatcctggacaccaacgttggcttttattatggaaaatgaatctttcagcctcagtaggtgaggtgctcatcgttaaaaagacttcatcagaacaaccgatgcctgctacacaactctgctccaaaggagactgaattaggagaaagaggcaggagttaggattatgtcccatcatggtgattgaagaatgtattggggagaggaaagggaatatattgggagggaaaagatgaaatcatgatgaaaaaggttaggagagcaaacactggtaatgaagagggaaccaaagcaacttttgtgaataagrtgggttgtaaaattagccttgtaaaaggtgctaagaaaatttgaataccttaagaaggaacttttatgagagtccttgtgtagcatgatcaagggtttagaggggatctcagtcaaaacaatgacagggtgtctctaaagatgctccgtccctgcgttggtatctctggagatgcttgtcacaagtgctacagcatactaaagcagaatctcttagcagatgttgccaaggaatctgcatttttttcaataaacattgaggccctgtcctcatccccaaggaaatcttattgtgactgctaaaatttgagcaccattcaactagggcatgaataaagaacatgtgcagaataaatattagaaatgtgtgaattagaatagaatggagtggagactgtcagggaatttgataatgaaagtagtaatattcaggaaaatagtaacagtgaacttctgggaaagaataatagtaaagaaggaaggcaatattgataggagtaaaatggaatggatagaagtgagtgtatgagaggccagagaagacacattcagaaagcagtcatgtggtttttttccaattctgtgaagaaagtcattggtagcttgatggggatggcattgaatctataaattaccttgggcagtggggagggatagcattaggagatatacctaatgtaaatgatgacttaatgggtrcagcacaccaacatggcacacatatacatatgtaacaaacctgcatgttatgcacatgtaccctagaacttaaagtataataataataataataataataataataataataataaaagaaagcagtcatgtgaagagagagatggaagaccccacaaggccatgagcattctagctttccaaaggctaagccacggggagcctgtaaatagccataagaggacacaggaagcgatctctgatggacacagaatagcagacctgcaaagagggatcacatagmagtgaccacatgactctgcaytgggtctgtaagtaggtcctgctttctgctcttggagctgctgggtatcaaaagttgttcaaattctggtgacacatctgtatctttagagaatcattttctttacaaaaataatgtggagctgtttgatttattaaagtctgttacggattaaactttacatccagcctgagttcatgatttcttttgtaaagtccttactacactcctgcatgagatctgtctcaaccactcaagaagccagaaagagacatagagaattggctaggactactgtttcctttcccctccttgcaatttttttttttcatttactttaacttgcattaagacatacatgatagcaaattaaggtatgttttatctgaagcccctaacttctgacatttaaaagtctacaagtaaactagtaatgcgtttcttagccttcataaatctgataccttcattgacttcttgttcaatcttctgaatrgcccaagcctcaaagkgcatttcttttaatcttttactaartaagtaaataaataaaataggaggaatattcattatatgtttgcaaaaaaaaaattgtttccttaaagattctgataattttcccctgaaaaatcactagtgtgagaagaatagaacagatcatgcttcctagatgtcagtttttcytagtggtgtctgaggtttcaagatgaggaataaaattatggaatttaaataattgagctgataaaaatgtagtagacatattcagtaaataacatcgactgcaaagttttttgaaaaaatgtcttgacatttgggtataatgggatgtaagcaagtttacatgaatcttgtgcatgcatgagccattacttccctcttctttccttctggcaactgttttgctgttttgcagctttcctgctggaatgcctcttcctgatgaaatggatcaaagattccttcactctaaagaatccctgctcccataatgtgcttgattagttcctagatgatgattataaaagtcaataatcctcaagcctgtaatcccagcactttgggaggctaagaggggaggatggctcgaggctaggcattcaagaccagtctgtgcaagcatagtaagacctagtctctatgaaaaaawttttttttaatttaatcaggtgtgatggcttgtacctgtagtcccagctactcaagaggctgaggcgggaggatcattgccgacaaagagttagatgatgcagtggactctgattgtgccactgtactacagcctgggtgacagagtgagatcctgtctcttaaaaaaaagaagtcaataattctttagttaataatcaattttagatttctttgtatgttaartggaaaaccataagaagaaaaagtgtcgtgataaaataacactatgaaatagcattctgctactaatgtcctttttctgtccaataaatttgtccatgtgcccacttgacattaattaattttctcctcatttctcagctattaaaatttacttcctccacacccctcacctagtaacatggggggaaatgttaggtagtaggtattgaatgctatttctgtgccaagcacaattttaggcactttatatgaatgactactaacgttacacacctcatagaatggtttagatgattattcccactttcctgatgaggaagaaggctgcccaaagtcaccaagctagttagtgacaaaccaggatttacattgagattggcttgaatcttttcccactggcttatgtggcctcaagttcattaggaattaatagtaatactaatttgttttgaatactaatwcttgacatacatgattacatatatgtgcatgcatgagccattacatatacttgacatatatgtaatcacrtcaagtattagtgttaatcttcccagtgttttagcaaaacaagattacctagttttaaaaarcattttcrtcaccttacataaaaattgctagtgcatcattaaaaatctctyaggacagttcttatcaataggaaagagtgatacttggagttctgtktatcatttgccatctgatattaagggctgaacattcattatgctgtttgtgtaacttatttttatctttgttgttgcagtaccggataccagtttatttactattcacctgaaaacacagccaaagcaaaggaagttctcagcaacatcaatcaactacaacctcttatagcaacccatgcagacctactgcttaattctgcaagccagcattctccagacagcttgaagaattctttaaagatgctttcagaaaaagtaagatccaaatcatcactatagttgggaaaatgaaatactcaaattcccattggtctggctttctgcatacatcgccattcatarcatctggaaatgtaaaatagagtaggttaaaaagtaagcttcaaagtattgccacaggatcaaaatgaattggcctcattctctgttcaaatcttactgagcactctttttttttttttcttaktaggaaatgaaacctgttattggttggtatatatcttctcttttccttggcatctttcattttctttggtttatggtcttattaagtgaattaaattagattttgaaaattactttattttcctctggtgatcacctaatttttatgcatataaagctttacatttgaataggaatgccacttcatttgaaggcagaactttgatgtggatttacatcagtctgtgtggggtacttcctctgcctcagtttgctctctacaacwttatttaccgaggagaggttccaaaaatttccaaatgtgtcagttatttgaaaagcagtataatctaagccttagtttttccaaaggtgacttgttyctttatctgcagaaaggagagctagtctggcatggggtagacactcaatatcaacttccagaactaacgagggcggctcgctgtgtgatagaaagctgagatagaaaaagacaagtgacagttgattttcaatgtaaaaccagtgtccactttcaatgtgtgcatccttcacctgtgcattttaaggagatcatgtaattttttatgagaaactttcagtaaatatgccgttggagaaactgatcaaagaaaattctcgtaattgtagagtaagacaaaagtgtagttttccacctctctgaagaacagattcatagaaacctggatcttatgtatgtccatactttttattcaggtatgttaatttataataatatcttatgcttatttaacattgcagtttatacatttttatatgttattctcataggagaaaacatacctattttcatgaaaaaatagttaatatctattcagaaagttcgagtgaattgtctaataaattaaaaagtgaaaagccaaactcagaacttccagttcaaaatgcagcattccttccaggccagaacacatgcctctgtcgtgaaaagggaggaaaataytgacccaaattttgcaagtacttactttgcgtcaaatagggcaaggggcttcacactttatgtcattttatttaatcatcagaattatggagaacatattatcttcatttcacacagaaaaaggctaaagctcagagaaattttaaaaatgtgaaaagtcatgcagctagagtcaaatacaggattcaaacaaaacctgggttcaaacccagatctggatgactccagaatggaagttctttttagcgccctccgtctaatatatggattttgacatttccttatttaaaagtttttttwwaaaaatgtttgttagacaaatgccttagtaatacctaagtattttgatattcaataagtatgtttttctgactagggaaaaagaaaaaagaggaggttgttgcatacagtaaaataatataatttcatttcggttcatttcttttttggatttatagatgaggtgaggtttttctgggttcacctaagctgaaaattttagcgaatagcacaccactgcagtgattacagagcagtatttatattcttcttgtgcactgggcagggatttgtcatttcatacatcatttacracttgctgcagtgattttggtggtgggaggaggttaggatgggcattttctgctccttgaatccagcattgctccaactttttcccctatgttttctcttttctactgagtagacaagcttagtcgactaataaatctctcagtccttaaaactaggaggatctttttttaagttaagtttgcaagccatgcattcttttaagaattcatgactggaatttcaaagaattatctaagttaacagttttgtatagtctatgagcactgttagtatctcatggtttagaacaaagtatgatccatgaattcaggtatgaaagagagagagttttagtggtattctaaatttaaatataattgaatattagtgggatgtaagctttaaaagttctgtttttaagttttgggcttgttgtatactatggattataaaataaaaacgtttacttcatggagagtcccctggtttcctttactgattctgaacttgcgtgtttggaaaataggtacctagtgttgttttcttagggactaatccatatagcatattcaagacattaaggagttatctatattcatgcttatcagggaaatgtgaaggttttatagcctttgagcacctgaacatggaagagtttactgttgtagacttggggcccctggggaagactgagggcagcccagggcagtgaagaaggaggtattctattttgtaatgaggtggcatctctcctcttaggtaagccattgcacctgaagacaatagccatgaaatcattatcaattaaacatatagtctgggggaaaagcaagtggcaacagaaaaattcaacttgctgagagggcatattccaggagtctttgagtaggcaatatttgtagatccaaaggcaatttacatcatctctactgctactgagaaccaaggcacatggatagagctccccaaccaaaattccatccatctaaataaacactgttggtagagacaaacacatasaatttataaactaaaaataattcctgaattcatactatttgacagtcactgtgctcaacagaaaaggtagaaaaatggaataaaacacaggcctgttcttcccaggaattccaaaactcgatagtagtggttattacgatgttgaagtgacagtaatagctagcatttattggtggcttaataactctgagatactcttataagtgcttcaattttcagagttccatgaggtggataatattattttaacatgtagtcttcctaattctatgaagtaagtattgtgagtagccttagtttacacagttgaggaaactgaggcagagaaatattaaatttactcacaatcacacacgttgtgtttttggctccagattctgtgagcctgaccagtatactgtgtcttcagattgctatatggatgcttgtacataggactacggaaacaaatgtgggggcagggaaggagtactattaaaatttcacaaaaatcaatayttttaatgtttcatgttctaatatgcacaaactcaattaaattgtatcataattttaacattcttgttatgccttcttatggataattgggtttggttgttgcatattagttcatgaaaatattaaagaatagtataatcttatggtgtaagaatctaacaaaagccaagctgagtttttctgaataattccaacaaaaaaggcaaaagatagaccaaaattttaacatacagtatgaacagttaataatagagtgagataaaaatgcatttccttttttctcagactaaaagtatgcaattctatgaaggaaaaaaaacaaggaatagataaaataaattcaaactaaaataaataatgtttttaaaggcctgaatgtggacagtgttyacrtatctctcatagctcagaaatctattagcgttcaaacacccatcactttctccattccattgagattgatagacsttgtttaataagtcattattatcctgctcatcaaaaagcactattgagcacttaattatgtgtggtatcgtacttgatgctatatgacaaatactacatagatatggcccttaatttttacaacctaagaatttaaaagaatggggtgttttataatattgcatttgttaaatagttaaataatggcttttattgtaaatgttagaggctatactcacagcrtatttgagaaattctcatagcttataattcctactgttctttcaacctcaatatactataccaaaatgttctcttatattcaaagaaaaataaaaactattgtattctgaaacatatacaatcaggatgttttcaagcaatgttgttttctataatagcaatgccaggcagctagtgtgctaagaagttgaagatacacataatagagagaagaatgttatgttgattacttaaaactgagaataayttttttattgtttattcactgtaaccactcctgggtctatctcagtcccaaactgtgggaaagaacttaatgagtagaaattttgtttgtttttttaagattggcaaaagtatgtattagaagtctaagaaaacttgagaataaatggtttagataaaaatgaaatttcaggacagaaattatgttgctgtttttcataattgcctttaaatggtaattatttaattggtgaaataagagatagtatacaataaacaaaatttgttattagaaaattgtacaataagaaaaataaagataagaatgtaagataacattgacaatgagactatatataaaatttatggaatcagaacttctgctgtttatgatggattaacatggaccctcccaccttaaacaacaagaaagtggacaaaatgtagacataatggtttttaagcactggaaaataggtaacaaattatgtgatccttataactatctagatttcttcctagggcagttcctaggctgtagcaaaaaggaacctaaacattatcttctcaaggtgaagagacagagattagagtttgggaggccaagattgctagaattcacagagcagagtaccagagaggaaggagcttcacacagaaggaaccctggagatctgtaaatgagtgcctttaactctttatgagtaccaatctgtgtatgcatgcgaataagctacccatgtccacagaaataartattaggaataagcttaaaaacaattcctggtggtcacacaggcccgggaatagtttatctttccaccagtaaagtggtaagactttttaatacaacgggaattgaataaagtcctcagaagtgtatggccctagtagcgggactaaattagtcttagattagaggctgctcttagtctaccctaacaaggtttgaaaacaaggcttgaaaggatcccactgattctgagtaattttactttgccatagaaaaatccaacattatttaaaggaatgcaataaaatctgacagccaagaatgtaaagtcaaaatgcctgccatccaacaagcacatactaagcatgccatgaagcaggaaaatatgatccgtgaccagaagaaaaatcaaggaatataaacagaaatgacaaaaaagggagagagggaagcataaaaatattggcagaaatcatggtcagtttttcaaaatttaatgaaactacagacccaagaagctcaatatactccacacagaataaatatagaaaaataaactcaagtacatcataatcaagttgctgaaaaacagagatagaacattgtgaaaacaaccaagaaataaaagaaaaaaaggacacatgtttctctgacgttcaccaacaagaatgatagcagacttcttattaggctttakgcaagccagaagaaaataaagtcacatcctcaagctactgaaaaaaaaaaaatcctgctaactctcaaaaataaaggtgaaatggagacgagttcaggcaaacaaaagctgagaaatttcataacagatttgtactacaacaaatcataaaggaaagtcttcaggaagaaggaaatgataccaggagatatttgaatgtacacaaaagaataggcaatgccaaaaatggtaaatatgtgaatagatttttttattaattcaaacatgtttcttatatatatttactcttccaaataaaaataataccaatgtattacgtcctttgtaacatactagtgtagcaaaggcataaagttcagtggactagaatagagaatctagaaataaaccaacacatgtatgttcaaataactagacaaaagcacagcagaaattcattaggaaaacaatatcttttttaaaaatttaatgttaggttccaggatacatgtgcagtrcgtgcaggtttgttacataggtaaatgtgtgccagggtggtttgcagcatctatcaacccatcacctaggtattaaacactgcatgcattagctatttatcctgatactctccctccctaccataccatcttcccaaagtccccagtatgtgtttttcccctccctgtgtccatgtgttctcattgttcaactcccacttataagtgagaacatgtagtgtttggttttctgtttctgtgtgtgtttgctgaggataatggcttccagctccatccatgtccctgcaaaggacatgatcttgttcctttttataactgtgtagtattccatggtgtgtatgtactacattttctttatccagtctatcattgatgggcatttgggttgattccatgtctttgctattgtgaatagtgctgcaatgaacatacatgagcatgtatctttattatagaatgatttatattcctttgggtagatacccagtaatgagatcgctgggtcagatggtatttctggttctaggtctttgagtaattgccacgctactgtcttccataatggttgaactaatttacattccctccaacggtataaaagtgttcctatttctccacagcctcacctgcatctgttgtttcttgactttttagtactcaccattctgactggcatgagacagtatctcattgtggttttgacttgcatttctctaatgatcagtgatgttgagcttttttgttatctgtttattggccacataaatgtctcttttgagaagaatctgttcatgtacttttcccacttttaatgtggttgttttttttttcttgtaaatttgtttaagttccttgtagattctggatattagacctttgtcagatggatagactgcaaaaattttctcttactctgtaggtggtctgtttactctgttgatagttcctttcgttgttcaraagctctttagtataattagatcccatttgttagcttttgcttttgttgcagttgcttttggtgatttcatcataaaatatttgcccatgcctatgtcctgaatggtattgcttagattttcttttagggtttttatagttttgggttttacatttaaatctttaatctatcttgagttagtttttgtaaaaggtgtaaggaaggtgtccagtttcaattttctgcatatggctagccagaggaaaacagtatattttcaacatattttgcagaaacaattggatatccatgagcaaaagaacagttaactttacctcatacatatataaaatttaactcaaaatwgatcataaaccttaatgtacagtgtaaaagaacaaaagcaggcaaacttctataagaagtcatgaattgggagaaaatatttataaaatatgcatatgttaaaggatttgtatcagaataataatgcattcttagaacttaatacaacaaacagctcaattaaaaatgggcaaaagaattaaaaatatacttcaccaaagaagacttatgaatggtaaataaacacatgcaaagttgcccagcatcatttaccattagaaaaatgcaaattcaaactatcatgagatgcccttagccacctaccagaacagctaaaatcaaaaaggccgaggataaaaagagtggaggaggatatggacctgcaactttcatgcatcactgttatgtacacaattatttgcacactttggaaatgtgaatgtttcagcaatgtttcatagcttgaaaaacaccgtataatttggtcatctaacacctagttattgattcaagagaaatgttattctgttggcactgagaaggctgttgaatgaggaaggattagatacatattttatgaaggtcatctttataacaatacataggctgagttaagatactggatttgaattattgaacattactgggtatcacaaaataaaagtaatgcttctgggggactttactaaaaatacaaattctcatttatatttgtatttgtattgtagttcaaggttggaactcagaagtgtatattttaacattggtggcctttgataacattgtaaaggaaagacaagttaaagtgaaccaacaaataaagagactgtggaaagtatccctatggaatgtagaaaggatcttaagtgggactagctgtggaaatgtaaggatcgagttttgaaattattgtaaaggtataagtagaataaattgctgactaatccagaaaataggcgttagtgaggataattcagaggtttggactctgagttgttgaatactaatgatactactcaaatggaaaatcttgaaaggacaaaattactaaaaattaaagaacaacaacaaaatcttgagttcagcctggcatttctgaactctaagggctttgcaatgaaaacagttgatagagctggttcaggagatggatagagatggatttattagaccttggcgtaaagatgacagttgaactatgggaaaatggattacctcaccaatgaaaaaaatgcttttgagaaagtgatttaaggtcccttgtgggctgacttaccacattttgggtgaacagagaatgatgagtcaagaaaagaaattgaaaaggccaatcaagaaagagaagcattaggatgggcacagtagctcacgtttttaatcctagcactttgggaagctgagacaggaagattacttaaggccaggagtttgagacctgccttaaggtctcaggcaacatagtgagaccctgtttctacaataaaaataaaaattaaaaataaaagtaagataaaataataaataaaaagaccatgaaagagtgcacttgagggtttacaatgaactcccataggagtttgagaggtaggcactgtaattttatgcaaactaggaaaaatgattatgtggtttttccaagggcaaatggataatatatatgagctgcccaaatgttaagtaacctcctagctgttagtctaacatgctttcctttagggaatgttgaaaatacatcagtgccctaatgacagagtrtagcactattcctatatcaagtaatttcaaaataccaaatatcaaaataaacaggattcttgctgcatagatgattactaaaataataatcacttgcatatgccattggctgcttctgtattacaggtggaattaggcattgccttaaatgttttttcagcgagaataaggagatttctaggtagaatagaactttatttactttgttgagatctctagtgaaaaagagtagttttaaatgaacatgtcctaactattcctctgccattaatattcagaaaactagaaattctcttcattcatccccaggagaagtaatttttagtagttttatacttgcagataattctgtgtgttgctttgaagaatagttgtatggggatatgaattggaaaaatgtcagaaggctagaaaacatttcgtttttttaaggtaacatttctctttcattttctaatatgaaaaaataaaatagatctgccttacgttcagagtttattctttttacacgatattattaagctgatattttaaataaattgtttgccctactcttatgataacatttagatagactttcttttttcatttaatgtagttcacgctaaatgagaaaagaaaaaggttttttagaacagtcagtaggcaactcagtgatatggtcacatcctttccatgacttcaactttcctagtrtcgtcccagttgcaagaacagcaatacaatagttcccccttatccacgaggatatgttccaagacgcccaggggatgcctgaaacccctgatagtaccaagccctgtatatactgtttttttcctacacatgcatagctatgatacaatttaatttaaaattaggcacagtaagagactaacatgagctaataatcaaaacaattataacaatatactataatgaaagttatgtaaatgtggtctctctcaaaatatcttcttgtactgtactcacgtgtcttcttgtgatgatgttagatggtacaatgtctacgtgattagataaagtgaggggaatgatgtagtgttaggcttccacatcaaggctacttgaacatgagcactgcaataacctgacagtcgatctggtgacccagatggcacctaagtgactagtgggctagtagcatatacagcacggatacactgggcgatttatatcccagacaatctgaggcaggatggcacaaaatttcatcacttgactcagaacagctgcacaacttaaaatttatgaattatttatttctggaattttctattttttctttcttcttttttttcacttaatattttcagaccaaggttgaccacaggtaactgaaaccatgggaaagcaaaagcacagattaagagggactactgtatacagctgtgttgggatttagtgactacattaatcttttcaagctgatttatttgactgcgaaacatcaatggtctacactggtctacatcactaagtagtgctggtcaaaaaaaattaaatttttttcaggttacatggatatcacaatgggacatttgggtattttctaaaaaatgtgattctctacacaggatactggtgatccagagagtttccaagaagtcagataaattttgtcagtacagacacaaagtgaaagattagctattattatgtttaagattgtaagccttgtattcagttatccaaaaaaaattttgggttttaaaactgcaggactctcctgcatgatctcccttgcctttggtggtaaatcaactcaaatgagatttgaataaatgaagtggaatctctgcatgtgcatgtgagggaaagaaattgatagtgattacaagtgctagagaagatttcattgagtgtgaatgaatatttagctacatggcaattatatgagtattgtggagacttgaaatgtagtagcaggaattcaaagaaggcaagttgtttggctcaaaaaataaatcaaaagaatttattgaaaccatcaacagagaaattgtttagttaagctgaatgggagtaaattcatgcttttaatatttaaagtcacactgataagcacatccatgctatataaaaaattatgtaaataacatgtttcctcattttgctatgactacactgacttgtttgagtactgtctagccaatttttccatcagtttttttatatctttcattctcattttaatacttcattgtgaacatcagtgaacacttcttttttttgcctatctagtataaactgctttttattttgtttttctgatttattctgaaatatttttcaatcttttattcttataaattatgtttttcatgttttgttttctcaccttcaaagtggcttcaatgtgactaataacaggatgtttaaaatattcaacaaaatttagcagtaaagtagttacacaggcattataggcacacttaattatgaaaactggtagatgttcaaaacacttggaaagttgaggttagggaagaagaggaagaaggacagaaacatctagttttatggcgggtggtgagtagtgtggaataagggagaaagctgctaatttgttggaaaacttcattcctgttccatttgtgctgccaatacgcagtattccctaaaacatatcaccacacttctttcttagttttctcatcttgattaatgaagaggtcaactttaagatccctttcacctctaaaattttatgatctatggcaaatgagtaactatgcatatataacaaaatcttactgggcacctgttttgcatggggcttaactggttttctttagttgctgatgctgtcaacgagaagatttagagtctactctaaataatttagtgactactagttaggcttggaactgttgaccgcatattgagagtgcaccaagaaataatgatgttgagttatatcaatggtgaagccagcattatcaagagtgtctcattaaatggtggcaatatcaattattattcaatataatgctatgagttaaagggtcccttcctaagagattacagagtatgaatatgttaacaatatgggccattacttgacttacatctctactctttgaacagatcgttaggccacatgcatgctaagtgaagtaattactgcacccttcagtctattacagggtgaaactgttaaacatttcatcaggaaattgcaaagtacagctgtaaagttctttattgttgggaagccttcattgctatagtacgtactaggtatttgccaccagcttgtaaaatctacatgccaagtttcacagtaacctcattaacattaagcattactgaaacaatttagtggaacagagcatttaggaggtgataataaggaaaacaggcccgatgttttcatgaagaagtctgcctatgccatttctactattgttgagatctgtttatgacactaaaaaaaaaatcttctcctttaaggatgtaygtctttctttagtctttaactgtttaaaacatattaggctggtgcaaaagtaattgcggttttaataaaatacacatagactgattacattttcttttcaggagtgtttggaatgacttgaaagctgcagcaggtagatgttgttcaaatgattaagcccactgaaattcatctccaaagacaggatttgtgaaactaaaagggagaaggttgaggagacagacggtgtttatagtgcatttaaaacctcagcattaactttaaaacaggaggacttaaggccttggcagcatcccagaaccaaactattttccattgattggtatgaatcattttctctccttggygtctgtactttttccaccatacacaccacttaagtaccaacaaatctgcaattgaccttttcacagctctatgctgagatgcctaccaaggtgtttctaatccttgtcaatttctttccagacagagctttttgtacatgccttcaaggatcaacttgtcaggagtgctcttttagcactctacactgcaaggccaggaggcattcttaagaagccaccctctcctaagagcagcmcagaggagagcagtccccaagaccaacccccagtgatgagagggcaggactccataccacatcattcagactatgatgaggaagagtgggtaagtctcttgtatatcgcttgcctctcaatgtttggcaatgagaaataaggtaggaatgatcagatagctctgctttccattttaaaaaatggaaaaaaagttataacactgattgtggataaataggccacatttttccttaggggcaatttttttttggaagttgaaatcctgataaaatttatttgctagccaatgaattatatgtttaagtgagaatctgtcatccaagtaaagatgccacagttacaagactcttatgtttccttatttattgccaaactatataaaacatgaaagttattttttagaaaaagaataaaaaaccctccatgttactactacttagatgcaacaagtattttcattgttgcaatccagtgttttggttctggaagtactttttaaaagtattcacatttaaacgacaatagacrtagatatctcgcaaatccctctcgctcaaggttctataatgtaagatgctgctctaggtgctctaaagtttacagaagaatggcctcataaaatgatacgaaaaaatagctaggaaacatgaataaacaaaggaaataaatatggtgagagaaattctagttgggccgaataygatgggagaaacgtgaaggtgtaccatggcagaggaacagggtgttattactgaatcgatacatataaattattcaagaattctccaaagtatatgcatattacacacacacacaaagggaaatctattactgtatcatatgtttaacaaaaaaaatagtgtgctagctgtattagatgttaagcttttagttaacaattacttttcttgccaccctagaatttaagaatggggagtaaattacttgaaaggcacaggcctctcaaaaaaaaaaatgttatcygaaaggctgtgaggtgatgcctgctttttcttttggtaaaatttctatcacaaaaatgacagaggtgggctccaagaggtaaatgctgagtgtttgtcgttggtgattaaaattgcatttctcccaatgaagcattttcaaagagcaaatctaatatttctttctcccttttaccttcaccttcttcacttttttttttttcacagttccaagtgtacacacctcttaacctctgaagttcaattttctcaactgtaaaatgaaaataacagcacgtgttctgttagctcttagagtggtcatgaaatcaatgatttaccatgttacaatgctccatttcctggaaatgccaaggcaaatgcattatattactttagtattattgttatatgtttcttaagtaatataaattatataatcttattaagaagattaatactatcccttgagataagtggggaaattagatatgtcatacaatgtggattgtgaattttgaagagttcgagtgtatacagaaaagaagatatattttatttaataaacatccagtgttgaccttttgacaaataattaccattttatattaaatcaagtgagaatcttggaatttttccccctcattttaactcactatgttttacaaacccttccccctcaccttgaccccctcttcctgttgaaaatagtccctctccttccttgtttccttttctttagataatttttgaaaccttttattaagtatttcaagtgggaaggtaagtaatgttagatccttagttcttggagctcagagtctagtgatagataaaaatatgtaaacaaatagttacaacattttgcaacaaagcttagaaagaaacatgatagaagacagtttctgctaatatgacttcaactcaaaattttacgtccagaactgtcttatgatgggcaaagacggaagaaagtggggactgtatcattagttgagaaggtttacagagcactattcccttcagtcagtgttactgagtacctgttctgccttattcactgtgccacatgctggggacagcaggtgaacaacgttggccctcagttactccacagcctattcagggctgtagaaagacaaatagcaatcgcagtgcagccttagagatgtacatgggatacagcaagaatgtggtagccatagtggtgttgccagaagtaattctggagatttaaatctgagtataagttaatcattcaagaaagaagatgtggtgcccttttagatggagcataatagctgacatacagagagaggtagttagtgtgtgtgtttgtgcctgtgattattattagttatttacatgttttgttttaaagtgagtgaaatttgagcatgttatattccaaaggctatgtgagaggcacagaggtgataactgatggagcaaggtccttacaagagaaggaagaaagtcaacggtagggtccaggtggaagagcaggcacttctcctgagactgcagggaggatgtgaagatgtgagggtgggtggggctggatggctgcttttatccataaagtagaaccatgtgctaagagaaaaagacggggaggactggagggagtggtgaaggtttcaaataggcaccgaagaaatgagtacttgagctaatgagtaacgtgaaaaatttgagaataattccaggctttgtgatgggccagccaaggctggagtatcaggtggcatggttgtttgtttagcattcattattcttttgggaatattttctagtcttaacaccaggaaaaaagtctttctgattcttttctccagttgatgaaaagctgtcatctcagtttctcttgttgtccttcaaaggcaaaaggattgggcaataatgaagggctgcattgctctctgcatctccttaatgtcatttctaagcctccttctgaactcattgtttctggaaagcatatacaagctttgcctaaatttaccataattacaagaaaaatctttcccactcagaaaagttacttctaattctctccttctaatataattttactctttttgcaaacaagaaccgagtttgtttggtatataacattttcattgattttccttagcaaccgctttctactgaaaacattccttcatcagaggatagaaatcccttataaaaagatagaaacaatatttcaccagagtcataaacactaacattattctcaaagctttatctaactttgataaattgagtaaaactaaagaaaatgtagctaattgaagatgcctttagagactgtggtattaaatgaattagaaacataactttgtatactcccttttttaattagttgttagaaaagtttcagtgctgattacaagtctagtcaatgctggtagtaactcagcattttaaattaattcaattgggtttctgtgatattatgtgaagatattccctgatcacttaaattggcttacgtttgcaaataaggttacagtaattccattaagcattttttgtttgttttacttaatttctgatagtgactgtaataattacctgacttgaacaactgtatttagcttcttataatargtatttgggaagcaaataaatggtgttagattacacttaaatcctacccggctgatgcaggtaagaaccattcttttgaagtcaaaaaagagaatcctgctcactctaaatcactatgaggctgtcctttctcttttcaacttgttttgttgacaaaattgatggcatatgaatctggataataatcatctagtcaatatggtaaagattgaaactaaaatgaatgtttacaaaaaagtctgttatttgctgaattttacttattaaataatggaatgctttaagggtttattttcctgaaaagctagtaaacaattaaaccccaaaggaatatttgggattgtataacaatctgtgccaaggaatagactaacataccattctcttttagccagttaagatgacatattacttttctttctctacatctctgcaacagatgcttccagcagctgggattccaagattagtttgtccaaaatgtgaaagcatgtcatttaaccaaactattaagttgacctagtttttgtggtttmtaataattctgaaattctgtggaacactgtgatttaatttcaaaattactatagtgataggttaagggctaaatctgcctacttytattcaaatcaattgttaaaaaagaaacttctgatcctttatattctgatccattctagcaaactgcaaaactagaaaracaattcttagtatttagacagacacaaaacccatttttaattgatctacatttctgcatcaagcggcatttcagcatccaaattatccaattaattcccttcatgttacaaatataarccaaatttaaaattttagtcttctttcttaagctaggcaaacatttgctatttcatattatgttaaatgtgtttatgttacataaacacaatggatgatccatccatattaatttttcaataattttatagactttagaaacaatagcacaaattcatagtcatatttatgtaaaacatcctattaatagactccatagataacctaaaaatctgtggccattctgtaactcaatactaccaaagattatgtttgggaataagatttatatgaaccatcttctgatatattccttacaaattttatacagttcattttgtactatacctttctctaatgatgcctacagcagwtgtgaatgcttaacccatttatgcctgaggctgcaattttttgaatttctgcatgagtgaaaaatcagaccttggcgatgaccttgagcagtaggatataaataactgcatgcttagcattccaataatggaacactaggcataagggggccaagcttgacaggagcattgaagagctatttatactaccataattggtagcagtgagcatagacagttgcaagcattgttaactgttgagaacaaaacatgtttagccaggtatctccataggaaatctatagtgatctatattcccaacttctcttgtccaactactctgtccatcttagaaaacattacgtctacagaaaaacattgagaccatgcataatgcagaggtacctgtgaaaattaatattcaaaagattttgttcagttatctgattggctagatgtgatttmaaaccattgtcctgatcttaataagaaggagatarataattctcattctttagaagtaacaaatttttatagactccttgatattaatctatgattaaactttttcaaagcaacaccttatagcttggttacctaaatgagtattatgtctactaaaatatggccatttacttccaaattttgtaagtgatagatgcatatatatgtgtgtatatatattaatatatgtatatatatatatccaacttcaaatcattttgtataataaagccttattcttatattacaggagcacatagcctagtgaacactgattataatcagttgtttatatgtctgttttctccatgtgttcatgaactttataagctttgataggaaaaaaacaatgtctcattcactgttgcattcacacagttagtggagcatgtgaacacgaaaggtactcaatacacatttatagaatagattaatgtctttgaaatttgtctgcagattattttgatttgtcttcttattttgaaacagagaatatttcaacttaatataattctgcactatgtccagtagcttttctcccactataattcatgagtccttttgaggattttgtttctccccttcagtgaagagtacccagctatgtccttctcttcttggttcttacttcccagtgtcttaatcaactctaagatgactattctagccatctgcaaaatatccccctctccctagtgcatatttcctagtgtcttaatcaactctgtagtgactatttaagtcatcttcaaaatatcttcaaatatagaaagtggtaaaattcaagatagacacagaaaatcagtgatgaccaaagctaaggtcatgactaatgaaggccttcagaagcctctagaaaccagtgatggcaactttatttaattattaatgtgcagattacaaaggttctagttacacagaaataatttcttcagatgtttcccagcaaatataaattgaaagtgactagttgtcccttgtcccaggtttttctttttttttttatccctaagtcacacataatagggttgtatggttctgttaatcttaaaaggaggagggaacactcaaagcattcactctcaccatcagaaagggcagtcaaaggcagggagaatggggccagttgttccctatrtggcaactgaatgtgttctatcctctgttttcttgatggatgggaaacattcctgaacttctccagtctatatcacccaagagaaatgtgctttgaatacttatccaatattaaggtccacaaagggtgattaagcaaagttcatgactggtccattaaaatgcacaaatgttctattaaagaaaagaaaccccaggtgaaatctttatgtgcatgcatattcatgaaatcttgccaatttctagattttcccacatgcagttaatattttcacctataaaaccctgttttataacacctaacacatcttatacatcctagctcaatgtctttttcagagttaatgtaggaataagtgaatggatagacttgctgatatcaacagctcatcctccaattcaaacctgtattttaatagatattttacttctattaatgtaatgaaataatgtaatgattatgtaaaataatgtaatgattttcctgcagttctgtattggataccatcatctcccttggatattttctagacatttataatgcctggttcaaaatcaggtattttgatgtgcctgtgtataatgaatatacaaacttgcatacatacacattagaaatgtattattacattcaaatcaagtgccctcaaactttaatatattctattttgaataatgagatattgtttcccaaacagaaakttttttaactccaaaatttagtgaataagtgaaggaaacactatggtaaatataggtagactgttggcttgatttatcaaggttcatacaattaaaaagaattggtgtttgaaaatggttgtgcacaacacactaactgataatgtcatacaattcagccagttgtgcaagtatctaatagtgtgcagataacatccaattaccaatttaaagttaaaagctttagtcaatcagtggaattttttcacttattaaatgttttatttaatatttgcactgaattgaaagctttagcatgatgtggcatttattaggttgaatgcagccattcagagtaggaacttggttataaattcaatttgaagatgcatgtaatgagaacttcttatagtatagtttttttttactaccaaataacagattagtaagtcagtcaatagatattcaataagtataaacagtgtgcaacagtggtataggcacttatatgaaacctgaccttaacagtcatatcatctcatttaagtaagatgactagcactcataaaatgagcagaggtattgaaagatattctaaggatgcaggtggttgtgtgatacacattaaaaatgccaagccaagtgtggtggcagacaccttgtcgtccctgctacttgggaggctgaggcaggaagattgcttaagcctaggtgtttgaggttgcagtgagctatgatcaccccactgcactctggtctgggcaacagaagatcttatctctaaaaataaaagaaagaagaagaaattttgaaatttaaaaacgcccaaaattttcagagtcgttatgtgacagtcggaaaagatggaagaattatcctctttttctttcttttattcctgtatccattcttcttttatgcatctatttcctctctaggactaagacatgagaatgaaaggattaaaaaataatagtcattacatttatagagcacacagtytattaaaaagaaaaaaaagtgccgggtgcggtgactcacgcctgtaatcccagcactttgggaggcccaggcgggtggatcatgagctcaggagatcgagaccatcctggctaacacggtgaaactccgtytytactaaaaatacaaaaaaattagccgggtgtggtggtgggcgcctgtagtcccagctactccgggaggytgaggcaggagaatggcatgaacccgggaggcggagcttgcagtgagccgagattgtggcactgcactccagcctgggggacagagcgagactccgtcaaaaaaaaaaaaaaaaaaaaaaaagaaaagacaaaaaagcatgttaggcagagagaagcatgaaacattcttggagatggtgagatttgaaagggcaagaatttagattgatggaagataacggagaaagtattctaggtataaaagtcaacatgtttcaagatattggaaataatagatcttccaaggtttccttcaaatctttgatgttcagcgctgagccggcatatagcagatgcctagtaaatatatgttgatttaatgcaacagcatgtttctaagactgcaagaagacatctggataaaggtttcattttgaagactaatgagacataagaattatctaggtctacccaactatagatgtgcctccaggctgagagaagaatgtaatattggctatagtactgagcctgcttttgattagaaataatcaaaagaggagggtgatcaatgaagattaatgtggcactcatagatagacctgattttgtgatagcctataatataggtctgggaaaaatccaagccaggggaatatggagaggtcaaaattggagaaacagtggttaattgttacaaggaattcctttcccagataaggccaggagtgaattttaaactgagtgtagttaytgggagatgaaggtcaggtatttttacataaggaaataggtgaagttaaagcaggaggaccaataggaagcaaagatcagggaatctcatctggtggatgtttacatgtctggctatttttagtgaatgtgtgtgtgtgttgatgtgtggatgttgatatgtggtgtgtgtgtgtgaaagaaagagataccgtgggctatacacgtgccagtttgaaacatacaatattttaagtgcaactcaatttacctaacagtctggatgaagggttcagggagaaaagctatccagctcttgaaagaataaaggtttgcagtattacagaccttggccagtatagagcatattgctgtcaatcaaaatcaaggataaatggaagctcctttttaaagrtggaattggccttgttaattcactgactgtttctaatcaaagtcctcagaaattgataatgacaagtgagaaattattcatggaaatacagatacatcaggctattttgtacatctatatcagctctggcttagtcttcacattctttctgatcaaaaattggccttagaaaaagttggtcagctaagtattacggaatatattttttaagttaactactgctccaaagcagtcaggatttctcttgatgctaccaaactcacaattgtgtgacatgctgagtcaccatcatgctgcctgccttcatggctcatctgccaggtgtaatgtccccctggcgacgtccatcaacatttttgcatctactgccattgggtttgacctgcatgttaccttaggttgtaacccagaaataaatgagcacctgactcagagtgaaataaatattgctgctggttccccactgactccatgaccttattgaccaggaaaatttyatagccagttgacctccaaggagtagggttgttgtgaaagctccatggaggttaaatacaccaatttggctccattgaataaagattagactttaacctgccgattccccattacttccttcatacagtaggggacctagcaagataatagctgctatttctggggaaaagtcccagcaatccatttctctgataggtggtartggttgtttttaatcctctcatgtggcagggagctaagcaggatctggaggggctggaagcaccacatactgcagccacattcttatgctacsgttgtcttcccactaatcagcctttcttcatcatgggagcaatctgaaactaattgtgtgattttagtagagaagaaagaagagtaggccctagcctcataccagcaatctaggcataaggcatttcccctgtggactggcacagtgagtaaaaatcatcagaatgagaatgtatttttgctggtaactttcctctgtgtatgttttcacagagatataatggaaaggggcttgtttaggaaagaactcagatattcaatgcttccctttaaaaatctttcttacccttctctagcatcgtagtttcaaaataattgactatcatgtactccagtcttctagtaattgaattatcatctttcctccttgttatctgcaccttgctctatatcctggtcacatgaatggatctggggccttgaacctgatactcctttattaatgcaggtcacttatgtcctttgtgccaaagtgaatgaccctttaaccaagtgactgctctatccctgcttataagacacctttgatctcaaacttgagggtccatgggacgggaccagccagttcattttgtagacttatctcttatcctaggatccaccattggactcatatttaagtctcagataactaaaacctagtcttgctcctgtaaagtggcacacacctctacctgacccttcctgggtttctttatctgtttttgtttttgtttttttttctgcttagtttgtgctactgtgtaccccatttctgtggaaaatcacagtggaagaatcaagtctttggagccaaacagaatggaagttctagtccatttataccattttaatgttgagttttattaaacatctcttaccagaattctctttatctctaaaaactgagtcaataacagtamccttatctggtggcttttgaacattaaattagctaatgtgcatatacaaagtgaatataaacaccagcctttaatctgtctctggagtcacctccttctcttgcttcctccctctttctctacctgccttcctttcctccaacaaaaattactgagagccaggccctgtgccataaaacaagaacacagttctcaaataactcagtctaatattagagacagaaacacacatcagtacctttagtaactgctactaagtagtaataacttcttagtaaaggccataaaagagaaggaggccatgaccagcaaggctgaattctctcaccaccagataggcagcatctcctctccaacagacaagggatagaaggagtcygcttagggtctgctgctgagtgtcccctcaagcaaatatttgattattcataaattatgtattagtaacacagaagagactgctcaatttctcaccctaataaatattgkgtcatctcctgtgtcctctaaacattaatgactaaatttttttattctgcctaccatatatgtaaccctttatgacatgcttattggttttagccaatgaacatgcttcactacgctcctcagaccaatgaagatctctttacaggctacaaaggtgacttttctatgagcgaaatcttataacctgagctgtttggaaaggaagaacaatatatacgtgtgaatgtcaaattatcttttaaatacttttattttcaggctcttcagagatgtgattaagagaagttgttctatcccttacattcctttatataagaaaagcaacatgcaacgcgacttgatctttgatcaaaatataaagttccctttggtgcagtggctccccacctgtaatcccagcactttgggaggctgaggtgggtggatcacttgagcccaggaattcaagatcagcctgggcaacatagtaaaaccccatctctgcaaaaactacaaaaattagttaggcgtggtgggcmtgcctgtggtcccagctacttgggaggctgaggtgggaggatcatttgaacccaggagatcaagactgcagtgagccaactgtgccacatacatgcgcaagtgcacacacacacacacaaacacacacacaagttcctttcaacatgggcaacagcaagagagttaacaacttatgaacaaagctagtctggaaaattgaggggaacctgctcccctttttttcctcagtagcagagttgatttccagttttagctggagagttgtttcatttttcaatttaatcaccttaaaaatgcagtcggtggtagtgattcaggcatattcaaaagagagggcatgagtttgttattgtgctccagaatggaagctcctcaccaaatcccaatccagatgtcaagaccatcaggttacttacccttccccagcatttcttcctggaataaatgagcttccttagctctcctggcttatggttcagaggttcctttacaccattttctcagacaacaggcagatgatgatgtgatctatggatgcaattggtgtttaaatttttcttagaggtaaagtgctttcaattcttagtggaaagatctgactttaggggaaagattgttataatcgcttgtggttaatagagtacttcctactcaaggttacagtgtgaggggaaagcttgatttacttaggaaagccagtaagttttggatgtgattttgccmaatagtaataatttcaacaagtgccttcttagaaaacacagcatttggctcccattgcagcttggtgaggtagttagagcaagaattatcattccaactgagacaactgggcttccccagggaggaagtacttttctcagtgtctcctaggtagcatgtcacataaggatccaaaattacctgtgctaactttgaatgttctgcttttctttaaaaccctattattcctcagctaaagtaggcatgtctgtgcactccgtctttacaacatagccatcacataatctaaattcaactttagtttctattccttgatttatcctttccaaaattaatttatatgtttatgaagtagcaaaattagctttggcaaaaaaagtacatttgagaaaaaatgtacaawccactaaggaaatactctaatttagtactatctttacattaagtggtactccaggttcctgggrtagctctattatagagaaagcacccactgaaaggttgttctgtggtgtgatgcagggaaaacaccataaatctatctgggtattatgcctggagagagaaattaggagtcaatgctagatgatgtaggaagagaagcacgaaggaagtgaggaatggcagtcgtctattgtgatatctgtattcaaaatagtatttaaacaattaatagcaattttgtgaatcaaagaattaagttgcatgcattaccttaagcaaaaatggctactaatgagaactgggaagattagtggcaaagaggcccgttagtggtacaggctgcttcttgggaaataaatcactcaaaatgacttattatgtagctctagtgtataatattaagtagaggttctaagacagtatggtcagaagtatctgagcaatttgtcaaaatttcaatttattgtgccttcctcccagggtttctgattcagttggtgggacccagggatctgcatactaattttctgggctgttctgttagaagtggtctaaagaccatacttccagaatttctagtacctagaatagtcaaattcacagggacagaaagcaaaatgtggttgccaagggctggaagaggaaggaatgtgaaattcatgtgtgtaaggggtgcagagtttcagtctaggaagatgaaaaagttctgaaagtggatgctagtaatgggtgtatgacaawgtgaatatacttaatgctactgaaatatatatatatgtatatataaccaaaaatactccaagaatttctcacacaacaggagrccattctttaaaaatgttggtgtgtgtttgctttcataataagtgttgataaagagaatagatgccttcaatttaaaatatcataatttgtgytcaattatggattaatattgtatgatggtcatcatttctttatgacagtgaaaataatggactaaataaaaaggtttataatacttcatttttgcttcattaagagaacatagattcattatatatccatagtctgaccaaattaatgggaatttagagctactcaatctgcattctaatgactacccttccaaatgcttctctaaaatagatttatccgactttgccttatcttgtttttgtgacaaaaatatgtagtgatactcatgcttttttcaggacagggtgtgggccaatgtggggaagagcctgaactgcattattgctatggtggacaaactgattgaaagagatggtggcagtgaaggcagtggyrgcaacaatgatggagaaaaggaaccttcattaacagatgccattccctctcacccaagaggtaagaaataattttttttcccaatcatttactkagtaaacaaaatgagaaactcgtgaaaaaaaaatgatatagaagaagaggagtcaatagtatctttgatgagagygctgatagcatgcttttccactgctctggcttggatgatggaaggctatttatcaaattgcatctcagttgtgttttcggaactgctagcaatgttcttttttttttcttatcttaccacataaaaaccttgaaaaaagaacagtgttttaaggctctgacatagtttaacctacctttacacattcctccaaaattttattagaaagataaataagcatctgcacttaactcttagaaacataggggcatatcaaggacacagtatctcacagtggtttcttaacagaatgtaatcagataggatgatttttgcattttattctgagaaatatttgtgtaaattatctccaaaacatatgggaagatttgattataaggaatatgttagcatattgctctaaaaaaatatatgacaagtctagatttttgtgaaaccatgcacacatgtgtatacatgtgagtgcatgtgtttttctgtggagagataggtgggtaggtaggcagataggaaggcagatactttcaaatgtataccttattacaaggttggctagaaaatacaaacaaaattttaactacagatgtgtccctgtaaatggctttgaaattttctttttgttgatttgattaatgtttgattaatattgacacaaaaaccaaggcaaatgtctacatctctttacggcagtaggaactgctgttagggttgagtcagacttttttgctgggtactttaagtgtttggagagaataagcaatactaccctactctcttctgctgaaatctgttctttcttttactttaaaaaaaaagagtcataagaaaatacaaacatttataaaattagatttatgtttcctcaatttgttttcctaatttttcattactcacatttttatcaggagtttaattatataaaacatcaatctttcatcacttgattaacagtagaaccatttctaaattatatttgtaagctatggctttctaaagtattcttgttgtagatggtccctcttcctctgtcatacattcatataggcaaaacatttatgctaatgttctttatgttcacacttacttgatctaactgtatgtagggattttcttttttaacaataccagtttttattagttaatgaatcttgtctagcttcataactttacatgaatcaaaatgaaagcttgtcatagctatgtcatgaagaaatagcatacttcaattttctttaattgaacaaatattgattatcaagtatgggccagacactgctgtcctctagaaaatgaggtaagaagaattcattttagtgactatgtccattgatagattttttcaaggcatattattttttagcagaaataagataagggacactggattttgttatattttttgtttaatgttgccaaaacttctcactgaagacaataacattccaaaatatttgaaattatacagtgtgtgtgtgtgtgtgtgtgtgtgtgtgtgtgtgtgtgtatcttgtatttcatcagaagactgcatctgggcattcaaaatgcattttaaaaggtaaaatatttggcagataaatcagccgtaagattagatgaatcatttttatttgaatatgagacattgtgtacatatagtctaaaaccaagtagaagttgctgcagaagtagaattcacagctagatcaatgttgtggatggttagagtcaaactacaacatattgccctctaatttattttcttattttattatctatgtttatttcactcatcaccaattctttcttgtgttagaatttttttaagagaagtcactatttaaatgtgtgaaatatgttacttttgtctgaatatttcctcataaccattctccagaacgcgtattataatgactgtaaacgaattcatcaaaatagaagccattattttagatttttaagtactatcatagtgctgtaattaacatataagcatctttgattctgtaagtctttaactaaattttatttccccataagttagattgtcagaactggaattattttgtaaggaagagttgccccctctctcctatgtatttatttatccattttttatatcaatgtggactcatgaatacttattttatttttaacttaaattttaattatatttgacacataataattgtacatttttatggggttcaccgtgatgtctcaatgcatgtgtatgtgtgggtgaacggaaagcttctccttttgccctctgaaaagttattgaaaaattaactcataaaaaggcagattcataagagaaaaggaatataaatttattgctatcatgtgtaaagggagaatcacactgtgattacctaatatctcaatggggtacagatgcttatataccctacattttaggggaaagggagaggagaggtagtgtggatgattttaggaagatagyaaatagtttttaggataatttaatgggcttgaagaacatacagttgtctgttgggcctgttggtttgtgacaaaaatatgtccaggtttgttgacgacttttgtcttcctcctgggatatgggttcagttagtaaaaaaccaaggagtggatcacaggtaattgttttttggtgttttgcttgtttgtttttgaagatctggagtttaggcagttaaggaaacttcagcctgtgcttttgaagaggtagaagattgagagacatggggccgaggcagagaagaaacaactcttctccttcataggtctgccctgtctttatatggatagggaaaagtctgttctaccatctgttgatctctaagggcctgtaattcaaaatattcattatatcagggagccatattttggggtaaaactccatgtggtgctttattcacataatgacaacatcagagtaattaccatattcatcactttaaacgtttatcattccttgtggtgacaacattcaaaatcttttcttccttgtttgaatacttattttattatttggttaagaatccaatactaatattatttattttggactcaagttgttctctcttattcagattgatttctgtgtccttctgatgacatcctcccatatgttgtttactcccttactttcttatttcccttactcattttcttacttgttttactcactgacttcctctttggcaccataagaagctctaggctcatcttatattttccctaccccagctccaggttcagccaatttctaaagaaacctggwttcattttattggagaacagcatttagaaatcaacatctggatggatagaaacattttcatggttctctataacaaaagacactctaactaacaggatctaaaagcaaccttctgattacaatcttttcagccttaaatattttcacttatttcctgccactttgggtgaaaatatcatattgtaatttcttgtttctgtgaagtttgacattgtataacatgttactatattccaaaatattatttttgataataaaatgtatttcttcaatagtcccaaatttatcccagcccaagccattttgctcctttcttttttacaattaattagtgaattgattaggcaagcaatttgagacatatagtatttattacaatgtatgatatgataaatactgataagcatttgttgcagcatcatttgttagtgatgttattcttcatgttgtattacttctggttttttgtttattagattctgtatctattttaaatcaaattctggaattttgttttatttcatagggttttgattattgtgatttatgttgggatacatttctaaatttggagtaaatcaatcctatgacagtttttctttttcatcacactcctttatttttacattgtagctataatttgtgtttgttttgctgctgtatacttaacatggctaaacagatggtcatctgggttgtgctacttttatccactttcttatgttgttctttaacctacagctatttctcttttcaagttgcaaattttccttttagtaatattttaaatctgtagttttgaaggttttctgtttgtttgagarccraggttttacagtatatctttggcttgctttataaatttctttttagggtaaatgcagatagtgctgagagacataaaactttctgtgctgttctgaagagaaataatagaataactattccaaagttctacagtttatrtatatttatgtggtttcctaatgaatgaagattgtccttttatttgtagtacactcaaatacctttctaagcatctgctgtctgtatagcactacatgccttcagtttcataaactgctgactcaaagataaaatcagtgaatatyagaaccttagattttgacgtcatcttaaagattatgtaattaaacctcctaaaatatgttaagaagcttatctacaatatctctgccrgttttcaactagcctatgaggcacatcttcagttatagaaaactctttttatcttctagagcaacatactccagaccttgatcctaatatgttttctttcattgtacccactggtccagatataatcctttgcaataaaaaacaaatttacttttctttctttacattaagcctaaggtgtatctgaaagcaaccctcatgtcccttttgaattgtcaccttttcaatcatttttcaaaggaatagcttcaagcatatccaagagtttgcatttctctgaacatcttctagtttgtctcagcagtctgcagaattaagcgcagcgatacaaatacagttaatagctgcagagtaacccaggaggaccacctccctacttttaggtactattctaatataatgatatctaagctggcattcactgttttgacactcacattttacaactaattctactgatatccataaaccttgctaaatttgacctatccttcaggcttctaaagattcaagtaacatttaagcaccactatatactagacattatgaaatattgggggcatgagaagattaaaacaatctatcccaattttactgaagagatggatgtctaaacccatgactgactagtataaaatgcctttgagtacactctaataaatacctgtttctttcatccttcatatctactgacctactcaggatgattttattcacattttatatgcattttctgtccattcctagaagtaacagataaaaatgattagaaaacagagctacatagagattcttaaggcacatcacyaaaargaacagtatgcattcaaatacgctggttaatcactaccctttggggatgtgtgttcaaccagctctatgttcacccattcatatcattgcatggcctatatttctccatctttcacaagtatgtcatgaaatgccctgtaaaaggccaaatatcctatgccattgaattatttttcctaatctatccagctgtaaatcctgtcaaagataaagttcctctgaaattattttcactaatgaggccacataggcttcgagtcatcactgcttctttcaaaggcagtaaacctccatgtagatcatcgaattagtccacatatcattgcttagaatttgtttctagtttcttggtactcatgtccttttttgcttgaaagtttccttttaacttgtaaggcacattccacatttcctcctgggatctgataattcactatatttaccttatattttactttatctctgtctgccttcagttaacacaatcatctgggccagttgctgtggctcacacttgtaatccragcactttggaagcccaggtgggtggatcactggaagccaagagtttgagaccaacctgggcagcatggtgagagcccatctgtatacaaaaagtaaacaagcaaacaaaccgacaaacgcacagctgtctgctggtaactactagaggtttgccagtgatttgtcaccagttatcaatgtcttgctggtgccaaagatttttcatcctaaaagtgcaccccaaccttcaaataggaacacatataaggctgtagtgaattgctcctctttcccatcttttgtctttggttccctagattagctatctatctaatacacttaaaataattaaagactgggccgggcagggtggctcacgactgtaatcccagcactttgggaggctgaggcaggtggatcacttgagatcaggagttcaagaccagcctggccaacatggggaaaccccatctctattaaaaatacaaaaattaactgaacatggtagcacgcgcctgtagtcccagctactcgggaggctgaggctagagaatcacttgaacctgggaggtggaggttgcagtgagctgagattgtgccattgcactccaggctgggtgacagtgagactctatctctaaaataataataataataataattaaagactagaacaactcacaaattaatgcaattatatataaaatagttcaggcattaagcctcatggaaagacactaaatttgtattggttggaaaagaaagaagaaaattctttcattcattccatatttgttgagtacttaccctgttccagtcactgtatccaggaacacgttcagtcatggccctgtccttacagtctagtacatgagtaagttctatttgaagggatatacctagtgagagatcttccaaaggcatcacttacaagataaaagacttaggaaaggaagtaaacatttgggaggcattagcagatagattaaactggataaaatgtaaagagaaagaagaagaaaagatgagcaaaatctttattggccttgaggcatgaggattactctcagatgaggtgtcagaagtatcaaggaatgaaaatcaaatgcagtttggagaccaaacgaggtatcaaaggaggggtaataatcacattaatagctgacacttagtacactcacatttatgtgacaagtactttgatgaacttttacattctttcctctcttccttttcacaacaagcctgtaggggagtttctggttctgtccccatttcatagatgaaggggttaagtaatttgcctaagatcacagagctagtgggcatccaagcaaggattcaaattcaagcacagtgatctctatctgagatcctcagaatatctgttggaaaaaggaatgattaattttttttaattttattattattatactctaagttttagggtacatgtgcacaacgtggaggttagttacatatgtatacatgtgccatgctggtgtgctgcacccattaactcatcatttagcattaggtatatctcctaatgctatccctcccccctccccccaccccacaacagtccccagagtgtgatgttccccttcctgtgtccatgtgttctcattgttcaattcccacctatgagtgagaacatgcggtgtttggttttttgtccttgtgatagtttactgagaatgatgatttccagtttcatccatgtccctacaaaggacatgaactcatcattttttatggctgcatagtatcccatggtgtatatgtgccacattttcttaatccagtctatcattgttggacatttgggttggttccaagtctttgctattgtgaatagtgccgcaataaacatacgtgtgcatgtgtctttatagcagcatgatttatagtcctttgagtatatacccagtaatgggatggctgggtcaaatggtatttccagttctagatccctgaggaatcgccactctgacttccacaatggttgaactagtttacagtcccaccaacagtgttaagtgttcctatttctccacatcctctccagcacctgttgtttcctgactttttaatgattgccattctaactggtgtgagatgatatctcattgtggttttgatttgcatttctctaatggccagtgatggtgagcattttttcatgtgttttttggctgcataaatgtcttcttttgagaagtgtctgttcatatcctttgcccactttttgatggggttgtttgtttttttcttgtaaatttgtttgagttcattgtagattctggatattagccctttgtcagatgagtaggttgcgaaaattttctcccattttgtaggttgcctgttcactctgatggtagtttcttttgctgtgcagaagctctttagtttaattagatcccatttgtcaattttgtcttttgttgccattgcttttggtgttttagacatgaagtccttgcccatgcctgtgtcctgaatggtaatgcctaggttttcttctagggtttttatggttttaggtctaacgtttaagtctttaatccatcttgaattratttttgtataaggtgtaaggaagggatccagtttcagctttctacatatggctagccagttttcccagcaccatttattaaatagggaatcctttccccattgcttgtttttctcaggtttgtcaaagatcagatagttgtagayatgcggygttatttctgagggctctgttctgttccattgatctatatctatgttttggtaccagtatcatgctgttttggtcactgtagccttgtagtatagtttgaagtcaggtagcatgatgcctccagctttgttcttttggcttaggattgacttgacgatgcgagctcttttttggttccatatgaactttaaagtagttttttccaattctatgaagaaactcattggtatcttgatggggatggcattgaatctgtaaattaccttgggcagtatggccattttcacgatattgattcttcctgcccatgagtatggaatgttcttccatttctttgtaagggatgattaaattttaacagcggttttgtatatagatttacctgcctttaggtttgtccttgatatcttaatgaactgtttctcagatagtcataacttatacttcacttgtttgccaagctttctccctcttttacaaggtcctaaattcccttaccaccacctgcctcttcaagacactttctcccttttttacaggccctacatttctttacccctacctgccacttcaaggcactttgacatctccttccacctcaccctgcctcatcctccatgatccagtcatattaaactcttctgagaactcacctggtgcttttcattcctgagctttcaaagctttccccatgcccaaacttcacatcatctggggtgccttccctggtcatccaggctaaggctgtgagtgtgagaccaatgtggtcacacacggcctctcactcagcagagccctgtgctctgagattaatgctctgagttgccatcctgaaattccaaataactttatctttgcatttgtgttttgtcagtgaagtccaatagggtgatgaagcctgtacccgggccttggaggcttgcctcacttgcagttctgcagggttctccagtgcctgcccgaccttccatcttcacgccagcccaatgatcacttcccacccccacctaccaacatgcctgggtgccagtgccgaagagccagggtgaggctgactgcctttgaggctctgtactcacgtagccccacatccaagggagtatggcaaaaaagagtaaataaaaagcaccctccgggcacggtggctcacacctgtaatcccagcactttgggaggccaaggtaggtggatcacaaggtcaggagatcgagaccatcctggctaacacggtgaaaccccgtctctactaaaaaatactaaaaattagccaggcatggtggcaggcacctgtagtcccagatactcaggaggctgaggcaggagaatggcgtgaacctgggcgggggagctagcagtgagcggagatcgcaccactgcactccagcctgggcgacagagcaagactctgtctcaaacaaacaaacattaaaaaaataaacaaacaaacaaacaaaaaacaccctgacaggtytggagcaacaccactgarggaaaaaggaaaaaatctcatttactgctttttgaataggtcctcctgtttttattttttactggattctgtcatttacgttgtcacactttctgcaaggcttgcaatgacaagggcccataggcatcatatgaagtaatatgaatgaatcaagcgaagtggacagaagccagagcaaagtagagagtatatgttcctccaaaagggggtcactgctccagccccagccagtcatttccatggagaacatggacctaaagttgtcatcccttctgatttttcaaataaatctgaatgtttatataaaatatctcacttttttttaaggttaaaaattgctaaaatgtgataaattccacataaaatttgtaggccatataagactggtctataggccactattttgaaacctttgaatctctgatttattgcacatgccatcttaaatgtcatttcccctgttagacttggctctgtaagaaaatatgccaagtgtttgtgatttgttcttgaatctccagaacctaacataattcgtagcaaataatagaggcccaatattrtggaatgaaggcctagtcatatggatctaccattgctgttgacacttttgaggttttcttgatattaataagtgaatattgttcaacatttatgcaaaaatactaatattctcagaatttatattcaacattagacaattatttcagtggttttaatagttataacaagtcttttattttataaaatacaaacatacaacatacaagtaccaaagaatctttttcactagagggcttaaatattaatattttgaaattcataaattcctacatatgaatattgagaatttcattggaaaaagatcaatgaatgaagctttaaaaagttaatagttctccagctaaaacaacttttttttttttttttttttttttttgagayagagtttcgctcttgttgcccaggctggaatgcaatggtgtgatctcagctcaccacaacctccgtcccccaggttcaagtgattctcccacctcagcctcccaaccagctgggattacaggcatgcgccactatgcccaactaattttttgcatttttagtagagatggggtttctccatgttgttcaggctgatctcgaactcccgacctcaggtgatctgcccgccttggcctcccaactagagtatacttacaaatttttttaaaacttaaataatcaaaatatgccatgtaaagtacatttttattgtaascctagaatttcaataacatttttgaattatgacattttaaaatatctgttcttaccagaaaactaatgctgttttccttaaaaattgtacartgaattatgaagtaacagagtaacatgggactcagagccaggatcttggcaagtccacagtttggtacttatttggcttcatggcctttgtcaagccatttacattctctgcgtctcacatcctgttttggtaaaataatgtacaaagttttaaggtctcttccagttccaaagttttatggtaataaaaaggatgccacgtttttaaaggtgatattaatttttttcagtcattcaacatattttaattatctactatgtgctaggcactgttttagaccctgaggactacaaaaataaacagaaaagataaaacactggctctcctgaagtttatgctctagtagcaaagagacaataaaaagtaacacaagaaatagggccattgcatggtatagtaatggtgacagaggctgtagaaaaaaatatagagcaacgtaaaagggttttgatgtaatgttgtagggtagagattgcagtttagtggagtaggcgatgtaggtctcatttaaaagctgatgcttgaacttgtctcaaaagacacaggaggtgagacagtgagccatgtgactatctagggaaaggatatattggtcatagaaaatagctattacagmagccttgaagcataaatgtccctaccatattcaggaaacaacaaggaagccagtttggatcaaataaggataatgatggtaggagagtagaaggtgacattaaacaggtaacttaggggaaggatcatgtagaggctttgtgtaaatgttgtttttactctgagaaaaatggggagcaattagagagttttgaacaagaggattaacctgatttgacttagatattaacacctaggctgttgtgttgagattagactatacatgaagagggtaaaaccagatataggcagttagaacatgaatacagttgtcaaggtgaggcatgatgagcttggacgaagaagaagacaagtggaggtgatgaaaagtagtgagattctgtacctatttttagggtaagacatttgaaatgttaaattcgacatggagatatcaagtttgcagttacatataagaatagagttcaggagacatattcaggctaaagacattaatttggaaattgttattatgtagatggtacttaaagacacgagactgaataataacagcagggattgagtgtacagagaaaggggaaataacctatagattatatatacttgaggacatttcagtgttgatatgtcagaaataagtgaaggaaccagcaacaaagttgggcaagagacggccagtgaggtaggaggaatacaaagagaatatgctatcctgaaagccggggttagaaaataggtcaaataaaatgaggactaagagatggctttggatttagcagtacggatgtctttgatgacgagagtagccttactagagtgggtaggaattaagtagagtgggttaaaagaaagaggaagtaaaggaagtagagacaacctgtatagacaactcttttgagaactttcattgtgaaaggaaatggagaaataaagtataggagctgtaaagggaattagggtcaaaacagtgatatttgtttcaagatgaggagataatagcatgtttgttttctgacaagaatgatccagttaaaaaggaaatattgataatgtgggaggaagggagagaattgctagagtgacactcttaagtaggtgagagaggatgagatctggtgtaccaacagaggagatgrtctgagctagacaacagttcatcctcagaaataggacagaaggaagagcataaagaatcaatgctggtaggagggcgagtgcaaagtatcatgtagaaattactttgtttatttgaattgttttaacatagaagctcatatttatggattacttgatatgtggtaaaaaaaaatattgactgcgttaactcatttaattcttacaacaytgtagaattaattctacaaaattaaaggatgaagaagtagagagttgtagtgacctgtgcacagcctgggttctaaccctggtggtctggctccagagcctgccctcttagagtctatgatgcattgcctctgctctctccaagaaaaaaaaaaaccttctccaatcttattctctacaaacatattcactagcacccttttaacaaaatgttgagttgtttcaggcacaaacttgtgatgctatatgataacttcatgaaaatcagtcccttaggtatatcttaaaggctcactgtggaatcatatgcagaaattaagaattcataattacatcgaaaaattacttaactttctcataaatatggtgatgttcacacccacagagaaaccgagatagaggaaaagggagatgatagctctcatccaggaactttagggcatgtaatatttttgtttttttttttttggaaacaaagtttcactcttgttgcccaggctggagtgcaatggtgcaatcttggctcactgcaacctccacctcccgggttcaagcaattctcctgcctcagcctcctgagtagctgggattataggcatgcgccaccatgcccatctaattttgtattttcagtagagacggggtttctccacattggtcaggctggtctcgaactcccaccctcaggtgatccgcctgccttggcctcccaaagtgctgggattacaggcatgagccaccacgctcggctgtagggcatgtgattattgaatgaaatggcctaagaaatgtactgtttacattgtttggttacttgactgcttactcagcatttataagttaaatctatggacgtgaggccctattgtgtttgcagaattttgtttttaaactggtgcaactacacatttcatgcatatagcaaaattgcacttgtataaacttatgctccaaaaaattgatgtactatattccatggtcttgaacattactrggaaacttctatattcacctagtttacttcacctacattcacctagtaaaaatgttgcacctcttcacttctctgattgcctgtactctgataaggattcagtcaactcagtatccactacctgtcttctcaaccttagatgctggccaatatttaaatgacaggagctcactgatgtagacatattgataatttcaggttgctcaaagacctatgacctatgcagcttattcttaaatacccagcctgtttgagggccagaatcctgagattacagtttatttaaggccaaaaggcaacaaaataagcccagtgaatgtgggtgtgtgactcctccagtcaacacataacctgaatttaaaacttttgtgctacaacaaatacaaggcttgtttgattaatggatttggttcctggaaactgtcttagcagaatttactttaggctttcaattttgtgctacgaaataagaagtttaaccaggatatcagttgttgcatttcctttgctattttcctaagagcaagactggaaagttttatgacactgtgttctcaggctggcagggtttaaacaaacaaggttccctggacatgagggaaggttgcctttgttcttgtcatagccatttgtcttgggttgagcagtacagttatttctcatacatgtggaaggkgctaagatcagtcatttaccttggatcatagttcagtggacattacactgattacattttaagatacatgtttgttctttatgtgaatgtccttagggcctttgaggctgccctgagatagaggcaagggaaagtacattcacatgctaccttcctctcagggttaatataaaccttgtttcttcattcaccctgtctgatacacattgtttctgatgtggccttgcytcttagctcttgccctgttcacatatcctctgcgccgtcctttatccccacccctatcgacctccattccctatccctaccatggtgactgcctatacctagactcccattggttttattccatggcttcagcttaacatttacttctgttttattcctgccttctccaaatcactgagtgatctcagtcatttatttcctctcttccagtaccccctgtttctccctttggtcagtttatgcatctatttattagatttgtcwttacaaaaccaaacactcctctcagtctctattcctacaaagcctcactgtgggtgtctactacctgcagtccaggcagacttccctgggcactttccacatgtgacttcctttaagtttgcagtaaatgccacagccatgagtgaacacagtcttctcaccagagatgaactctcttgcctctaaactctctctcttctaaaactcgtttggtcactgtcccaacttttgtagctgttatcataccaccttatactgtaggtattcctttgtacttcttacctttccttctcrattttagctccttgaaggagggggcatgagttaaaaatattagtatcacccacagcacctcacatagaagacactatctttgtccaatgaatgagtccatttctcatgatgtcatgaaaaaggagggggggagcaatgatataagaaagacacattagcatttattaaaagaagaaaaataaaaatagatttctcaattcctgtatcagagacaggcagtagattataaagacaggaagagggtcaggaaggcttggttggagaaggacattctgagtggcctggaaaacattcgaagcagccaagtttccacaggtgcttttcttttcctgattactcttctattgtctggaattagcctagtttctaggccctgtgcccctaggatatgtccaggtatttagaggcctcctatgggcagatgtctagggtctatgaccaaagttggcgacgtgtattatgcccatacaaaggaatttacctataaagtgtctgcagaagaaaccttattattagttgatcccttcacattattaatgttcacactgcaaaattgtgcctgaaagacaagaacttcactcacagaggcacataggtacccttatttgggttgatgtaaggcataggcccttcaaartcaacaaaaattttataagcaggaaataacmagcccccaaccatgaaccggtcaccatttctgtactacctggggttcaggcatagatgaaaacccctactggctgtaagtttggtctgtgttcacttcatgaccttgggaattttattgccccccttaatggccattctaattgcttggcttcacagttcatcatcttgttaccttaagagaatcctaagagctggctcatttcttctgttatctctttgcataaagtttaatgcatgtgcaatctttttacttttccttttttctgtgtctgaaaggttgcgataacggaaataacaatagctacaagcttttgtgaagttaattattttaaatgagcaaagaagaccaagcacctgagaagagaatggctcagaaattgtgaagaaagcatgatgctctgctacagttggttgatatttggctcttttatttttctcctgagtaacataagagtgattgagctcagaggacrtgaacatcctgcacaggaaatagatgatgtgtggaggaggtgaggggggcacccagcagccgttctctgaatccttcagtgagcttcccttgaatatgccggagaagcaagtagagggctggaaaacagaggctgtgcttggatggctcccaacacacttcacaaagctcaggaaaagctcagctaagccacatgcattttatgttttcccraggaaagattcttgttggtctcagggttaaggagtctcagcaagttcttatagacacactaaaacattcacttagtrtttccctctgtcatggaaaggagcccagggaataaaatcacacttagtgcctgmgaggctagttggctcarggcagagatagtggggyagtgactatattgtggggcacccttagctccccagcttcactaggtttataaaaaaggtatgtgtgtgtatgtgtgtgtgtgtgtgtgtgtgtgtgtgtgtgtgtgtataaaagtacgaaatcctgaaatacacacatccactcttctgagtttagttttttcaagtttcaactaagattgtgtgtatgtgtgtgtgcacacacgtatatatatgtgtatatacatacacacacacacacacatatatatatttatatatgaatgaatactaccttcatctttatcaggaggaccaaataaacaccatgtaaactgtaaggtatagagagacataaaggtgaggggcaagtgacaagtctgaaaactgtcaagagctgaagcttgggttttttttaattttccccaaaacatattttaaagcaaaagactaaagcatttatttttcctttgtgagaatgatttgggatgttcattggagcaaaaaggccatttatgaactgactttggctttgctttggcctgtcgtagccactgtgtttatttcagaacctgagatttacactgactgcatattaacagagaagaaaacctggagtcattggcattggaattttccagtacaattttccattatctgctcaacttaaattgtttcttttctagaaaaaaaatgtatttttagctttttcacttatgttcctccatagaaggcttactactattttaaagacatattaccttgctcacaaacttgtaattttctcattcataattaatgctttccgatattgtcattgtcctgatattttagccataaaaagtatatataattatgcaaaatagagacactggaatattgttagtatcagaagtatgtaacactgttcctaggtttagaatgttgtgtgttccttwtwtcctgggtttccacttccaatctagtgaaactggaaaccagacttgttttggtgttgttttttttgtcatctgattgtaatttataattaagaatcaactggttaaataagtgaagatggaagtgaataaagcaactatccttatgctaatgagamaatctgcaaagttttctcctttaaatactttttagagaaacaaatatttaattagaattgtcacttaatgtcttgcaagaaaacaaatgtggtcacttaagttattttttaaattttctaactagaaaaatcatataaagtattgaccagttgattcagtatagtaccatgcaagatgcttaaacaataagtacatgctgtttgggaactatacaactgcgtacaaagtaaaaatcagttacttgaatgcagtaagtgcaaagtagttctgcttcagcctgattaagcagcgccacctactgcacagaagatgtattttatgtttgggaattctctagtagaaacaaatctctacagagctaagcacagaacaaaagcagttttcagtctgttatcgtttaaaatttacatctgggttaatttattgaagttttttctagtgtttccctgtgtctattagtctacccattcatattgagaacaacaattaaataaagggagagaacaggagataaaaatgcaaatatgaaaaaataggaatataggatattcattcttggtatctattgatgtatctcttattatgaaaaaaaagttcagtgtacctctattttcccttttacacatgacaatgacataagaatcaacagttaaccaatgcttgtttaaattgaaccattgttcacattttattctaggctgcctataagtttgtccaatattaaatgatcatgcattaatagggctctgttgcattcctctttctttatgctttttatcctcataatagcatgtacatctacaatatttttaaaataatttctaacattctaatgtattttacattatgacatcacataggcatttcatagagtattamtaagaatgtatctttttattatgttggggccattaattatcctttcaaccctttgggtttatttcatctagtctattataccacaacataaaataaataagtgacagtagacatggtacgatagtgattgtgattctttttattattcyctgtcactctttcaaggtcttaactgattatttaccrctcacattactcacaatgatgcttgcacttttatgatgaggagatcatatcatttcagttcctgctttataattaatttcgcagcatgcactcattcatatcaaatcgtatttgtcacccattaatttatttatatattaatggaatgtcacacggtcaagaatttatgatagttaacatttgccagggctttgatctccaaattaactgaaacagaacataaattgtttctatatcataccaaagtcataattatataattgatgcctgttagaaatctagacatacaaatagcacaaatggtctcaattttgcatcctcatttgaagaacagctatttgaatcccaaatactacccaaaacttgacttacttawacttgtctatatctttaaaactttttatatttattgtaacttttctcattcaattaaaacttattgaatatttactatatgctaggcactatgctaggttctagtgattcggtgattaaaaaatgaattccttgccctcagtgagttatctttcttgcagaggaaaatggtgagtagtgtgtgagtagtactgggacaggaagatacaggcacaaaaggaagtcagctcaacccaatcttcatggaatagggaagtgtagtaagggggaaatgaaggaagacttcctggagaagagaaatcctgaattgagtttgcagaagagataaagcatttgtcaggaagataagtagaaaaagagtgttccaggagaggagataggattttcaaagacattgagatgagagaacaagrtaagtttaaggaaatacatgaggttcaattcacctgagactcaagacagcaaataaacttctgaaagatgagattagacaaataggcaaagtttagataatggagaatctttcatgagtttgaactttatttatttatgaatgctttagtgtttttttttcaaaatattttaagaagtgaggagtgagtggtacaatcagatacaaactgattataaatgtttctggcaacactgttgagaagggaattcagtagagtgtgactggaggaagggagatgggttagggagtagtccaggaagtaatccaagggagagcaataaacaacgatgggcatggacaaggagaagatgcatattgatggactgttaagagtagtagaactaatttaatgaccaagttaatgtgaaaactgcaaaagaggaagtccagtaaaacttctgtttccagtatgagaaagatttgatggcaccactcactaagatacaggtagtgcacagattagagatgagcagagaagagagatctgctgcaaatatgttaaatgcatccmcttggagaggtcygatgggtggctgcttatggacattgtggagttcaggcgagagatttaaattagagatcttcagctctaatctttgtgaatccttragaatatgtctaacttactgaaaaattaaaaataagttggaagttggttctgcattatattccaagaccttccttcatctattgcactgttcttacacccccttcccccagaggactggtatgaacagttgtatcccctcatccttaccctgaaggactgcatgggagaagyggtgaaccgagccaagcagtccctgacatttgtgctccttcaggaacttgcgtacagcttgccccagtgtctgatgctgacgctaagaagagacatcgwcttcagccaagcagtaggtgcctgttgttattgttagtacaaaacaatgccggattgttaacatcctatccttgatgatgaatagaattcttattgggacagctttatttttaaaaagatccttaaagttttggtatcccatgtttcttattcaygataaatatcagctgaatatcctaagcaaagagtttatgagaccttaagtatttatttctgaaaagagatggccaagtctctaacatgtaaattctgcttcacagggcatgaagtcygtgaaggaagtggtcatcatctttgtattatgctctgggatctacataagtgtaagggaagggactgttgacttgcactccaggtgacaagctaggacttggcaaaggggatctgtttgcagtcgcttatttgtacagctcccccatgaatcctgggacaggatttcacaattatctcttattttgtttttaaaataagttttcagggcagtaaggctcgaataggaggtttgacagggccaccttccttgcctacacccaacatgattcataatgccaaggcctgcctccatcacggtgggtgtgctggtgccttccttctcyccacctgcctccatcctcatggctgagttttatagacaggacatatggagagaaagaaaaagaagacttctctttctaaacattctaggaaaagggaatrttttaaccaaactgtcgctttcccccactatttcatgaatggtccagtggcacatgaagctaaccaggtgtcggaaaatatgctctgccttatacatacatgtttcgtcattgtgttcttttaatgaccctgtgaaatgattattatcatctctattttacatgtacaaaaaatagtaagatttggaagtgcttaagtgtttatgaatttactgttagaaatggtagayataagatttgaagacctatcaaccttactcctgtccatgttctttttccctttgcacttctaccttccccaagacttttatacacagcaattctagatcaaagactgtcaacttgttttactatgcctaccaaatagttgtagttttgttatacatacctgakaatcgaatctgtgatgcctcagaagtcttaaaatatttcaaaataaaacraatacgtttgctaactgcagtaaatctcatcaatatttttttttcagcttgctggattggtttgtggttttatcatcaaattacagacaagtctgtatgacccaggcttcctacagcagcttcacacagtggggttgatagtacaatatgaaggactgctaagtacatacagtgagtattgctttagtrcaagttaaaatcacatttctattcagaaggacatttaatccagaaatttttcaagaaaacataaaaataagtaaacctttattgtgccaagtattacaaaaataatataactttcagttttttgcattcaccttgtaacttacttttgcctcctattatgctttgaaaatggaattatagattatttcagagtggactcctgagcagccatctggcttttttaatataaaaggctctgtgccaacatagttgcaatgactggattttaaagtctcaaccctgtaatgtctagaactgcactgttcaatatagtagccttgtgtgacttttgggtamttgaaatgtgtctagtccaaatcaataagtactagatatgcataccagatttcaaaaactagttttaaaagatattttatattgataattaataatttcatattaatttacaattgaaatggtattttggatatactggattaagtaaaatatattattaaaattaattctacctttttaatttcactcttttaaaaaatgactaccaggaaatttaaaattatatatgtggctcacatatttctgttagagagtgctgatctggaatcttaatgatctccctgtcaggcttcatttgttaatgtatggagatgcaaaactagcatgaacctgggtcartgatgataaattcagctacctctgttatttctagacaacagatatcagtcctgccagtagaaagaaaggtgcacaaatcacaaaggggttaaaacactctctccagcctcacagcaaatgtccacgttcttccttccctcaaagggtagattgacttctgaagtccattgaaatggttctcatttcactaagaaacaccttcagcctctgaggaaaagtgtctagagtaggttcactgcattcagaaactcattcaataaaatgctagaacaaattccagcagggagrcatagtagctagtgacattttcctcaaatgtttgtttgtagctaagtgccttttctattrtttaggygatgaaattggaatgctagaggacatggccgttggcatttccgatttaaagaaagtygcatttaaaataattgaagccaaatccaatgatgtgttgccagttataacaggaagacggtaagcagtgctcacttcctgaagaccaggctttgttagacatgtcgtgttaactcctgtcagaggaggcaaggagaattcaggtttgatttgggaatatttcttttgttttttttcttttcctttttggtaagaaatacacrtggatgatatgataggggacaatctcaaaaaactcctggaagtctcatgaatgttttaaattgtagtgagttgagtatggcagtactctcccacaaaatacaagaaattcaaaataatagcctgcatgagaacatttttctccttattactatctcatccaaagctctgggtgtttttacttttgcgggagttgttcagttaatagactcataattcttgaaatgactttaaattaaattcagttaaaagcagcaacattttagaaaagatatatttctgtgtcaggggaatataccaccatttttcttaattatttttgacaattcactctcagactatgagatttccgagaagggttttcaataaatagcttcgaaggtcagtgtatgataggcaaaatgtcagaaataattaagaaaaatgatggtgtgtagaacagacctccaatagaagaggtacatcttatagtaagttgtctcaatcagaggtccaaactattccggtgttagtgcttttaattgctgcatgaggatatttaaaatttgaaacattctggggtcatgttcaaaacatatgaacatacaaaagggagagccttttcatgctagagagagatgcaaaacacactgagtataaagttcaaagtaaacttgttttcctgttgatagtaaacatataataattattttaaatgttatgaaggatacccagaaccacatagttgactgaaaggtgactttcttactcacaaaaaaacccacatcctcagaaactaaatatttacctagaattaatgcttaacttgccattcatttgggagaaaaagaataaaattgctcatacgcacacctgaaaaacagtacaattctatatttctctcaagtttactatcaaaagtgaaacactaacacttatatcacaatgtttaagggaagcttaccaggccatttagtgtaggcagagtacagcatgctttttctgaggaagttcttcaaacagtattgaaactcaaaagtgatcatgcaggtaggggcatggctcctagaatgatgaagtgagcagcttagcacaccctctctccaaaaggaatattacaactggaaataacaatccaaaacaaccattttaggataaacagaataaattggatgcacaccacaaattcagaagtacttatttgtgagaaactagtgaacattgggcagcatcagtagaagtctgtggcattttgctgagggctgctcccatcaaccctggccctgygaacacaatttcctagggcaaggccattaacaccagcagcttcactaacagagggggctgacttgacttggattggagtaggaaatagcacagtcctgaaagttgtcagaaatggtggtttagattaacgagtctaacttataatcacatcgaaaagaataggtataaacttaacaaagttagtctgaatgttgtacacagaagacacaaaatattgctgagagaaattaataggatccactaaatggagagacagcctgtgttcatggattagaagactcaatattgtttagtaattctccataattgatctatagattcattgcaatcgctatctaaatctccgtagtctttttgcagaaattggcaagcctaacctaaaatttatatgtaaatgcaaaggacccagacattttgtaaaagaagaacaaagtggaaaaacttacactttctgacttcacaaattactacaaaactataataatcaagacaatgtagtattagcataagtatataatgtagattaatagaacaaaatttactgtccagaaataaactattatctttaaagtcaattgattttaaacaaagctgccaaggtaattcaatggagaatggagaatcttttcaaaaaatgatgctgggacaattggtttatctatatggaaagagaagaatttacacatacacaaaaattagctcacaatagattatagatctaaatgtaagagctaaaactgtgaaacttctagaagaaaactcagaaggaaatatttgtaagttgggtttaggtaatgagttctatatatatacatatatatacacacgtatatatacgtatatatgtatatatatatagaactcatatatacgtatatatgtatatatakgtrkrtgtgtgtgtgtgtgtgtgtgtgtrtatatatactttaagttctaggctacatgtgcacaatgtgcaggtttgttacatgtgtatacatctgccatgttggtgtgccgcacccataaactcrtcatttacattaggtatatctcctaatgctatccctctcccttccccccaccccacgacagactccaatgtatgatgtaccccatcctgtgtccaagtgttctcattgttcagttcccacctatgagtgaaaacatgcagtgtttggttttctgtccttgcaatagtttgctctgaatgatggtttccaccttcatccatatccctacaaaggacatgaactcatctttttttatggctgcatagtattccatggtgtatatgtgacacattttctaaatgcattctatcattgatggacatttgggttggttccaagtctttgctattgtgaatagtgccgcaacaaacrtacatgtgcatatgcctttatagcagcatgttttataatcctttgggtacatacccagtaatgggatggctgggtcaaatggtatttctagttctagatccttgaggaatcgccacactgtcttccacaatggttgaactagtttacagtcccaccaacagtataaaagtgttcctatttccccacatcctctccagcacctgttgtttcctgacattttaatgatcgccattctaactggcttgagatggtatctcattttggttttgatttgcatttctctgatggccagtgatgatgagcatattttcatgtgtctgttggctgcataaatgtcttcttttgagaagtgtctgttcatatcctttgcccactttttgatggggttgtttgattttttttcttgtaaatttgtttaagttcttgtagattctggatattaaccctttgtcagatagatagattgtaaaaattttctcccattctgtaggttgcctgttcactctgatggtggtttcttttgctgtgcagaagctctttagtttaattagatcccatttctcaattttggcttttgttgccattgcttttggtgttttagtcatgaagtccttgaccatgcctatgtcctgaatggtattgcctaggttttcttctagggtttttatggttttaggtctracatttaagtctttaatccatcttgaattaatttttgtataaggtgtaaggaagggatccagtttcaactttctacatatggctagccagttttcccagcaccatttattaaatagggaatcctttccccatttcttgtttttgtcaagtttttcaaagatcaggtggttgtagatgtgtggtattatttctgaaggccctgttctgttccattggtctatgtctctgttttggtaccagtaccatgctgttttggttactgtagccttgtagtatagtttgaagtcagatagcatgatgcctccagctttcttcttttggcttaagattgtcttggcaatgcgtgctcttttttggttccatatgaactttaaagtagttttttccaattctgtgaagaaagtcattggtagcttgatggggttggcattgaatctataaattaccttgggcagtatggccattttcacgatattggttcttcctatgcatgagcgtggaatgttcttccatttgtttgtgtcctcttttatttcgttgagcagtggtttgtagttctccttgcagaggtccttcacatcccttgtaagttggattcctagttattttattctctttgaagcaactgtgaatgggagttcactcatgatttggctttctgtttgtctgttattggtgtatagtaaagcttgttatttttgtacattgattttgtatcctgagactttgctgaagttgcctatcagcttaaggaaattttgggcttagacgatggggttttctagatatacaatcatgtcatctgcaaacagggacaatttgacttcctcttttcctaattgaataccctttatttccttctcctgcctgattgccctagccagaacttccaacactatgtgttgaataggagtggtgagagagggcatccctgtcttgtgccagtttttgcctattcagtatgatattggctgtgggtttgtcatagatagatcttattattttgagatacgtcccatcgatacctaatttattgagagtttttatcatgaaaggctgttgaattttgtcaaaggccttttctgcatctattgagatagtcgtgtgatttttgtctttggttctgtttatgtgatggattatgtttattgatttgcataggttgaagcagccttacatcccagggatgaagcccacctgatcatggtggataagcttattgatgtgctgctggattcggtttgccagtattttattgaggatttttgcatcaatgttcatcagagatattggtctaaaattctcttttttttgttgtgtctctgccaggctttggtatcaggatgatgctggcctcataaagtgagttagggaggattcgttttttttctattgattggaatggtttcagaaggaatggtaccagcttctctttgtacctctgatagaatttggctgtgaatccatctggtcctggacttttttggttggtagactattaattattgcctcaatttcagagcctgtcattggtctattcagggattcaacttcttcctcgtttagtcttgggagggtatatgtgtccaggaatttatccatttcttctagattttctagtttatttgcatagtggtgtttatagtattctctgatgatagtttgtatttctgtgagatcagtagtgatatcccctttatcattttttgttgcatctatttgtttattttctcttttcttctttattagtttcgctaccggtctgtcaatattgttgatcttttcaaaaaacagctcctggattcattgctttttttgaacggttttttgtgtctctatctccttcagttctgctctgatcttagttatttcttgccttctgctagcttttgaatgtgtttgctcttgcttctcaagttcttttaattgtgatgttagggtgtcaattttagacctttcctgctttctcttgtgggcatttgttgctatacatttccctctacacactgctttaaatgtgtccagagattctggtatgttgtatctttgttctcattggtttcaaagaacatctttatttctgctttcatttcgttatgtacccagtagtcattcaggagcaggttgttcagtttccacatagtcaagcagttttgagtgagtttcttaatcctkagttctagtttgattgcactgtgatctgagagacagtttgttataatttctgttcttttacatttgccaaggagtgctttacctccaactatgtggtcaattttggaataagtgtgatgtggtgctgagaagaatgtatattctgttgatttggggtggagagttctgtagatgtctattaggtctgcttggtgcagagctgagttcaattcctggatatccttgttaactttctgtctccttgatctgtctaacgttgagagtgaggtgttaaagtctcccattattattgtgtgggtgtctaagtctctttgtatttctcaaaggacttgctttatgaatctgggtgctcctgtattgggtgcatatatatttaggatacttagctcttcgtgttgaattgatccctttaccattatgtaatggctttctttgtctcttctgatctttgttggtttaaagtctcttttatcagagactaggattgcaacccctgcctttttttgttttccatttgcttggtagatcttcctccatccctttattttgagcctatgtgtgtctctgcatgtgagatgggtctcctgaatacagcacactgatgggtcttgactttttatccaatttgccagtctgtgtcttttaattgtagcatttagcccatttacatttaaggttaatattgttacatgtgaatttgatcctgtcattatgatgttagctggttattttgcttgttagttgatgcagtttcttcctagcctcaatggtctttataatttgcactgtttttgcaggggctgctaccagttgttcctttccacgtttagcgcttccttgaggagctcttgtaaggcaggcctggtggtgacaaaatctctcagyatttgcttgtctgtaaaagattttatttctcctccacttatgaagcttagtttggctggatatgaaattctgggttgaaaattcttttctttaagaatgttgaatattggcccccactatcttctggcttgtagagtttctgccaagagatctgctgttagtctgatgggcttccctttgtgggtaacccaatctttctctctgactgcccttaacatgttttccttcatttcaactttggtaaatctgacaattatgtgtcttagagttgctcttctcgaggaatatctttgtggtgttctctgtatttcttgaatttgaatgttggcctgccttgctagatttgggacgttctcctgaataatatcctgcagagtgttttccaacttggttccattgtccctgtcactttcaggtaaaccaatcagatgtagatttggtcttttcacatagtcccatatttcttggaggctttgttggtttctttttactcttttttctctaaatttctcttctcacttcatttcattcatttgatcttccatcactgataccctttcttccacttgattgaatcggctactgaagcttgggcatgcatcatgtagttcttgtgcygtggttttcagctccatcaggtcatttaaggtcttctctatactgtttattctagttaaccatttgtctaatcttttttcraggtttttatcttctttgtgatgggtttgaacmttctcctttagcttggagaagttattaccggtttaggtaattagttcttagacatgacacaaaaatcaagacccataaaagaagaaaatagataaataggacttcatcaaaattatgaacatttaagcatcaaaagaacaccattaagtaagtaaaaagacaagccacagattagaagataatatttacaaatcctatatttgaaaaaggactcatattcagaatatgtaaataaatgttacaactcaataataatgacaccaaaaacctaatttaaatatgggcaaaaagtttgaatagccgtttcaccaaataggatatatgaatgatttataagtacaagaaaacatattcaacataattcctcactaggagaataaatwtaaaatcacagrtaccatttccttcacactagaatcatcagataagagcaaatgttggtgaggatgtggaaaacctggaacccttgtacattgctggtggaattgtcactttgaaaacagtttggcagtcttaaaaagttaaatataaaattaccatatgacttttagacttacccccaagagaaaatgaaacatatctccataccacggctcaatcctgcatgttaatagcagcattattaataatacgccgaatcatggaataatccaagtgtctatcaactgataaacgtgttgacaaaaagtgatatcgatacaatagaattctattcgctaattaaaaggaacaagctactgatacatgccacaacatggatgacttcaaaaacattatgctaggtgaaaaaggccagatagaaaagattacatactgtatgaatcaattcataggatatatgcagaaaaataaaattcattcataggaaacagagagaaaatagatgtgtggctttctgggctagcggtggtagtatagctgactataaacaggcacaaggaatctttttaagttgatggaaatgtactaaacctggattattgtcatgattgtataattctataaatttgttgaaattatgaattatatacttaaaatgcatgaattcatatcaatttcttaataaagctggtaaaattatcacaaagaaattatatgtttcaccttcagaacaagtttaaagcatgaactgactcattgatgcttctcatattcctgaaaaactgttagccaggctattgtaaatggcattgagagcaattaaacaaagaaaaataatgcgctcactcatctgaaggtaatgctaacatccctgcttgctaaattcatgatatttaccaggtctctatttcataggtagaaagaaacaagtctcagagtcagtggtccacactgtttatcaataatgttatactaggagaaattaaaaagattttcacaaagaggctcactatttgccctatgcttatttccccagtgcatatcttacaatgccaccactctatatagttcttgaaacacatggattttcccaacctctgggcaaagctttctaaatttctatattcaattcacactgtatcagaagatgacagtttttaaaatatgtaagtagctactcttattaatcatattgtactaatcctaacttaaattttcaacattaaaaaataggggtagtttttaatggacatttccagtgaaaaatgctcctgtgatatgttaatgtttcaaaatgaccagaattcctgaaagtttcactctaagcaataaaaccattacctttccatcagcgcatcataaacagaaacactcatcaatagtgataacaaacaagccataccaaaaaatcatataaattatttggtttatttagcttcactgtattgaaacagcagtcattaaattattgctcttattcttaggactgattgagttttaaaaataattaaataaagaaaaaaaattgaggctatcaatgcacatgaccctgggtgtacaaaaatgaaccgaacatttttttcctgaaggaattcagagtgaggtagagaaatcacacaygtaaatgaawtcttacaatttttatgtcaagtaatttaataaggagatgaatgaatgaggaatataagcatatagcaacagaaacctaaatcagtgctatattccaacccttttaatgttttcttccaataaatctaaaataacacaaaacaaataagtaatgtttcttccctttgtcctctgccttctttagagaacattaygtggtagaggtcaagcttccagccagaatgtttgagtcactacctctncagattaaagaaggacagttgcttcatgtgtatccagtactttttaatgttggaatcaatgaacagcaaactctggctgaaaggtaagctttggtgtaagagtcgcacttgagatttttctttgttccttttaagcntatgatgagaagtcccatgtatctgcatgtagaactaacatcaatttatgagtaacatttttctttttatcagtatcaaattatttgagatagaaggtaaattttcatatttaaggaatcctggcccaagccaaatttaaatgtggcaaaaatattgaggaaaatcttgatgccaatactaaataaagcatttgcatggattaaccttctttgtttccaaatacctatgtgtatattaaattttagaattcatgtttatacatatctcaatattgtaaacagataatagcatcaagtttttaaatctaaaacagagtttttctcttttttgtgtttattttaatggttattatttggtaatgttagcttttttaataatgacttgctcagtcagcaaatgattgtactgtgatcccataagtcagttaaaaaacactttttttttgctggtcgtggtggcttacgcctgtaatcccagcactttgggaggcagaggagggtggatcacctgaggtcaggagttcaagatcagcctggccaagatggtgaaacctcgtctctactaaaaatacaaaaattagccaggcgtggtggtgatcacctgtaatcccagctactcaggaggctaaggcaggagaattttttgaactcgggagatggaggttgtgttgagctgagatcacgccactgtactctagcctgggcggcagagcgagactccatctcaaaaaaagaaataaaaaaaaatctcttttttttgaaagacttatttttacatcttacatggctcacatatagagattacagaaaaygtagataacagttaaagatcatagaacaggccagggtcagtggctcacacctgtaaatcctagcactttgggaggcagaggcaggtggatcacctgaggtcaggagttcaagaccagcctggccaatatgacaaaaccccaactctactaaaaatacaaaaattagctgggcatagtggcgggtgcctgtaatctcagctatttgggaggctgaagcaggagaatcgcttgaactggggaggyrgaggttgcggtgagctgagattgcaccattgcactctagcctgggtgatacgagcaaaactccgtctcaaaaaacaaacaaaaaaagatcatagaacatacttttgaaatattttagagaaagaagttagcatcttggctgtaggggctgactggagaagttccttcacaggcaacaattttgggagtttgatagtctttggtattataatatttaacatgctttcttatctataattcactctccaagtgacccctgccccacaggtaagtttaaaagtacctagcatattccttgccttgataattaagtacttttgaaagctagtttctaggattagattatattctatttatctatatatatatttgtctcagcaaattcaatgtttgagatgaatgatattcctgagcatgaactatacaacttggagcaggggaacagcattccaaattgcctcttcttcggtacactacagtagagtgttttgagttggaattaataaggtctgtgattgtgatcttgagagagatatgagactcttccatttacagacttttcaaagactagtcagcattatattttcaaggcttctaagatggactaatttgcatcattyatgttattgtgattgttttagttgtcagtcattttatttaagaagtgtcctttccttccttctcatctctcttgcatactaagaatgcacttttttcacacatggaagctgtacaagacacacaagactggaaaaggagcaaaatggcaaagtagggaaaccctgagagaagcaggaggcctgaatttgaatagcactctgacatcaaccgttaatttgagcatattgcttactctctgttctctgaacctcctttttctgattctgaattttgagctttaccagcaacatctacatgttagatatgctatgtaatctagaagtagtatttcactactgtttactcaaattcaaaatgtagatgttgtatatgaccattcttagataaataaatactattagtctgcttgggctgctgtaacaaaatactgtagactgggtkgcttaaacaacagaaatttgtttctcatagttcaggaagctgggaagtccaaggtcaaggtttcagccaatttggtttccagtgagggctctttttctggctgtcagacaactgaccacattctccctatatgctcacataacctcttctttgtgcctgtggaaagaaagagcccactctcataatctcatttaactttaattaccccttagaggcactgtctcaaaatactgccattgccatttcgggcttagggcttccacatatgaattttaggacaacacaaacatttattccataacactaatgttactccagcaaggatggtattttttaaataccagttgattacagtgtctgaaaacattagaagaatatatttcagattctatggaaactcctctagatttttggggtctgtatccctgttctccaagttcaactcagtatagatactgaacactgagtttataccaagcactgctctgccaagctatgggacataagaggaatacagggtaacaagaagcgtggaatcggcttcctatcctgaaagaaggtgtaatccagtgaggaagacaagtcaacaaacattacattacagttyggctcatgcaataattaaaggtgtggaaggaacaggaatagtgcataaaacaaagcaattcacagaagggagatgaatccgtgggggaagtatcatagaggagatgagccaggctttaaagatgaatcagaattaatcaagctatcaagraaagtaagacattcaagtcaagagtggatagaatgttaaaagtcccaaaggcattgaaatactgctgctaagggaggagagtgtaactacattcccacaagaggttttggaagcctttgtggaaacttagatgctaaactagggagactataagacaycgtcctttcagggargagagaagcattgaagttcagtgagttgatatgatgaaatataggttagattaatttttccaacatttcatttattgcatggtgcaatgtatggtatgtagttgatgttaaatattttttgtatagatgaattcatttttcattgagactgaatgatctgacaagggtccagaaagtaaactggaagtgaaagagactaggggcatagttctgtggtatttgggaagctttaggagagtytaaactggatatgattaaatatcttaatatataatgacagtggttgagaaaaaaaaaaaaggaagggttaccagagataggaaaagactgaggaatagtgggtaaggtgaggaaaagaggaaatccaaaatgatgcctagattttgaacctgaattaatgccaaaatattggggacatgcttagcaatggttcaaaggaggaagcagttttagttttgggttatgttatatttgaagtggagttggaaaatgcacactgaaattttctattcacacctagaaatagagattttgatgaagatacatattggaagccatttacatagcatccttttatagggagacaagtgggttttacctttgaacttgggaaattctcaaagataacacaaggttagtgacacactggtagacaggtttgtcttgacacctcttggtggaagactacgtgtacagaaccatttgacttcatggtatgaacgaaaaaaatgtcggcagaaatgatctactgtctgggaaatctggctctacrtgtgcctacagcagttgatagtgtgggcaagactgcgtgcagcccagtgtccagtgctggtcttctggtcccctccctcagctgccacgagtgaaatggatggttggatagatagtaagaaaagttttttaaaacacatacagggatgtagccctgccacagaggtgtggagtaggatagggaagctaatatcaattatgtccatgcacagagactgttgtgttagaagcgattagtgaaatcagggccagtggagattggaatatgtttgaaatcaccattgtgaattgtagcttgaaaaatgagacagactctttccttaggaaattattttctaatctatttaaaaaggaaaggtaaaatgtgttactttytggtaccgttttataacccacagctgttttcttttttctgtttgtaggtttggagatgtctctttgcaagaaagtattaatcaggaaaacttcgaacttctacaagaatattacaagatatttatggaaaagatgcctcctgattgtaagtatgtgagttagagaagacagcaataatagcttcttgattataaatctttagaagaggtcagacatagaggtcagtggactacagaagcaggggtagggatgtgagagtgattttgaaattatctgatccaaaaagactgattgccaaggtagcatggccaacacctgcatcattctcttgattgccttcttgaatgtgtcctgctgttcattctgagacattaatttcattgccactggaaaatgccaaataataaaaatatggaccttataattagacattttaattagtctgataaaaattttgtataattcttaaccatataaaagactttactaaagatttaagtctccatttataagcaacatcagacataggacacacatgcaggagaacatcagatataataccagttgaacaaaataatattaagtcaatgtgaatgagggaactaacttattaaatatatgtattgcaatattttatgcaaaaaaagttaaggcacccaagcctttaaaaatgtgttttacacatttggaatttgttttggagggggccattgtccaattctacatttcttttccccatcgtattaagcacataacatttgagcagtccaaaatcagagagctgggaatgtatttggwattcatctataaatagtataaatatgttgagatattcacaatgataagaagctaagttttaataaagtaggaaaattataatattttaaccaaaaactgtaatcaaagtctactcgttactatttgttctgtaatcatgaacaatttgctcactgatttatattctgttatttagtgtgaaatagctcaggtggcagagtgtttatgtcttcataacctaatgaatgtggtatccaaatattgcagtggcatatgcgtgcccatgtgtggatagttaaaaatgtcacttgcagattttatattatgatttatattattttatgtcaaatcaaatattattttttgccaaaatgaatttaagtacatggagattctttggtagcaagcatactttaagtattaaatttgttaattacctgaaaagttaataatgtaagtaaaactatttttctttagcaattaatgaaaaaaaagagtttattataacttgaatgttaattattttttaacaaattacttacaatttggaaaaaaagtctcagaatttttgtcagtagcttgataaaaattatatttcttatattaattcttgaaaagtatatgtggtccccaggccagcggcatcagcatcaccaggaaacttgtcagcaatgcaaattcgcaggccacactgtgaatctactaaactctccccgagtctgtgttttaataggcctttgaggtggcttctgattcatgctaatgtttgagaactaataatatgccatccttactcaaaatatatattacaaagtagattgttggcaaagtctgtgaggactttcagtgctatacttaaaacaatcatattgctaaagaaatatgtataggtactgttgaaatacaaaataattctatattcaagtaacttaaactcttcataggaatataagtttaaaaaattttagcccgggcaacatggtgaaaccccatctctacagaaaatacaaaaattagccgggcatggtggtatgtgtctgtgatcccagctactcaggacgctgaggggtgggagtatggcttgagcccgggagacagaagttgcagtgagccaagattgtgccactgcactccagcctgggtgacatagtgagactctgtctcaaaataacaacaacaacaacatgtgattctatatattgccaattaaatataaacaagtgtttttcaaaacatgtaaatatatttctctccttgcaaacaagacggaattttgtataaaaccaattgcatttcattgcttacacagttgtctgaacatactggattgttttctgatattttgtttcctgtatttttgagacaattctatttgacacagaatggagttgtagtatggctgtggttgtgctccataacaaaagtacaactccaatctatacaattatgatgacatatgggtttattcctcctgtagacatattgcaagccaaagaatgatttgagttctgctctatttaaggaaaaaacataaagcttttataagagtatgagtagaggttaggccatttgctaagaaggaaagaactatcatgctgggtcatatccataatccatataatctattattttccttctttcatagtgaaatcaagggataatttgtgtcaatgttaaaggataggttaatttcttaaacatattgctgtcactttttaattcattatggatgtgctgactattaatttactgattctctttttaaatgatttatgaagtaagtaggtgaattctatttttgaagtaaaaaagtgtttcttctccaaagattttcttaactttaagggatatccctgacttttgtgatatcaggacttaatgataaattaattttagcttatatattcactcccagtcaagtggctctcatctttttactcttctcatatagaagcatttgtggactaaatattcttcccaaaatgtctwctaattctgttatatttgtagcaattttagtttatagtcacaattcagcaatctacaaacatggaatagttttatttcagtaactactaccagttttatgaagcactcatcaacctttagtagttagtaattgcggataggggaatggataattaaagttgccaatcaacatgccctttcaatatgtttagcatggtctagtgcttttagactatttaaaatctcagtttcatttggaataaatattcagccaagttcaaatattattatcctccacccccatcttccttgcaactgtagaaagaccattagtggaagtcttggtagggcagggtggcctctgtgtctgtctttcttttgcggaattcatgggatctagaactgggatgtgcctgttacagagaaagaggccacatataggaatcccaaaagttcctttcctgtaaatctttgctgaatcttcatctgcagaaagtactatattgttggtcctcagtatatgtgtgttctgtgttggcagattcaatcaaccccagataagaaatatttgaaaaaaataaaaataaatatgcaatgacaaaaatattattaaaatgtttaaaatatagtataacagctatttacatagaatttatattgcatgaagtattataagtaatctagaggtaatttaaagtataggggatgatgtgcttaggttatttataaacactgtgtcattttatataagaaaattgagcatctgtgattttggtatcttctggggtcttggatccaatcctccttgggtaccaagggacaacttgtatatctgatggacaaagctgttgatgactactctatctgggcacatgtattgtgtgtttctcccaccatatctcctttgtatgtgatgcagctctcagacagttgttctgctgactgtaaggcaaaagaaatcttcagaagttacttcccctcaggccctacctgtgatattcactggcccctttgatcagcctgggaattccagtgtggcagttattagtgcttctcctttttgtcactctaatcttcctgttgggcttgatgatctcagacatccttcacattcccttttgtgcctacctaaagcattcagacacttacattttgtgttagaaataaaataaaatagtacgtctgtaaatcactaacacaaactgctccgtgtttaaagtcaccactgcgtctcatacatgattcagggcttctgaaggaagtggataaagccccttctgtcttcctcttccctttaagggaggagggaccaactgtcaaagtattacagctaaattatctgtcctttctctaataatgcccatatcttttgtgctttatctgaaacaaagaagaaggatattgtcatacggctctaatgaaattgtaccataatgattcctatgctagcactataagagtgagcttactagcactgtgagctaagaaagaaaaacagggcttttttttaacctgttctatactttttatataatatttgacattccagtgttttatatatagtgtttcatcaactacatcaataaggattgtatacaaaatactttttagaaaaaaaaatttagtactgtaatgagggtatgtagaatgtagtgtgtgtgtctgtgtgtgtgtatgtgtgtgtgtgtttatgaacaatttttactgtaagcctcacattaaatttagcagatattggtggagataatattatgtgcaaaagtctgttctattcagtttggatgatgaaagatgagtaagatacggtctatgccgtagtatctttcaatttaatgactcaaggtaatcaaagaataatctatattaaggctaaacctctttctgaaacaatagttgctcttttggagtgttgattccttttctgaataatttagttttgttgttgctgttgttcaaaaaattttacttcctaccaatcacttctgacactcgttgtatagttatgcattgtcacagattttatttttgcgccaggaaaaataaaacatcatctgcatcacttatatttacaaaaataaggaaataggataagaacccaatattttatagataactaatttcaagggaattatttgaatagttttctatgtagtccacatagaaaacatacattataaaatgagaacattcataagtgtaaggaaaggaagactaaggatcccataaaaagtagaaattattggagattgagtcaaataagctaaatgagaagagtaccatccacgtgaaaatgagcaaaaatatctaatgtgttgatgaaagaagaatgaggatgaaagtgaagctattggatttgatgattgtgactcattaacggcatttaatggagtctttaataaaaagcatggactgaaatcacattacaggcaattaaggagagaatgcatgttgtataatcagagaaacagagtggtgaaagctactcccttaggaaacttaacagtggatacaaatagagaaattaaaacataagctgaacgcaatagaatcaagtgagagagtttttcttgagtctttatttttccaaggtggtaaattgatgcatgtttaaagacagttggaaatttcagggtggaagttatggacaaaggatctatacttgatcctgctgagaggttctagggaggtaacaatgatgaggccccctgagactagccagaaagctaaccagaagtcgtaagacagaagaggactaggcctctcatatgatgtagagactgtaaatgtagtcctctggcttccagggaaaaagaaatatctgccatacctggttgaggccctttaacacctaaagaattccagcaaaaggtcacagaaaactcttgaagactgatacaaaggttttgaaagaatcctaaatatagtctggggttggtcttcagacctctgctgatacaacactttctctcacgtctctcacgctcctttggttgcttcagaggaaaagcttcaaaaaaaaaaaaaaaaaaaagactttgttcacatccaccttgccaactaaaaatctgatcaaccatggttctctctgatgtccttttaaattcttttagaataattattaacatataacccttaaatataatttgtaaaagctgtgagtgcatgtcaaggacttaggtttagtttaagtaaactaacatttagtacatttagttaatagggcacaatttatttatattaaggttttctgtgtcctttraacttatatttttagttagcattttccatttttagtatttcaatttatcttaaatcttatttgaaatatagagtcatggagcaaagatggcttaagtcaaggcacaattagaaagaaaattatagaaactaaaaataatatgaaatttataaaaagtaaaaggactccattgggacaagtaaaccttcccatgagaggatttcacagaagcaggtgagaaggaggagctttactctaagtacaatgtggaatatctaaaattgaattttattaggtcaaataatggagcaactcacccctaatattgaatactctgtccaaatagccattgaatatgtaccaaatttttccaacacaggagagaactctctagtacatcaagataatttttccagaacaagtatgtgataatgcttttctgaatgagattattagattttgttttcaaaatgaaagaaaagaacaaggctactaagatatacagaatcatattccatgtataataaacttacaaattgatacacatgagggtaaagctgagaatcagaaaactagctacaacatttataacacagattgtgctctggaagaaatcaacactaggttttggcagacttctttarcaaactgcactgttggactctccatactgttccaaagccacagactggaaaagcaatcagtatcacatgttaacagataccttgtactagaaaaggataatatcactgagaaacagagtataaattgatatatagttggtacatatatcagagagaagagttgcactacattttatctaacgatgagaattgaagctacttaagtatttccttcatagtggtgatttgatgagctctgtcacagacccaaaaataactggtggaatcaatactgatggcaccagctgtgtgtgccacataaatgggcaatgctccataaacaaaaaagggtacatctgaataccaatccactttctgcttatttacctaaaattggaatccatgtgtgttgatactcacaacatcccaatgtggttcattgctgccacaaatttcaatgtgctgctttcactttcttagaacatggtatggttgatatttctcatttctgcttttcagagccctatatccttagaaactgtcacttatcttgagcctggattcccagacttcacccacaaaaggccttcaaacaatcagattgcttctgattagcacagagactttctgacacaagttaactatttcctaggttctacagtaatttctaagttattaatcatttttctacatggtaatactcggtttcctctgaacagttcacatttatataaagagatcctttctgaatgttaagagagcctctccacattacagaacagtgacttcagaggtggccattttttctctcaactaagcttcaacagtgacaaaaagcactgttaaactttgccccttcatcatcatgctctcccttccaaatatctcttttctctctgcatcattttcactgtctgtaaactttgaggaggaggtcaagcttatgcaagaaggggttaacctgcaaacaagatcaggaagagaaggacaattgagttaggatattagcctaggctatactgaggtaaaattaaaaaataatgccaagttctcaatggcagtattcakmwggccccagacaggaaatcaagaagtctaagaatttacaaattaagcagggttttttgaagtcaagtcaccaagagtttagcaatactgagttgctactaacccaggtgctaaaaggacaaaggtagtgtcaccagaggccaaaagctggggctgtatatctggatctagagtgttgttgaggactgtctagcaaaacctgggaccgtgaatggaaaagtttcccagtgggagctggagccatagaaaagatataaccacttccaggggcccttaagaaacagaaaggtggggaagcaacaggctggcttctatcttcctcctgtccttgactctcactctggctcctcattgcccagagttaagtgtaagttagcctggaagatgaggtttcctgtgataaagagcagaatgggaatggtacatacagaaatgagggcatatcagcgattgatcagcatcatcgacccctgtgctactcagtatctttccttgctttttacacatacaggagtaatttcaaacaaatccatatctggctgtggggccaagattgtgtgttttaacaagccgtcctggtgattctgcctgcacagtaagacctgagaaccacttgcttggatttataagatgtgatagagttagctgtcaaatttcaaatgttgtttttgcactgcattgtactctggacatgagtgtaaaagaagatgaaatttcccagaatgttaaaacagttcatcttttatttatctattgttttaacaaatattaatagttgaatgacctaagcaaaacatatatgtaaaacaactcagcagtaatgatgattctgttcaatgtgagattaccttgatttataatgttaagctaagtaagtgtgtctaaatttcctaaacataaagaatagtctgaatattacagggctttatatggtatttttaayaaacttgaagacataagggtttaaagatataagaagatacaaagattttcttaaattaacacatgaatgtcattccagcagaaactatacattagactattacatagtaataaacaaaatttacttccaataactttgctttataaacatctcaaytgtcataccatgtagacatccaaatatataaatgaaaaatccagtcagttatccaaatattttgcatattttatttaaaacatatgtatatttggaaacatcgagatggctgaggaattcttcatatattgttcatatttgtcattgcatagacacataaaaatgtgtaaaagggattggcaatagagaggaatattatgttatactgcaggacaagcttaagtttgaaaatgtcccaaaaagagtagataaaagtggaattaaaatttttcaccaccsattttttcacctaaactcattccagtaagtcttttatccatgtaacttcatggaaactttctgtcaagagcctgcattgttaaacccaatgctgagtcacttgtcctcatcttccttgatctagtaacaagtgtgacatagttatttcttacttcttttgtcacttggcttcccagccaccacactctgtgatttctcctgctctatggctgcttcttttaaatctctattcctcattatctttccaacatctaatgttggagtgacctaggattcagtccatgcatgtctactctgctccccaattgaacacagcctagttgctttaaatacctgctattaactatcaatcttcatatctacatctccagcccatctctcttccttaaactcttgtatcctgcttaacaccttaatctttgttcctgataagcccttaaaaaagctgttcttcctacagtcttccccatctacgtttatattaatttcaaccttttagttgctttggggaaaaaaatagccaccsttgagtcgcctctttcacatcccctttccagtccatcagaaaatcttactggctccacttccaaaatatatgccaccagttctcaccacctgcattgctactaccctgtgcaaaacccttcttacctcttctargttttggcaacagcttcctcctagcatctttgtttcttctgtcacttctcatttagtccattcgtatccactacatccaaagtgactgttttaaaatgaaagtctcattatgtgtctcctaaaactcttccagtaacccccaatgttgttagtttttttkttgttgttgttgttgttgtttgtttgttttcagaataaaaacctacatttttacggtggcctctaaggcaccatacagtcaacccctttgatcctttgatccytctccaccgctttctctcacacttacctcactctgctccacactgacttctgccccccatggacctcttgctgtttcttgggactttttagtggctctatgccctatcttaaatgccttcccccttataggtcactcactcacctcctctaagtctttgcctaaatgtcactttctcagtaaggcctttcttaaacaccctctttaaaattgcaatctcttgcccgctggaacccttctctcttaaagttttttatagcctctatcatcatgtagcatgcaatatgtcayttacattatttgacaggactccttaccagaatgtaagctccaggaggactagcacgttgtttctattccattaacatttgttgaatgcrtggtataagttgagtcatttagttggttgttttaaagagtcaaacagcagaaagctgttggatcttggaaatagttaatgaagactatgaaaagtaacactatttctgttaataattgttgagtgatacaaggattaaatagtgaaattattttggaattcacattatcacattgaaggttctgagaaagtctgtaggatggctggcaaagtttttctgtaaagagccakaaagtaaataattctagcattgtgggccatatgatctcatcaccactcaacttggctactatagggcaaaataagccatagacaatatgcaaatcaggccaggcatggtggctcacacctataatcccagaattttgggaggctgaggtgggtggatcacctgagatcaggagtttgagaccagcctggtcaacatggtgaaaaactctctctactaaaaaatacaaaaaattagccaggcatggttgcaggcacctctaatcccagctactaaggagactgaggcaggataattgcttgaaycagtaagtgggaggttgcagtgagccaagatcacgccattgcactccagcctgggcaacaagagcgaaactccgtctcaawaaataaaataaaataaaataaaataaaataaaataaaataaaataaaatwaaataacwataaacaaaaaatggacatggctgacttttaataaaaatgtatttacaaaaataaaaaaatgtatgacctggggttagcctgcaagtcatagtttgcaaaccctaatctatagtgtctaaattaattttatttaaaatagcttttttttcattatgggaacatacaaaattatctgaaaccctcatttgcattttttaaataagtgttccccaggacatagattaagaaatactgacctagtccaaccccatcatttgctatgagggacttggggtcattcacataccctttggcaggagaagagagactaaattccatgttctctgactcccagtcaaatgttcttttaatttatatgctgctgctccaccattgctgtctaatggcttctgcagtgaactgaagattgtagatttttaaatattggaatatttccagcaccatacttttattttctgttcatatatttttacacacttgtaattacaaatttattttaaactcattgcagaagaaactctgatgcactaatcttttgaagtttttaatgcttttttagcattaaaaagattgagagaattttttaactactatctttagaagcacttctgtttctttttaaaagaaaaagtgagaagaaataatatccaatttttatttcctcaatgcatgttaaactacatagacttttaatgtcccttaaattttagacacgatcaaattatgaaatacaaacagcagtacaagcaacaaaggtagacacacatatacrtatacaaaggtccacctgcttggccaaccagacattgatctatgttactatctatgttgcaatgtctgtgttatttggtggtcttcataaattacagtcgtcaaatcttttagctagccttattctgttgtagtatgtgtaggtacaaacttagattttcttgcctttcaatcatccttacattttcttcattattttctcttcactgaggctctcatcttttttgaatgtctaactcttgcattccagattctactactcacgaaagattggctggcctcccagtataccagtctagtaagtctgcacataatggcatgaaatcaaaagacataaattcaattgaaagctcacttaggtgagtcatttrgtgttttcaatgcctgcrtttcattgtcagccaaatgagaataattactttgtatacaccttgtacttcaaagtaaattctaccattatctcaccagggaaaagaagttaatattaaaatttccactgtcaatttctgtgactaaaaagtgtcacatgtacttatgaatattagagagatggttaagacgataattgtggtacactgagcttttcaacagttatatttctgctgtgtacaaacaacagaaacaaacaacaatctagttaaatttgatcgtgaagctttttcaattgtttgaaccaaatttcatccctatccaatagcctctctccttctctgtcatttctatagtctttgcaatcyatgttgacttatcttaattttttcgtgaaatcactgattctctgataatctttcaaacaaagcatacttttttctttctggaatgctcctataggtgagctcctgaaatcatcattaggataagttctctggtctgacactgcaaagtaagatggatactgaaaatattgagactcatcatcccttttggaaataaatatctgaatttaacttcttgttaacaagaagttgttagtatgatgtccaatcaacagaaaaacgattaaaggtgactacgttagttctaaccttcaatgaaacatcaaattaaagacaattaacaaattcttatttcactttttagatccacttttccaactctgtaattcactcagctatttggcatagcactcttccaaacattcactctttatttaccattctcctcctccctgaaccacaactgcaacgtcttttgtttccagtccactttttcttcagcctttattttatcattctcccaattctgcatcacagaatgtcagatagagtgaaactctccttagaggctaagtaagggtgagaaattgaagtctcaaggataaaattatctttatcaagtgggtcggaaaataacagtgtgagsacattaatagattaatatgttttgttgccattgataaactgtaaatatatgagtgtcccagattaccaaatcagagaccacatcaagtcaaaaaagggagccatatgaatggaataaattataggtttcatattcttattacctctttcctcattttggagccttccaacacagctttattttcatcatcttcctgtattttacctcatttatacctaatacctcagaaattattaatttaacttattctatatagtaagaaagattcaagacctcattcttccttgcctccaggagcctgaagaggtaggccacatactgtgactattggaaaaagycccaatcttctcaaccatctccctttttctctgactttcttacagtttgtgatttaattccttccacattataggcagcaggagaggcatggaaaaggtgagcccttggtttttggagaagggctggttatgtgtctgcctccctgggctgtcatctgrccttggtgtatttcactagcagtctggctcttgcacgggcagggaggtaagacactgaaatcacctcaaaagctgtgtcccttctctgcctaaattttgagaaatccattcttagtctgtttttcagacttctgtgtggagaatgcactctcaaggrgccatttattgctagggctatcrttggggtaaaatgcagggaygagggagtttgactaggtgaaacaaaggaggccattaaactgccttcagtgccagcacctaggccacttgagtatgggcaaaagtagttgttcacccagtttaacttggctcacaagaagactgaactggggatttgtgtaaagcccttctcatactcctgtttcctttcccactctgctctatcrtctgtgcttgaactatcttaggcatcttgaggagactggagtttagagttggagagccatttaacaaatcatctttagattttttgacatgactttaaattgtttggaaattctgaaatcaaattatgaatgctgtctttaaaaaaatataaacaggaaaaaaatatgttatcgtcgtattcttctccctgaacaccatattccatggtctccaatgtataatgttgattgargaaatttygaagaatttttaatatattgctttggatataatttaaaaattacttttaaagtttgtttttttccttttgctatgggtgatgcaaccttgaaatttgtttaagacaaggcactgaaagtgtgtatgtcaaaaatattcaacgcagaccaggatgggatcttgacatttgatttttttgtattgccttcttcataaattgaaaattggaaatgcaatttaaataaagctggttttgrtggagttttgtctgttcttrtttttcaagattttacagtatctaaaacaacataattttcagttttaagatatctcaatggcttttacctaattgcatttgtctgcttgctagtacagttaactataattattttagaattaattgtagaagagacttgatgttacagactatagtaytcaccagagtaggcagtgaaagcagtgttcatcatgttaactttttcatacttagaagtacaagctctttaaactgtttttattgtagctgttctgttctggttgcttattgccagataacaagctacctcaagtttactgttataaaatcagaatcattttrtttatgctcacagattctgtgggttaggtatcagaaagggaaactggggatggtttctctctgctccatgatgtccatgaccttcagatgaaaggaagaatacctgggggctgagaactggaggcatctggaggtttctgtactcacattctggcacctgggataacctcactcaaaggctgggctcagctgtgactgttgacttaagcacctaaacaagaccttccatgtggcttgggcttcttccagcatartggctggrttcttatagggagcatctcaaaatgaggaatacagtcggcaagttccaagagaattatcaggcaggagaggcataatcaattcagacctggcctcagaagccacagatcattacttctgtcatacttcattagtcaaaagatagtcagaagcccacccagattcaacytgaggagacatacattccacgtctttcaataaaaagtgtcgaagaatgtagaactatgttttaaacccatcactgcaggtgtgatagatttgctgccctccagaaatactctgacttgtcctttcctcattctaaatcaacagtacacatttgtactgtggctggtcaatgttgaatatacatatataacaatttgcttaccttagaatgcttttgattgcaaatgacaaaaactcttaattcaaactagcttaaacaataaagaaaacttgctgataaacctcactgaaaattctagcagtaaggtaggtttcaagagagggttggttcagtgactcagcagtataaaacaatatctcaggatgggcacggtggctcatgcctgtaatcccagcactttgggaggcctaggcgggtggatcacctgaggtcaggagttygagaccagcccagccaacatggygaaacccgcatttctataaaaatacaaaaattagccaggcatgatggcgggtgcctgtaatcccagctacttgggaggctgaggcgggagaaccccttgaaccagggaggcagaggttgcagtgagccgaggtcacaccactgcactccagcctgggtgataaagtaagactctgtctcaaaaaacaaaarcaaacaaaaaacaatatctcctttgtattttatcattaggctgctcttatctcttatgttamttttatcctatgtctggtcttgtggctaaaagatggctgttatgagctaaccccacactcaaccaaagggctaagaagaggttcctttcctcttcaggagcttcactcagctggaacagcacaggccacttgcatatccttaaaacagttgctaagatgagaatttagtgccaactggtttagatcatgtctattcgtgaactagtcttgatttcaaggggtatggatcacacaaatggacgtcagagtggragtgtggtgcatcccatggcaattttgtatctgccacttagtgtgggaagtgagtagattagggactgggaaggcagccataatttctgattcatcttggaacagtttctggccacacagttatttggccataagagaatgaarctatttgacatcattagcatcacagttcagtgagctaaaaggccacggttccattcctgtttacttattaataccctgcctgtgattcaggtcgtcaaagtcagagctcttcttgttgaagaaacctatttgacctaacaaggaggatataggccctaaaacctgactctcaacttgattgttctgttccattggggaggtacgagaatagtcatggggtttgtgaatgtttgtgactggggtrtgtgactgcaygtgtgtgaggagactgtttcttactttggatacattctgacttttacctgagaaagtaggcttcccctctgaggctgtgaactcttttttaagtgctactaatatcttctgtttttcagaggtgacacagaatttaataatgtagccttttctgccaagagttttattcattgttttccattactggtcaatgacgcatgaccggattcttgcccttattttgcagttgaggaaatagggacagagggttaagcaatttgcctaagactacacgtcaaagcagcagtagaattggcattagaaatcactttcctggaatcttggctcagtgctgtttttgaaaagcaattataaaagtttcaaacaaaaaagaacaaatcatacatagcacacatttgggaayccattgctcagctttggaattttcgtaagaaacaaatatttacagatagggtaaaagctccctttgtacccctccaggttaccacccttaatcctcccctcctatgagaacatcaatatcctgaatttgatgttttgcatcctcatacacattttactctatatttatgtatccataaaaatatggtacagttttgcacatttractatattattgctgttgttttgtatgaatctttctataatttgtgcttttttgctcaatattgtttttgtgatatatccatgttgacacatatggcatttgtgtatcctttttacttatattactttgcattaatatattggtttattcttactctttatgaacatattaaagcttttttgctatttaaaattataaacaataatgcaataaacattcttgtaacttttacctctgaatactttcttaaactccatttgaaaaaaaaaagaatactattatggagatatgcatagagactcagctgccctgtctaaattttgtgttagaataatgcaggactgagtagcaaaagcaagactytttggctatatttacatttgaggagacacagtctaagcctaaaaccaattcacgttctgtgtacaccacaattttcagttgatacatcaggatctatcattacatcttgaaacctcacctattaacaaactggctattattaatgatactgctttcctgaaccagacctgaatttctgtggtctgcagaatttttattgggttgaaaaaaaaaaaatggcagcaacccaagtattgggttgayagaggtgtgctcygaataaagcaagttttgtcactatagaaatagaaatagtggcctaaaaatgttaaaaaaaaaaatcaaaattacttttcttgtaagaagcacaccatgggagaggaaatgaaatttccatgagacatcatgcctgtgtattctaacacactctctttatgaggtgggaatggggaaaggatggccaggtgcttgatttacatttaggatycttatagtctgtttaaaatggcttattaaaacatttccatgtctataatgaaacaaaattattttgataaatcatgctctgttctggagtctcagcgttctgaagaatttggtctattgtgttaatactagagctggttttagtactaccaatggtaaaaacatcagcagagatttgggagaaattactggtacagcagttaagagacaaagttttagccttgactcctcctctgactatgaactttgtgaaaaagtcacttcagtcccagtcactttggacatggggttgccctaactcagggctttgcaaatgttttatgttgatcctaggaaatgttaaataaatgtggtgtgttggaactacaatttttsaaaaattatgaaatacaaaaatttcgagtgcaatgtatacactaagggtaaatatcatttcataaggtttttgttacagaggggtgtgtgtgtatgactgctgtgagatgttatgtaaagtaagcttttttctttttataaattgaggtatttttgataattaaggattaggtatacctaaggcatacaatttgatgatgtatgatacatatccattattaaataattaccatagtcaaactaattactacttcctcacctcagatatttatcactttctctctctctctctstgtgtgtgtgtgtgtgtststgtgtgtgtgtgtgtgtgtgtgtggtgagaacatctacaatctactctgttagcaaatttcaaatacataataaagtattgctaattaaaattgcattgttatgtatcagctctccagatgtgatgtcttcatctcatgttaaaggaaacttcttattctgtattgctttcaaaactgtttgaaagccatttgtacaagcctgacttcagaaagaagctcaggggctttccagaaggggttaagcccttgtttaaaactcatcagttgccygcattttctaggatgaagcccagattccccagcagagcagaacatgattctccttcataaatcttgccccaggactaaccactccaaggacattctgaactgcacactccgtgtttctgcagtactggctcatgcctcgtgcctttgctattttcccctcagcctcaaacgctcttggtagctgcaaagcattatctttgctggatgccctccmacacccaccaattcttatagaattgtccagtgcttcccttgcttcrcaaatctttactgagttatgtcatagcctgcagtgtactttcctggatttaataatagtttaaatatccatcccaccctactagactgtggaaattttgaattcgggtctttatatcrtaagaatttaggttcttcaggatataatgaactgttctaccatgaagccaagaaaaagaatttaagttatttctttttctcatgcacattctctgttccccattgctcttaaaatcatcttattatttaaaagcaatatgtgttcatttaaaatgatatgaaaaggcagttgaagcattacactaagttgcacagcctaaagatggccactgttaatatctaaactagtgtttcactctgcctatatacatatgccaagagaagccaacatacaggcatgcatgtgcacgtgcacacacacacacacacaagcacacattgttacacaaataagtttattcattaatctggccaattcttcttttcagcaatgtcaaggacactttctatgtcaccgatatacctgtacataatttttaatggctgcttataattctaatttatggcttcccctgggtttgttttggttgccatttatcaacattaaaagcagtgatggtggacttgacttcttatttcttgcatgccatgattataaattaaaaagcaaccttattgtccttaccttctttgattagccaccaagtcctggtctgattttataactcccttcaaggcattccatattyggcctccttccctttatctttaggctatctttgggctgtgtcctgttaaaattcctgtatatcagagaaccttctacctcacaatgtgatgtcttcagtcaaactttctcttttgtatgagaatcatctgtagttatatagtaaagatatgacttttgacaactttctcttttagaaacaaattcaatggaatcatgcatatattttatrtgactattttgaacctcasttccctaaacctatctgaattgtacccaaccttcctctattctgtggtcataaaatccaagatgagatatgattattttcaatggaaattcccaccttaccaaccacttctgctcttagatatatatcactagtatagttcactgggatacttcctctctcctctggagctaaagtcacaaaccagaactattcagatatattattttgctaaactgcaacatctggtacaaatttgaaaaagtacaaagcctcattactactaaaattcatttgtgtcagtttttgtgaacttgtaaggaagacatcatctatttcttcagtgaaactcrgtaacgtagttgtagtccatcttattttctcctgtttttagcctcagttaaagctctcaggaatttatctctcagtttatggattcaacagtagagtgtattttcatactatacagtacttatccaaccattcacttagacagtctttttgtttctrtcactataatattgaatcccatctcaccaagtcttggggacatttgggtcataacgtacattgtctccgtttttagtataaagtgtatgccatttattacccatgctttagttgttagtatgcagaaatctgagcaaccagtgtcatttcctgctttctacccaattatctcatactgtgaagtatagcctcatgtttttcctctttccgtgtcatatctgtgcttctttatagygctggttctcaagcaggatatatttttctgtcaggagacactggcagtgtctgaaggccrtttttactgttaccttgggaaagctgctactggcatgcgaatggtagaggccagggatgctgtgaaacatcctgtaatgcacagtatggtcttcctcccagcaaaatattacctgattcaagaagttaatagtgctgagttcaaggacacttgctgtatagcaactgatttcatgtgtcttatttgaactttcagatttctcccaaccctgagttgtycaatttaatatattctcttgattcagactagctactcaatggcaaaaaaaggaaagttatatctcatgacatctatgtcttatgcttttgttaaagtgagacagaagccaacatctttgtccaaaatgctggtaaaatagtactgtaggaccacttgatattaccatagttatacagaatagagaatgagagaattaagcatatttgtaagtaaagaaaaaamcaggtaaattaataagtatggttgtcctcagacacccttagcttcaaatgatatttcttgttataaaattgtgtttgaggctgggtgcagtggctcatgcctgtaatcccagcacttcaggaggccaagataggcagtttgtttgagctcaggagtttgagaccagcctgggtgacaatggccaaaccctgtctctgcaaaaaatacaaaaagtagctgggcatggtgatgtgctcctgtaatcccagccactttgggcactgaggtgggaggatcacttgagtctgggaaattgaggctgggctgcagtgagcagagattgggccccattggcactccagcctgggtaggcagagcaagaccctgcctaaaagaaaagttgtgtttgcaaataaatrtattgaaaaaacctccatgggcagcttmatgtgaacactgtctcattttatttttctcctttgtttttyccccttcagatatttcacattttcaggaacaaaatgatttaaaagcattgctagaaaatctccttcaaaatatccaatccaaaaaaagaaagaatgtagaaattatgtggctggctgcaacggtaagcactctcatgtcaaatcttatttcctgccatgtcataaccagcaaatattatcagttctctactgtgcagggtccaacctctgcactttgggttrccaggtgtcatcttctattagtccatgkattaggcatttttactcttgttggtagttctatccatagactagaacataagatagaagaagatgcacttaagaaagactcttgctcacttgctattcttaccaaccttggatgtgttctccactctgaggaagtgtctgtgagtttcttgatgttgcgtattgcaacgtcaattgcccgtatcacccaggattttgaactgctgctttagagacatatggtttcaacagaatgtggttatcagatctctgattcacagcttcagtaaggctcctggacatattgttcagttaatgagcttataaatgtgtttgttaatttagatgttggcatagaattcattactgatggattgctcttggggtaatgaactatattttgtatagctctttctcatttaatggtgcccttggggtaaaagagctgcctgtgttctcaccccaggtttctataagaattagagataacaaaaaaaaagcctgtatttttaaggctcttatctggtaaccgttgaggcatagctcacatgaaatttatgaattgtgttaaacattcagacccaaacatcctttcattaggaatgcatccttccatcaggaaaggtacatgttaaagatctttatgataaatgccwtgtttgcagtttctgcagtgttactcttataatttggagctcaggttaaccatgcttcttgcatactctattcattctctagccatagcatttaaaacagaaagttttcccctacttccagtgcttcaattataattcaatatcacttactttcttctgggaaaaaggaatggataatttaccatgagcccatatgaaataatttaccaaaagcaaggcagaggaaagcttctttagtttcccttcctgccttcttggagccccagggaagaacatcaaaggtaacaatatgaaatgtcgctttcaggcagctgatttacactggttccatttagcaccatactgtattacatgaaggttgtttttaatagtgtggctgctctttgtatcttctaagaccactayggttgttaattctaacaaaaatttcacaatggtaggtcataaattggattttctattttactgaaaacatgacggcatgaagatagtttgatactcatgccatctgatgatttacaaacatataaatgtgtcattatgtacattgtgaagttatgtaaatagataaattaaggatacacatgtataaacacaaatgtrtattttagtatatgcaatttcccattttaatgtatgaaaaagttttcctataaatcccacacatttctaaaatatttttttgaaatgtgtatactgaccaaatatgatttactcacaattcaccactgaatgaatgattagtagcatttctgttagctaatgcctcagtttcaatattctatttgtaaatcatgggcctatttatgatacttttaaaataaataccgaaattccttttgatattttccaaaaatattttgttaatatttgtttttattttattttcctttcttttaaaaatttatttaatgaaatactgctttagttaatgttttacattctaattgaaaaatataaagtggccaggcgtggtggctcacacctgtaatctcagcactttggggggccgaggcgggcggatcacgaggtcaggtgatggagaccatcctggccaacagtgaaactccatctctactaaaatacaaaaattagccgggcatggtggcacatgcctgtaatcccagccactcaggaggctgaagcaggagaatcgcttgaaccagggagttggtggttgcagtgagctgaaattgagccacagcactccagcctggtgacagagtgagactccgtctcaaaaataataataataaaaataaaaataaagtcatttgtttttttcttctttaagtttaaatagtaaaagtgaagacttaaagaggacaaatgacaatcaagtgtgttaartcaatagttcaggtattgtagaaatcaaggcctaacctgtgtactctgatggaagtgcccttacctccactagactttaaatttagaacattaaatattctaagtaggacaagtgcatatgatagtaacaataaattttaaggaatattaattcaatttgaaaatcatatctcataaatagccattatggtctattttattattataaatatagttwagaatttttaaaaatgaaatactatttatttgaaaggattagaattttttagatgtaaaaagattgtatggagacatcatgctctcacatttttctagtcacttatatkggaaatagaagtaccaaaggtctgaattaatagtgatgtataaattcaagtttaagaatcacaattaaaacatggtaataaattctagattagctatattattttaccttcttttaaaagcggacaacttttaaagactgcttgatgacagataataaagaagacctttgttatatcacattagatctattttaaatgcacactgattagcattgtaatgccgaagttgattattgttatctcatgttagaaccctaccatgggatagaagacaaaggaatggaatgattcccctattactcataaggcaatgagacaagagagtattgatgctcagtgatttttctctgacttaaatcagaataacaaaaagaaagaaccatagaggaaaacagaacataacagaaattaagagacttgattcttgaacttaagtagagttctgtttgaatcctggttctgctctgttatgtgcaagttacttaacccatctaaacctcagtatcctcatccgtaaaatgaaaacaattataccttcctctagagttctgcraagtttatttatttacttttattgttaatttgggaggttttttttttttttgagacagggtgtcactctgttgcccaggctgcagtgcagtggcatgatcacaggctcaagtaatcctcccacctcagactccctagtagctgggactacaagcatgcatcaccatgcctagctaatttatttatttaaatagagaggaggctttgttatgtttcccaggctagtctcaaactcttgagctcaaatgatcctcctgccttggcctcccaaagtgttaggattacaggcatgagccgctgtgcccggcccctgtgaagtttattaaaaagagcaaatgtatatgaaatttcttagtgttgtaccctagagcacagtcaatttgcaataaacagtggccatttctattgttctcctttttagtattgatgagtagttcccttgtctgttgtgaggcaccatgaggatgtttaaaatctcataacataaagccaagactagcaaatgtttcttaaatgaaaaataagagaatattagctatatacgatttgaatcaattgtttgatccagggaatatrgttttttggttgtttgtttgtttgttttttcctctttacaatgatggtgttatttctgagctgggattagtttagcattgtcctacactgcagaccaggcaccccccttgggtagtgtgctgcgtcctctgctggatagtttacatcttatatggcttcaacagttccatgcctcatgcacaaagaaataaattgggtccattgygttggcttttgaaatgaaaaggtaatgcttttacatttgatgagaccgattgaacaaattgactatcataaactaacagaaacccaaatttatatttgatgtgtttagactagaagtgtttggaggaggccgacactttacrgtattacaaatgaacaagaaacgttcgttcttacatatgttacagatttgccgcaaactgaatggtattcgtttcacctgttgtaaaagtgccaaagacaggacatcgatgtcagtgacacttgaacaatgctcaatcttgagagatgagcaccagttacacaaggacttctttatccgagcgctggattgcatgagaaggtatctcacatgtttttcaagtttttttcttttaaggtcattttgagttgtttttattttttttttcaaaatacatattttattggaggactaaatattttagaactttactgcattttcatggcttatagcttatgacatcagagatagataattttctccacctgtrtaatgatttcatctctatctatatttcccctactcattttaggctacttttctaaacttttcacttttagaaaacgtggctgtgtacacatttgatgacatgcattattatatatgatattatatattttattagctcattggctcaagttaaggggccccgaaaatctcatatataacactgtaagagcaagttttcatgatgcataagtatttatgagtacttgcaaaatwaaactaactcattatccaaacaaaagctttccaaattacaactaataggtgatattcccatggcccacagaatctctgggtcagtaacctcctttctaaagttattttcacatcactcatcatgaagatgggatgacactgatactttaaaatagagaattaatatggttactctgccgacatttaaaatgctgtgcccgaagtcatgtttcttgattcatttccacagtaattaaatctaaactgtaagccgtaatgggaaggaaaaagtgcttcattcacagtgtctatcagcaaggacacacgttaattaaaaagttaagcgaaattgtctctttgctgcaaagcctagctcagaagcacactaggaagcatgggacaggctctgggttcccagaaaggaatgtcatatgattcactggagaaggctgcttcttatctagcctgccattagctatcagttttcttttaactgctgcagtctttcattggtgacattgatgtttgcttgtgtttgttctatgcctctgtgttttctcactaacgagaggtttctgaagttctgtatttcatcccatttcatgtctcttggcattttcattcttccgtggagctctatcataattttttgataaatgtgtgaggatgtcttagaggcctgacatgaacatctcagccatatacaacatgtttggttgatataaaaacttctttcaaaaaataatatctcagcactaatggtaaaataccaaattcaagtatgaaatcttcaaatctgcagaaaaagaacagaaatgtcactatagatggaacaaaggtgcttggtgagaaatgcaggaatgcatgatattataggtcaggtacaccatgggactaaactgatttaggtaacaaatcttctggaagatgaaattggtgtgcctgtttatttaagawwgaagaggggacccttaaattagacataaaataattcaaacasgtaaataaaggcaatatatttactggacatgttatactatagaacaatatattttggtattgcctatgatggacattatatatgcaatacatttgctcatgatatagcatttgtgatgattcatttttgtgtttttaaggtaaggcactagaaatttaatctaaaacactaaaggcttaacttcaaatccctagtattctggtgatcttcttcttcttttggttttgtcygtatatgaggaccgtgccagagtgtgagtgttggcctgtatttgtgtgtatgtatgcatgtatttaaagaaaataagatgagttcttttctttaataactgccttcatttccctctgggtattttgccttacaatacaggctcataggtttacaagctctggcaacacagcagagtagatatgaacatgaggtttgggagccagctaatttgaatccaggctatatgccatacattacccataggcaagttagtctctcactgcctcttagtgccttagggcaagttactcaacctcttgtacctctcagtttcctcatcttttaaaacagacatgataatagtagctccattttaggagtgtctcggggattaaatgaaatgatacatgtacaggaattaacaatgtttggcacatggtaatcactaaataatgttggttaaaaaaattaaaaaatcaagggctgtaatgttaatactctgattttccatgtgcagtataatctagctaattatgatccttgtagttttatgtttgtgaatattttatgacataaggttggactacaatagcatatattaaaatgaagtgtcctggcagctcttgtaaataaggtttcaaatgcagtatcttccctatttaagtaaatcagctctttaaatagcactttaaaaatgtgcaagtgtttgcaaatgctgtgttaattatggaagcatcacaatccctgaataggttttttataaacatttttgatgctaatgcatatctagaaataatcgtagaatttaagataaagaagtcaccttagaaatttcttatagatatttttatacatataactcttataaatttcctaccgcacatacaacagtgagtggttcatgaataaacatttctcaagttactgcttaatgctgattgattactggggtcccaaaattctggattctgacaatattttacagttgagttttttgagaggaagcagattttcccagctcctcactctgccatctagcaagtcccacccttcagacagtggtttttaaatgaacatcagaaccacctctggaaatttaaaaaatacatatgtttgattggtgtgttaaaaggtggaaggatgagaagggagggagggatgagaaactacctgttgggtataatgtacactattcaggtgacgtttacactgaaagcccagacttcagcactatgcagtatgtccatgtaacaaagatgcacctgtaccccttaaatctatttttaaaaatgtatcaagatgtagtttaagttatcatcatcttgggttcaattttataataaaacaacatgtcctatactaaaacgcaatacatatgtttagacctcacatggattataattgagaagatctgaggtgggtcccaggatttaattttttaagaactttacagacattctggggaacaactctggatttttaaaaatcagtgttttaaaggaatttgatttgtatgtttttgaatttactgcaacttttaattttatttaacatcarttgcagtttattttacctttgaattactccaatcaccttccaggmtattttctctggatttcttaaaaattcaccaaggtttcttcatcataaaaactcaagggaaaaataaagttcgccaaggttatcatatcactctttatttagttttattttgtccttatctatattaagtattttctattgtattgtgcttatctctgtagcagtttcaaattatttacgatgagcaaargtatataaatgaaagtaaataaataaagctccatttggctcttattcagaaatcccctcacaagaagcagctctctgaaggtagagattttcgtttctctttgttcactactatatttccagtacctagaacagtacccagtgaacatagtatatattttttctcaataaatatacaataaaggaatacgtgaatgacatgggtttctaaaactttcgggtcctatgtatttggtggtattgtgcatacataagcattttaaattaagcatatgaagttatcacttgattgtgacatattgataagcacaagctgcagaatatgaaagtaagagtcttattattctaattcaaaaacaaataggcaaatattatcctaattcaaaaacaatagaaaccatttcagctcaccacctgaatccaccctttgtacaattgtcaaaaaattcagacttccttttttttctacttatccagtattactttcagctgcacactcctgatggggctttcgggtaccatctgtttgatgaaatggcataaatgcctcttcagattagaaaattaaacacaaggtgtctgggtgatctgactctctaaggatctcttagtggttgcctgtatcattaagaccaaaacagtgattcttaaccctcacrgcccatcagaaatctagaaaactttttttttttgttgttaaaggcaaagtcccaccacatactagtttctaggggggaaccatgattgagaaccacttgactaaagtctactttatttaaaccaattttaatttaaatccgtaattgattttaatgacattatgacaagactataaacctggtatgtctatccttyccttgagttttgaaatgtatgtgtattgcaaaattctaccttgatcacctatggcacaagttgtaccacaaaggtggcttaataatttgcaggtttttttttttaagaaagggagaatactttatcagaattcagttttcagttttggactctccatggaatgctaagagctgtcttgtcccartgcatttgcagaaagcatttttagtaggaactttcagacttcctattaatcaaacttatatttgattaatagactattaggattggaccttaaaaatacaataataaatttgactggattttaaaatgtcatatttgaacaaaaaataattgtatagggaaatttaatgcctctataaagtaaattaaaacaaaaataccattgtactattatttttccttaacaggaactctaggatgatgactacacaaagtagtaatgtgacaccatwgttctcaattgtcttttgttttatactatgttacttcctcaatctgtcatagctccttaaaattaggatagttaatatgccattagtaagaagactcagggtaagtttcagcatatacctatgtatcaccctcgcaatacagggctttagtcattctatttcagtaaatattgaatttataagagacttaaaaggcccattggccttattgagtttcatttatcaaatgtcatattctcaacatgttgcrcctgtaatttatctgttgggggagcataatttatgaagtattctgctttataagtaaatgactcttaaccaattgatgtcagtaaaagatgtatttgcatgacttcctccctgatagggttcacttttaagtaatgtagttcaattattgttgaaataaaaaagtttcttccttttgtctttagtcttgtttccacttgagcttatttttttcyttgtttttgattgtacttttagagaagagctgctattatttcatattatatcctatttcaaatattaaagagaagtataagcattgtaagcataggtaattgaagcttgcagctatttttttaaattttattattatcatactttaagttttagggtacatgtgcacaacgtgcaggtttgttacatatgtatacatgtgccatgttggtgtgctattttttgactacttgaaagggatgtgtttgtagggaacatcgtaattgggaacaggttttccatgattgctaagtattgtctcctcccttgagagtttcagtggtgtgtttgctacattacttcagtcagtatttgcagcaaataacaggaataagctgagagagagagtcaccttcatctcagggttattaataaaaacatgaaaattgaccttatttgggatgtttttacttcagctgaaggtgagttgaaagatactgcaaagaatacacatcttagaaatcatgttagagcaagtagcttttaataagccatccactataaaccccaaaagagaactgatctttctgggaaaatcaaagaatggcctacaaaggacttcaacttcctgaacaaaatgtatgtgctaattttcgtcgatcttcttcytatattcatgcctgacaagattgtcatagtattctattgacagaaaaatgatgattttgaagtctatttctttcccatamtttcttttgttgatagtgtttgttttccagtcatagcaacttgagaccctgtgagtgtggaggccatagtacagagcagccatcagctttatccacaccttcccaagtcaaccacttctttcaactcccaaaattattaactaagtgcctagacatagaaggatgtgaaacatacattttaacttaataaaataatacaatggaaatgaatctaattgaaacaaatacatttaacttatgccacaaacacagatttttaaatccaggaagacctggagttaattccttattctaacactaattatctgtgcagtggtggacccattaattaatctcaaggcctcagtttcctaacgtgtgaaggcgagatgatgctccattgccctcttgtgagtgttgtgataaatgagatgacttaaagtctctgcacccagtgggcatgaagtgttctgctgagaaatgttacccttgctctctacactctccccatctctatctaccctgcttgttcttccttagaacatttttctctaaaagtgcatctttggatattgctaaaatggggaagttctcctggtcttcgaggtcttaggaaaaaagtctcaggattaacatttggtttctaaaaggcttaaattgtctctcagtgacagtgggctagtgggctacagggtttggaaatcttgctagagccctagctatagcatcggggaatctagaaacaacttagcttagagtcggggttagtgcatatccggggcccccagagagcagcactcagcactcagtttgtggaactagagaatgtctaagtcctgaattcccacagctttcactggcaagttaggatatcctgtaattaatgtgtcaggagccccacctctggaggtgagttgggaaaacaggtcattaatagaaatatgtggtcgtcattttcatagtcaaaagtgaacatcttttgtatatctactatggcagagtaccatgctatacaaatggagaaacacatttgaaattataatagccactaatagtcaatgaggacttactatgcactaagaataacactaagcatcctatatggggaaactgctaattcccacaagaacagaatcaaataaatgagtccagagcatagaaagtgttcattattaagtggctcagaggataaaaagaatcactgtggccaggaggtatcctggaggaggtagaatctgaactgtgtcttaaggatgcatacaatttaggtaagttgccaggagttaggaaaatctatgttagaattatctaagtggataagagtagtgcttattcattcatcacacttgtcaagtgattttgcttacgtttaagtgttgtaatgtgtggcacattgaacaacttattttcttcagctgatatcaagtttttgagatctgtatttattttagatctagttatcttcttttaaacttatataatactcccttgtataaatagaccacaatttatctattgccctagttaattttaagtaacagcaaaacatcagatgttttaccaacatctgattaccaacaatastgtaatagacattctcacatgtatatccatgtatataaaccaataggtataatgggtggtaaggcatttgtatttttaattttgctagatgctgccagattgcttttccaaatagctatactaatttataagccacaaggcatgcacatgtgttcccatttctccacacatcccaatacttgtactgtaagagtttttaaccatctgatggatgaaaagtgctatctttgtttaagttatattttctcagtaacacaaaataagattaaatatctgtctaaacatttactggccatccagattctcactcatctcatcttctatgtttcatataatggagttttgcacataattgcaaattatgaaaggtttccagcatttataaataaaccactggcctgttgtgtttaagttacatttagaagacactgtttcaggagtggtgcatttttttaaaaatgtgctttatttttattttttaaatgaaagcacagtggaataagacaggagcatcccttgggtttggacagagaatgcatcatgctatgacaggagcctgtgacatgatgtgaagctttttagctgggagggggacagggctccattttagataagagaaagacacttccagctgagaaacaaaaacctacagttgattagagagatgattgatgcctttgcacttggaaaatgaggtgtagcaagaactagtccaagaaaggtctcattttcactaaagaaggctgagatgcaggcagcccaaacctgaatgatctatggagagcagttatgccaaaacctagagtctatttatgcccctggaaggttgagacaagagaatcaaggaaataattttcatttcactgcctaatgattttttctacaaacaccatctgccttgtcctagccaatgatatccatgaattcatatattcaatatgcctattatgtttgtcctcatatacaaagaaatccaaaaccattaattcagtgaattatcattatactgtctaaaacttcttgtcttccatcagaacacttgctatactcaggtaaacactgtcataaaatggcttcaacccttcttctaacttgaatattggttatagtgctctagacactggttcaagggaacaaattggatggcttcacaggccaatttctaaagaaaactgaactgggaggcaactgtatttatgaataagtacccaaaatgttgcaagcttttctcctgatcagaagaccacagatgacagagaagttcaaatgctaggcataatatattaatgttcaaacgatagtggcctaaagccctatgagcaaaaatgcattatgcataattacactccattctcttccatttagtgagcctatcagaactcatatgagtgtgaatracatcattatggggatcaaaactgtaatttatagagcatatcatttgcaaaattggtattttattagtaacaaatcacatgtgatatctctcaaataccatagtattatttaggggtaatcacygctctgaataccctaaaatctaacaattaggccagctcagcaaagagcaggctgccccactatggcacataaagtgggtaagaggaaggactttggaattagactgcctgatttctccacttcttagcagtgggaatgaaattctaagaggccttaggttctttatctgtaaaatgaaacaacatatataaagaaattggtaactgggtatagttcatagtaagcagttggtaaagtcaaacttatattgtagtgataatttcaccagcatcctcatctaatagggttgtcatgagcgctaaaagagacaatgatcactgatgcacttaaatagtacttgttacacagtgaggatcagtaaatattaaatgctgtcatggctattactgatgtgtggtgatgactgttattactgtcattattggttctttgtcatggcagcttcctatcacattgtttttactaaactgtaaatggttgttatgtcctcaaactatattgaggaaaggtaaaaaaaaaaaaaaaagtcatttccactattcatatcatctgttgcattggttctcttttatttacttttttttttattattatcctttaagttctggggtacatgtgcacaatgtgcaggttagttacatatgtatacatgtgccatgttggtatgctgcacccrtcatttacattaggtatatctcctaaggctatccctcccacctcccctcaccccatgacaggccccratgtgtgatgttccccaccctgtgtccaagtgttctcattgttcaattctcacctacgagtgagaacatgtggtgtttggctttctgtccttgcgatagtttgctaagaatgatggtttccagcttcatccatgtccctacaaaggacatgaactcatcctttttatggctgcatagtattccatggtgtatatgtgccacattttcttaatccagtctatcattgatggacttttgggttggttccaagtctttgctattgtgaatggtgccacaataaacatatgtgtgcatgtgtctttatagcagcatgatttataatcctttgggtatatacccagtaatgggatggctgggtcaaatggtatttctagttctagatccttgaggaatcaccacactgtcttccacaatggttgaactagtttacagtcccaccaatagtgtaaaggtgttcctatttctccacattccctccagcaactgttgtttccttactttttaatgattgccattgtaactggtgtgagatggtatctcattgtagttttgatttgcatttctctgatggccagtgatgataagcatttttttcatgtgtctgtagctgcataaatgtcttcttttgagaagtgtctgttcatatcctttgcccactttttgatggggttgtttgattttttcttgtaaatttgctgaagttctttgtagattctggatattagccctttgtcagatgggtagattgtaaaaattttctcccattctgtaggttgcctgttcactctgatggtagtttcttttgctgtgcagaagctctttagtttaattagatcccatttgtccattttggcttttgttgccattgcttttggtgttttagacatgaagtccttgcccatgcctatgtcctgaatggtaatgcctaggttttcttctagggtttttatggttttaggtctaatgtttaagtctttaatccatcttgaattaatttttgtataaggtttaaggaagggatccagtttcaactttctacatatggctagccagttttcccagcaccatttattaaatagggaatcctttccctatttcttgtttttgtcaggtttgtcaaagatcaaatggttgtagatgtgtggtattatttctgaggactctgttttgttccattggtctatatctctgtttcggaccagtaccatgctgttttggttactgtagccttgtagtatagtttgaagtcaggtagcgtgatgcctccagctttattcttttggcttaagattgtcttggtaatgcaggctcttatttggttctatataaactttaaagtagttttttccaattctgtgaagaaagtcattggtagcttgatggggatggcattgaatctgtaaattaccttgggcagtatggccattttcatgatattgattcttcctatccatgagcatggaatgttcttccatttgcttgtgtcctcttttatytcgttgaggagtggtttgtagttctccataaaaggtccttcacatcccttgtaacttggattcctaggtattttattctctttgaagcaattgtgaatgggagttcactcataatttggctctctgtctgtctrttattggtgtataggaatgcttgtgatttttgcacattgattttgtatcttgagactttgctgaagttgcttatcagcttaagggtatttggggctcagacgatggggttttctaaatatacaatcatgtcatctgcaaacagggraaatttgacttcctcttttcctcattgaataccatttatttccttctcctgcctgattgtcctggccagaacttccaacactatattgaagaggaatggtgaaagagggcatccctgtcttgtgccagttttcaaagggaatgcttccagttttggcccattcagtatgatattggctgtaggtttgtcataaatagctgctattattttgagacatgtcccatcaatacctagtttattgagagtttttatcatgaaaggctgtcgaattttgtcsaaggcattttatgcttctattgagattatcatgtggtttttgtctttggttctgtttatatgatggattacatttattaatttgcgtatgttgaaccagccttgcatcccagggatgaagccaagttgatcatggtggataagctttttgatgtgctgccggatttggtttgccagtattttattcaggatttttgcttcgatgttcttcagggatattggtctaaaattctctttttttgttgtgtctctgccaggctttggtatgaagatgatgctggcctcataaatgagttagggaggaggattccytctttttcttttgattggaatggtttcagaagaaacggtaccagttcctgtttgtacctctggtagattttggctgtgaatacatctggtcctggactttttttggttggtaggctattaattatttcctcaatttcagagcctgttattggtctattcagggattcaacttcttcctggtttagtcttgggatggtgaatgtgtccaggaatttatccatttcttctagattttctagtttatttgtgtagaggtrtttatagtattctctgatagtgtttgtatttctgtgggataggtgttgatatcccctttatcatttttytattgcatctatttgattcttctcttttttcttctttattagtcttgctagcgatctatcaattttgttgatcttttcaaaaaaccagctcctggattgattgatttttttgaasggttttttgtgtctgtatctccttcagttctgctctgatcttagttatttcttgccttctgctagcttttgaatgtgtttgctcttgcttctcaagttcttttaattgtgatgttaaggtgttgattttagatctttcctgctttctcttgtgggcatttagtgctatacattgccctctacacactgctttaaatgtgtcccagagattctggtatgttgtgtgtttgttctcattggtttcaaagaacatctttattyctgccttcattttgttatgtacccagtagtcattcaggagcaggttgttcagtttccatgtagttgagcggttttgagtgagtttcttaatcctgagttctagtttgattgcactgtggtctgagagacagtttgttataatttctgttcttttacatttgctgaggagtgctttacttccaactctgtggtcaattttggaatatgtgtgatgtggtgctgagaagaatgtatattctgtagatttggggtggagagttctgtagatgtctattaggtctgcttggtgcagagctgagttcaattcctggatatccttgttaactttctgtcttgttgatctgtctaatgttgacagtggggtgttaaagtctcccattattattgtgtgagagtctaagtctctttgtatttctcaaaggacttgctttatgaatcagggtgctcctgtattgggtgcatatatatttaagatagttagctcttcttgttgaattgatccctttaccattatgtaatggccttctttgtctcttttgatctttgttggtttaaaggctgttttatcagagactaggatggcaacccctgcttttttttgttttccatttgcttggtagatctttctccatccctttattttgagcctatgtgtgtctctgcacgtgagatgggtctcctcaataaagcacactgatggctcttgactctttatccagtttgccagtctgtgtcttttaattggagcatttagcccatttacatttaatgttaatattgttacatgtgaatttgatcctgtcattatgatgttagctggttattttgctcgttagttgatgcagtttcttcctagccttgatggtctttacaatttggcatgtttttgcagtggctggtactgattgttccttttcatgtttagtgcttccttgaggagctcttgtaaggcaggcctggtggtgacaaaatctctcagcattgttttgtctgtaaagtattttatttctccttcacttatgaagcttagtttggctggatatgaaattctgggttgaaaattcttttctttaagattgttgaatattggcccccactctcttctggcttgtagagtttctgctgagagatccgctgttagtctgatgggcttacctttrtgggtaacccaacctttctctctggctgcccttaactttttttccttcctttcagcttttgtgaatctgacaattatgtgtcttggagttgctcttctcgaggagtatctttgtggcattctctgtatttcctgaatttgaatgttggcctgccttgctatgttggggaagttctcctggataatatcctgcagagtgttttccaacttggttccattctccctgtcactttcaggtacaccaatcagacatagatttggtcttttcacatagtccgatagttcttggaggcttcgttcgtttctttttactcttttttctctaaacttctcttctcacttcattttatttatttaatcttcaatcactgataccctttcttccacttgatcaaattgggtactgaagcttgtgcatgtgtcgcgtacttctcgtgccatggttttcagctccattaggtcatttaaggacttctctacaccgtttattctagttagccattcatctaatcttttttcaaggtttttagcttccttgcratgggtttgaacatcctcctttagctcagagaagtttgttgttaccgatcgtctgaagccttcttctctcaacttgtcaaagtcattctccatccagctttgttccgttgctagtgaggagctacatttctttggaggagaaaaggtgctctgatttttagaattttcagcttttctgctctggtttatccccatctttgtggttttatctacctttggtctttgatgatggtgatgtactgatggggttttggtgtggatgtgctttctgtttgttagttttccttctaacagtcaggaccctcagctgcaggtctgttggagtttgctggaggtccactccagaccctgtttgcctgggtatcaccagcggaggctgcagaacagcaaatattgcagaagggcaaatgttgttgcctgatccttcctctagaagcttcgtctcagaggggcacccagctgtatgaggtgtcagtgggcccctactgggaggtgtctcccagttaggctacttgggggtcagggacccactagaggaggcagtctgtccgttctcagatctcaaactccatgctggttgaaccactactctcttcaaacccrtcagacaaggaggtttaagtctgcagaagtttctgctcccttttgttcagctatgccctgcccccagaggtggagtctgcagagacaggcaggcctccttgagctgtggtgggctccatccagttcgagcttcctggctgctttgtttacctactgaagcctcggcaatggcagatgcccctccctcagcctcgctgctgccttgcagtttgatctcagactgctgtgctaacaatgagtgaggctctgtgggtgtgggaccctcggagccatgcacgggatataatctcctggtgtgccgtttgctaagaccattggaaaagcacattattagggtcagagtatcccgattttccaggtaccttctgtcacggcttcctttgctaggagaggcacatttgttctcaaagagtaattccagcatcagcatcatccaagaacttgttagaaatgcacattctcaggcccttcccagaactactggaccagaaactccacacgtgggtccagcaatcagtgttttaattagctcaccaggtgattctgatgtgcacttaagtttgataaccgcttgtctagtgtaaggatattgttacatttttaacatcttttttgagatacaattcacatgtacttaccagactataacacccacccatttaaagtgttttgtgtagactgtagaatgtgatgtttcagaagaaaatagagattatgtgattacttataactttgccttacaacaatgttgtaacaaggatttagtcttgaaggttgaattattatattacatagacattgttcataattagaaattaattctaaatcatggggcattatttggggttgaaataagtctattttcagaaaattatacatttgatawtcatgtgatcatgagactcttcccagagagggtggtgctctacactcttgggggaaaggaatgctaatatcatgaagcttcccaaaaatccaagagaactgggttcagatagyttccagatagctgaacacatgaaggttcctggagggcagtgcacccagggagtgcatggaagctccgtatcccttcccttatacctcaccccacacatctcttcatctgtattatttgtaatacctttataataaactagtgaacatattatagggtacaatgcagtagtttttagtatattgacagagttgtacacctatcactacaataattttagtacctgttcagcactcctaaatgaaaccccatttccattaccagtgtctccccaaatgccatccccccagcccttggaaaccactaggtttgcctcatctggacattgcatataaatagatttatacaattcrtggtcttttgtgaatgctctctttcatttagcataacattttccaggtgcatccatgttgtcagacawtttttattcctctgtaaagttccctctttgtgagtattctgtgcagtcattcccagagtattaacattcagctaatgaatgattccctacaacaaaacaggggcatatgtgcatatgtgtttgtctggggtggggcgatgtgtgattgtatttgtacatgtgggctttaattttgtagtttcctttttgtagagactactaaaaagctcagggccaattttgtgattcatctacttcaratgtatagcattctttaataggctttcactatgtatgtgtgtgtgtgtgtgtgtgtgtgttggcctcattcttaactccattttatgacattactcttgcacttactgtttctttctcactttttattcctgatatcttactgaatttgatgtatcaatgtaaactgccttaaattctttttgaaacatggcagggtgtaaatacttaaataacaataaaatcacataaactattcactatatcctatactcaagactcttcctaaatttactcttagcagccttcaatacaagctgaaaatactaaattttttmaaactgcaaaatatctgttttcttacatctgaatttgtgtgttttcaaaatgatgtctgttttctcaactatttgagaaaatygtgccattatatttattatatgctttagagttttcaaatcactttgactgttcttttgtttttgaaaatagaaatacaatagttgtcatcttttgttcagttttgtttcataatttaattttataacataaattcacagaattttataacactaatagttttatttgattttgtgctaaagattttttctattgaagaaaatagactagaacaaaagtgagaaaaagacatattagagctgtcaagatatattatttttgccagaaaaaaagggaaaaatgccttccacttcacaagaatgaaccaattttatagcagctgctcttgaaatagatttattgaaaactcctagtatctgtagttgccattaaaaaaaatctttcatataacaaacatctcatatgcatatgttcaaggtacatactgttaagtattacttggtcataaagttaaatggcaaccgagaccactgtgtagacctaccatgggttcagcttgaccacatgagaaacatctggttgacagactgtggaagcccacattccaacaagcatttgatgagtttcatctttttttcctctgtggtttgactacatacatacaattttattgtgtatgttaataacttaaaagctgctaatgtatcatgtggttcctgaacagagaattgagctgatttttgatacactaaataataaaagatttgatgtttcagaagaaaatagccattataactttgctgtacaacaatgttgtagcaaggatttagtcttgaaggttgaattattatagtacacagaaattgtacataattagaaattaattctaaatcatgggacattatttggggttgaaataagtctattttcagaaaattatacatttgatattcatgtagtcagttataaccttccattatgcaatccttaaagttagtttataaattaaaatttcaccacagaggttatgatttcagaccataatggaaagtggaaactctgttgcatttctatttatggcaaggtaaaagaaagtcacatttctttgcagtatgctttatttagttttttcataaatatttttatgggtattttgctatctttgcccacatcccctgaataacaaaagtacactaataaccttggcactagtgctaagatkaaaggaagatgaaaaatatcccattttttaaaaagccttagggattttaggatgtcagcatactagtactagggaaaataaatttatgtgtatatatttttaaaattttgagctcaattttaaatttagtagttgccctttgaatagctttatctccaaccaaatgttaaaatggtattagcatgttttgtcaatatgtttctgaacatattttcttctggagtttgaaatggaagcaaaatttcaatttaatttatcacagtcaaggaaaaaacaaactaaaagagtcttggaagaatctggacttgtgtgtgtggaggactagaagagaaaaagaagctttttaattcatttagggtctgacgaggtaaaaagcatgtgtgaacttccctctctaattctcatggcttgggctcctgggcagggtggatagtatgggtcttcagtcaggcagggcattcttttccctacaaaggtaggctttctgttcaggcagatcatgtggactgtttccaccagcagctaagaaagaaagttgctacaaggtaagtagtcagcactcctcatagatattgacttctcctctaaggaaaatgctcagcaatctgatatttttgccacatccctgcaaaaaataaatgttgaatcaacattcttacatataaaagaaggctttggcatctttatccttgtatagctttatgtctccattggaaccaataaatctaaattcaaggttcagtatttcaacgttaaacaaaaattatattgaagtgcctacgaaagtgtagttaacatatttccccatttcttttggaatatgtacctgaggtctatacatatgtgtttctgttggatcagtgttgaaaggcaaactaggtatcttctggtccagaacttcacagtgtcttatgttaaggagtatattcatctaaaaaagtttttttgtgtttgtttgtctgtttgtttgtttgtttgtttgtttgtttgtttgtttttgcggggggacggagtcttgctgtgtcatccaggctggagtgcagtggtgccatcttggctcactgcaacctccgcctcccaggttcaagtgattctcctgcctcagccccccaagtagctgggactacaggtgcgcaccgccatgcccagctaatttttgtatttttaatagagacaggatttcaccatgttgaccagtatgatcttgatctcttgacctcaggtgatccacccgcctcagcctcccaaagtgctgctgggattacaggcatgagccaccacacccagcctaataaagtaattattttttaatctggatattgttctttatactagcccttcagttgagttttgtggtagatttttcaactgaagactctgcaccttgaatctaatatgaaagctctgtgattctccctggtatgatggtgtgatggtgtggtgctgtgatgatggtgtggtgctgtgatgatgatgtggtggtgtaatagtgtgatggtgggcaagagcagacacactggatgccgtaggatgttcccttggtgcgcctgaactgattccactgcaaggagatatgcttttctgagtactttatacagaattactagagcaagcttagatctctgtgtttgaggaaatagtctaactaaagtcatttcaaagaatcacttttgtttgacaaaatgaatttagcatacttgcaagacttgtgatccaaataaagtaactgaaattgaagagtaaattggaatgaattttttcatattacttttacttgctttggagaccaaagttacagatatatatatatatatatgtgtgtgtgtgtgtgtgtgtgtgtgtacatatatatatgtatatatgtacatatatgcatttatatatgacattttatattttctatattaatatatcatgctatatattgtatttagaacatacaatatataaaaattmtttaaatgctttttgcttaaatctaatttgatcatgtttataaacctcattttcattcaaatgacccaatcgttgtgactcctgagatatatgtgtattcttatgctatcttttcagccactaaatttaatattaattttaaaattccaacatttgtgtatctcattaaaataagacaaattgagaaaagaataggtgtaaattaactgttcccaaatatgtcagactatatactttgctttttattttcatggggtaataaaatgtcacaagtttttggtaacagaataaaatgtttgtttacacattaattgttattctcttaaaagtcaattttcaaactccttcatttctatgtacttgtaactttttttgctaatggtattttaagactgcagcatttggaaaggaccttggagattacctagtgaccctgccaagtaaggcagggattctttttacaacatcrctgacagattgtcagctaacctttacttgcacatgtayggtagcagggagtttgctactttgggtatcaacccattccatttttggacagctatatgatttataaaacttatcttcttgttaagctgaaatctgttaacccataacttccaattattgatccattcacctgcctggatcaaccatcaccttccttaggtcagcctgtcaaatattggaatacrgtttctgtgttctgcttaatttttaaactccctttaagatgtgaaagtcggtccaactcctgctcttcctgaaagatattgctaccatttctcaatgcagtcttcattttaatactctttataagtaattacgagcaaaatcaaataccatgttctaaattyaatatgaagaacacagagtaaaataaggcaaatgtctgcctgttttccctttttccttccagttgtacagtgcttactaagtatcaagcacttttctaactactttacagatattaattgctctaattctaatgcctgagaccccttggccagggtaggtggtatggactccagacaggcagggtgttatctgtgaattaaatcttctaacttgtggattaactccatggatttttaacctacggattaagtcttaaaatcaagaaacagccacagasgggttaaaagacatgcaaaaggccttacagctaagacgtggtggaaccaggccctcttactctgagtcctagtttccaagagcctaggctgataaatttacattcatttctttattcctggatccataaaatgcatgacctttttaaaggaactttgtctcactgtgtaataaatttaaaactgtagtcctttgtggtatatattgtcatctagcaaggtttctcctgagtttttctggggtacttgatactgtacaatgaaatataaatgaatacatttttattctaattggctctaggcatcaagtaagaatggtggcctaaatgagcattatatatttcctgtgctttaagaaatggggctgagttttttggtaggatatacttatacccaatgatagctaattaataaatggttttgggctctgcaaccaaacacttatagaaataagtaaataaatttttaaagtagaaatcccatgggrcagtttcactgggcagggtgagattcctgcattgaaaaatcgtkaaaggtgcaaaaccaaaaatcagtcacgtatgtatagcaagtagccattctataactaatttgtggttaattcttgagttaagccagaccacaaaatcttgactaaaatcttgaagtaggtaatttaacttggttcaaattcacttgagtttcctactaagtagcacgatgctgtcaaagggaacagaayaccagtaaatagttgtagttacccagaaccagcttgtcttcaagaagatccacccagagtacagaattggaaagtgaactggcatgtcagtcctgagctagctatatgttatgccatcggtagaatggagccatgtctcaagggtctacctactgccccaaaatgctttagagcctatgtaggctgaccttggttgatttagttgactatgagttgcttcttccaaaaatatgttattttattctgggttattattccactaggccagaatccatataccataaggagtataaggttctggacactctcttttatcaaacaagtaagcaatttttgagtgcatattatttaccaagcacartgctttgcattgaagatgcatatatgaatatgttgtgttccttctcatgaaaaacctcagaatctactgagagagaatcacayacagatacatgatgatagattaagtcttttagggtattaagtacgaactacttaatggaaacagaatttctgcttttggaaacagaaataagggagtgattaggcaagtaggaggcstaagaaaagtatggggcactgtcaggggctacagggagaaagtgaactttaagctggtattattaccggataggtaagtttaagaaagaacaccctccacccacaggagacattgatgattcttatttttgaaaagttattgcttactctagaaatgtcaccatgttttgctagatgcctatgactgggwtgtattgacaataaatattaaaagtcgattactttatcaagttatgttctctgacaaagtaatgaccttaagaaaaactagaaaagtgactaaatatccaggtttataagcccttatctcctccacaaacatattgattgggtttttaggtgatttctgacctgcctgcacttttctgctttatagtttatcagatggcagcaggcaagactatatttgggtgagaaatctgtaaaacgaaaacataatctttctcattattttcaattttagttgtgaccacctctcaattgttgtaaacacyatcactgttcaacccaatctcaatcctttattcttagaaatagggaaaactgtattagaactagacatcttacaacagataataagttgattttgtccaagaatcctcctcaataggtttttaatattggattaaaaattggcagtgacatttaaaatattacttctgaaaagtagaatttttagtttcctattttgtttttaraagtcttgaacccttcccatttctgagtatttcataagtgttaaatggtatatgagagtggtatatgaattctgcagtgccttaaacgtaatattgaactggagagcgtgtggtctcttgtactactgtrtgcttttggaatagacaacagaggacctgaaattgcttcctcaaagttactttcagggaaaaagaaaaaatcaagcacaatctgagaaataatggcacagtaatattgtgctgtgtattttaaaacgatttttgaaaatgaggagctgtttttatttgagtgagtccaagacaccagaattagtcctcaatttcaaggctttataataatatgatctgatgaaaatgtcaaatcagtataaaatatcaaataatgattaccctcaatttaaatattgtgatcataagcttctgaaatttactaagatataatgtatttatttatggagtaactaggatttgcatggcccaaatacaggatactgttagagagaacagcacttagttcccctagaggatcttgacttgtatggtatttttacatatgattctttagtatatggcacattaggtagataaaatatgttctttgccctaagctaactccggtatagtaggggaggcaagaaatacaaaatggcgaaaatgcaaggctacatgctgtgaatgccatctggttgaatccagaaagtgcaatacatgctcacaggaggaagctgacaccctatgatgctttctttgcctgaagcatttgagttgggtcttaaggaatagtagatatagctatatagatagataaaatttttgctaaattgtaggcactgtagattctagaaatgtttaataagcagaatgggcactacacaaagaggtaacggatatgcagaaagttttaaggagtaaaaaagcaaattttgatataattttascatgaatagttcaagaaaatagaatagtaccagttctggattttgtgccttcattgtttgcctgtgaatatgtgagaatatccataatctttatacacaggcaaatkagaaataggctaaactatttcttgtttagcctgtaggtctttgttaatgttcataccaataccagctgacctcttaatttcaagtccaacactgggagtgtatatgtcaaactatcttttaaaatacctacttagaatttatctttttttaatcataartgaamatagataaattcagctttattctcgcattccatcactaaccaatactgaggaggaagaataacaaaaattatgttaagaggcagccaataargaacttgattatasgttacgtttctgtaactttagagtgaaataaacagataaaatactgcagaaaggaaaggcttatgagtgattttttaacatactattaaaatggaatatttattgttacaaaagatcatgtgaaatrtgctactacatttcctaatttttgatttgtgtgatgagatatttatatgttcccatcttctcccaatgctcccaatgtaattacttccatggtgcctrtctttctggaatatgtgtacgctgccatcacaaacagtaycatactctaaaatttaaaagaaaacttgtctccttagcatttagcacaaatgacctctcaaccatgtgtggttcacagatgaagggtgaaaactcgctaatcagagccttcagagttcccaagcaaccaggacaagagacaaggtatatttgagttgtaaaatgcagctcaaaagttggtgtctccctaatttactcttttcactagtattgctcagattcccgaaggcaactagaggacagtagacctcyaagytaatgaatgtaccctattatcaccatggacatcaagtattaatgttatcaacactttgtagatttagattttccattttagcacttgaggctgttcatttccttgtaaaatatgtgtgtgtttttaggcttagctgcttccagatattttcggcactttgttaccaaccaaaacatctgacaagtagcttctttctgaggcctcaatcttatgttgttctgggaatcaaaagtccttgaggctgacttttttcatgttcctatcacttacttcattagtgagattaaatgtttccaggtaccacaacaccttgttatatttatatagcctctgttacataaaccaatgtgcctaattccctaatcaaaggtttccctgaaagtttagcattcagaaaagggagacaactgaatatcttatcttctgtagcttgaattcctttttaagtcagatttacttaaggtagcaatgtttagagagttcaagcctctctcacataaaagaaaatatttcaaactcagcctattcaaatactaatttcttttgtttttgctgtcttggtttggttaaagcaggggttcccaaccccctggtatcaggtctgtggcctgttaagaaccaggtcacacagcaggaggtgaacagtgggtgagccagcaaagcttcatctgtatttacagccacaatctgagctctgccttccgtcagatcaacacagacgttcgattctcataggaactcaaaccctattacaaactgcacatgcgaggaatctaggctacgtgctccttatgaaaatctaatgcctgatgatctgtcactgtctcccatcacccccagatgtgaccatctagttgcaggaaaacaagctcagggctgtcactgattccacattgtggtgagttgtataattattttattatatatcacaaygtaatagaaataaagtacacaataaatgtaatacacttgaatcatccctaaaccatcgcccccacccccaggtcagtggaaaaatggtcttccatgaaaccagttcctggtgccaaaaagtgtggggactgctgtgttaaaggatccttctaatattccatgaacacaattttctgtacaaaaaaaaaasatttagtagaaaattaaataagattatataatgttgaacaaatgctatttaaaacacttaagatttaaccactttatgattacttatcctgatgccctaggatatgacatagctatcaaagtcctttgagttaactcaaacatctgcttaatttcacttttgtastawttttaagaatgtaatgaaagttatctaattttaaagtgcatataagaatcagataaacaataggaaawaacttccctatttgacaatgacctgctttactttatgaattggggatagatgattatatttaccatagcttattctgcgtaagtttgaagtccatctgtacctcagattcatgtgaatcactataaatgacaagaatgagttcagtgtttccatctcttttcaggtggtgcatgttagaaatcagtgattatcattattaattaataaaccattaatagtrktttatttaaccatcaaactttaatgtatcacactattgaaaagcgtgttcttggttgttttctccatgccratcagttccatagttagtattactttggaattataagtgcacaaagtaggtccacaaaaaaattattaaaatagtgacttaacatcaggaatcttgaagtttcaaactagtaagtaagtggagtctaacatacacacatgcacacacaaacatatacacatgtayatacctggccactcttatctyttagtaggcaatctttagtgaatgattatagttgaaattgactgattttaaagcagccaygcaagctgagtggaacacatcattctgaataagttaacagatatagagactttcatctattcttctcttacagacagtacataataaagattaactgtcccttatgtgtattgttatctccatctcccaaatactcgatgcccaacaatgccattagctgtcagtggatgtatttaagcatgatataggaatcttttgtgactatccagtctcctataagcatagcactrgtcttagcaattgatcagaaaatattmaaataaatgttgtagatccagtccagtcaatcagatacccacaattaagtcagttcacaagaaaaaaaaaatgggaccctctggactgtctttggaattatctcacttttatattattgtgtgtgtgtatgtggtgaactatctgaaatgctgttttcagctccaatggcaatcattctccctatcaccatgaagcatctttttctaagcagcacaataaggataacaaaacccatttcagtctcaatttaagtttaattcccaggtggaacttgaaatgaggctgtaatgaacttgaacttgcagcagcgattatctcatacatgcacataaaagtgttcagatacagtagtggtgtttccagatgctaaagtcacttcttcagaaacaggttaaaaaaaaaaaawagggtgttgtggttgggcatattgttgcattgagcgtggggcagccagccaggttttgttttattttactttatacttaacagaggttgacagagcagcatacagtatgatcagagaattttttaaatgacctgtataaaaatatttccttcagaagtttccgagtgaatgtataaaacagcaatgttatccaaagacaatacatgaaggtgagggtcgattagaattataaaataaaaaacagagcagatctccccagtgtcctaagaattgcctaaaaccatttgggcttttaagaaaatgaactcgttcctttagctgtcctattttattctaaaacactaaattatattttgtgagcaagaatgatatattcaagtgcaaatagcttaggcctgaagtggattagagaatggtcactggagtctatgtcaccgataaaaatcagcccaagaaatcaaggaatacctgaatcggggttcttattgtaacattcttgctttctggtagaggttagcaattagcaccttactaccctcccacaattttctaggtctaggttatcrttcatggtttcttggagaaaaattgggagattcaggttaatattgagtgaaacactccggcatatctaaagtaaagtattttctgagaaagtgggccatgaggccatgactacaggtacaattktaacttttatctgtgtggaaatgtggtagccatacttgggacctaggactaagtcaggatgacaatttttcccagcagaacaatgatactagtaccaatatcaccagtgtttataaaatacatgtttcctttctgttaatgatacaatgttaccatccacttaatgtttttggtagatccagcctcaccaccatctctcttcaggttctctctcctcattgccttctggaagccttgcctttgtgttagctttccaaattcrtatttcaaaatacatatctgatctgtgtaccagctgcttragarcagttcagtggcctgtcacatggttctccatctccctctcctttcccttctccacaatttttgtcctcccagccaaccctccaggtccttgaagtcactgtccttttcacaygcagtccctgttggccgtgtcctttccccttctctgcctaataaactccsacatctctgtgaagtctctcccagacaatacctcttctgtggtggttcattgttcctttgtctatgcttgaatgtcactgtacagacattcatcatgagattgatgttttaatattgatttgggtatcatttccccctttagtctttgagccctgaaggctggaactttatctttcaggcatctagtacagtgcctggtacatgatgaatgaagagttagaaattaagaggtagaattcgacaagcaaatatagaattgctgaagtagaatagactgtgggcttatagagagtacctaggccaattgtcccaaataccattttagtaagtcaagtttaagtaagtacacaccactagtcagtgagagcaccaagctcagaactcacttccccagkgtgtcctgctactgttcttttctttgcataaatatggttcccatttgccaaatcccatcatttttaatgcccaaatgggaaaaaaggcttacatctcatcaacaaagttcttacccttgttaaaaagctctaaaatgactatacaaaaatctgggggaaattatttgtacatgtcttgtctgttggaaatgctttatgtctgtaagtgtttccaaaagtgtaatatacaatacttatttagcacagcaaaattgatgtcatgttttttagaaatacatctgaagaataataaacacggtttaacacaaaagaatatgggttatacttcaggtagcaatttttgggcaaattttaagtaattcttagggaataaataagctagtttaataaaaagagcaatagcatttctctttagaaatcattaggcatgttaatttattctacatctaatctctttaattttcattatctaatttataatacatggagtatttaaagttattaaaggtataaatatttggacaatttgtgaggtcattttgtaaatagttgaaaggtatttaaatataatggtagtctgataaaaatagtttattcttgatcaaaaaagacctgagtgttggttctaaggaagtcagaacattttatttcagtctaatgtgtcattttatactttttgcaaagtaaaaccatcaaagaaaaatgaagagatgagaacggtgttattacctttacttataactataaggaatccacattgctttcttgtaatgagaggttctggacccacagatttgtaggagaaccctagattttatcctttaccaagtgaaaagaaactgaaacatttatttaggttaaaaatcaaaacaaaatgatatctaaatgtatgcacacaagaataatacactttcgtaagaattatttagacagttgaattaattttctacttagctttgtgacccatcacgattgtggtatgtggatatcaatttaggtaaatggtttattttctaattagttggtggctttaaatgtcttttaaaacccttgtagagcaacgctgatgttaaatgtgtgtaccaagagaaaattatttttaatctatatctccttcgaatatcacaacatacattatatgtaagacttttttatgtatttacagtaaagtgaataaaaaatagatgtacatttcaaaaacataattataaagcaaaaaccgatgaaaccaccacccaagtccaagaaatagcatgttgctagctcccagaagtctcacttagatattaaagtcttaggaaaactctaccataaaagaacttaacttttgttaacccagcatctagtattctataacaatacttacggaatactgtataggaaagtctgtcttagaaaactaggcaatttaagcactatgaattttagccagtagatgataaagtaaaggtattatgttcaaaacaatgtttaatgaaagtattcaatgtgttcttggctgtagtatctttttgaggattaatgttcttttataaatatgtgcttgtttgtggaggaatagagggagaagagagaaacctatatatttattttaacttatacaaatatgcaacttctctagtttacatatctcaacacagaggaacatgtattatactcaatcaggtagcaatttctagagaaattttaaaaaattcctagggaataaataartttggaagtcattatgtatgttaataatttattctgcagataatctctttaataattatctgtatgtaattaaatctatgggttcctcatcagctgatgggtggttggttgtatctgtggacccagagggctggctgtaagagacttgagcatctccagattttgttatccatggtggtccatcctggagccaatccacctgtaggtaccaagggatgatggtatttaacatatgccagacatgctaaagaaagattctgtacatgttcatgtttgtttgtgtgtatacaaatttatcatccctattttaaatattacaaaacgaatatttaccaaagtatagctcatctaaatagcacaggtaggaagagaataagcccgattcagacctaggattgtctgagtccccactaaataagcactacattataagcctgtatataatggagttgagaatcccataatatatatagaatcactatgtgctgtgtacagtgctatctactgaaaatttctaaaaacctgatatttatagaattataagaatccactagctaataatcttttttgtttttaattattcttttcattgaaatacttcttattagaaaaatgttaaagtaatgaggcagctaattcttcttttaccagaatgacatccttttggttacaatcccctaaaacaaaaggataagaaacctggtaaattttagctacagatttctacataagcatgttttagataactattagattaagtttggaatctcatttgtactaagtcaattcttccctatcccctagccaacttcttggcagcagttttcagtgaattatttgcttgtatttagaaaaaatgaattcaaaaaataaaataaaactatttgagccatgtgatgcgggagcctaacaatagtaattaattcatcacctgatgaaaagtcataaaatcagcttccaacatcatcaatggtattttacgtggataagaacataggcctttagttgattgttttgtgattttgagtaatgagatatggtgtctgaattgcctttcatatttctttctactttgtattttaatgtatcttacaaattgccatttattaattttgtcacaaaatgaatttctgcttattgatagattcatctttctggaaagaaatacatttagtgcccaccacataatgacaaaactcacattttagtcaagtgtatctattgtaccaagtcttgagtaccaatcatagattatatggttagttttatttcttatatttcttcattctttttttcttcctacagaatttgacatacacaacatatacttcttgatgcagtcacaactacttattattgttgcttttttaaatctattttcttcctatccctttacagttttacttccaaaccaccagtccgcttaacctatacagtcatagataactacttgcttgtcaaagccattgatgtaaaaaacaaccttatttgtattagatttctatttctcagcttgagtcataaatagacctctttaaggaaaagtaattattacataacttctttcaggcataaattttctttattatgtttcttgtagatatacaaacayaaaaccagacataaacttcctatgtctttagttttcatgcaactataagccaaaacaaatgtacaaatttacatagaacaaaaccaacaaactttgaactagcagaattcatatactttgacatgatactcttttgctgaaagtaaaatacatgtaacaacaggtcagattgcctgttttctgtgctatatgatgataggattcttccattacattcttccattacattttttttaattactgtaaaaatgctttctggtaacgtgtgctataatgttggtttgctggccaaaacttccaaaacttcatgagtgcagtaagccagcttctcttattctgtcactgcccatggtgatagcatctcaaagttgttgacaatgtaattrtaaacaatgatgtaagtcttaattactagtctgttgcccaaaattctgccatttcttccccctcgatgtgtcctttggcattgatatgttctgccaccctggtcctattttatttgcctcacaccttgattatttcaatattctttgcaataatctcactggcttttctgcttccaactgctctgcttcaatctaccatgcacagtattttcaagctaatattttaaatccaagtatatcatgtataatactatgatcttgcaatagcttttctttaaccagctctcaagctgcttttgcctctgctggttgcccacctcatctgctcatccctttatcagagcacacctctctgttgctctcccccacttatcgttcamccttagttcacataaatacctgccccctccaactcatatagcaaacatgtaacacacaaacataacaaacccttgcctctctttatttctttttctctcttttttaatgttgtcatctttcaccagatgcccttcttccatccttccatgtaaatccttctgggacaataggtatgaactggggacatcacaagtcaccctaagcctaagcccactctgataactgtttaggttcagaacatatatttcatttacagagaatactacctattactctccaattatgctgagtgttgagctgtcctacatattctgtaaggccatgtgtgcaagtactataatctgcagtttctcgtgcaatggagaatgtaggaaaaaagtatagcacagttgttaagagcacagacttaggtgtcagaaggaactggattcaaattctatatctctacttcatgttaccagtgagagtttggacatagtacctaatatctctgagttttccaatttgcagaatggatctttgtacctacctcacaggagtggtatgaaagctaaaggtgaccactggggtgaggtgatcagcatttgtgaaatagtcagtgcttaatacataggaacttttatgattgactttttatgaatttagttgatgcttttgaataagtgttaatttcctttcttctttatcctggaattcttagtggcttataagttggtgcaacagcagccacagtggcaggttgagaaaggctaatttcatcccataattatctaggaaaaggaaggaaaataccatggggattgctgggaaatagagagatttttgtttcmtatctgtgctatctttctttgtctctgctcccttgcaatccctgggagtatttctgcacaggaatgtctcaagatatataaaacctgaaaagtatgaaaccaactctttcctctctgttacagatgggggatgagaggagagattctgctttattttgtgggagccgaagagtatcattaatctaattgttctgcacataatctctactctacaccccatggagtactaatgagatctcggtccttctctggaggcctctgctttctcatctgaaaaatgaaggggttggaccaggtgatctctaagggtsccttctaaatttaacagtctgagttgaagaaaagctttgagcaatttagcagaagcctaaacaaaaaagtcagggaaaaaataccctttttccaagctctgtgtcttcgtgtcttattcaattgaacagaatagtcgatataaaatgtcatttctgactgatgtgcaacaaagcacaaaccaaatggatagaaaaaaactgtggtgcccttagaattctcttggctctcctagaataaaactactgaaacactctttatttctatcaaaaaagttaactctgagcaaattaccactgttggctccaagtgatattttgtactctccctaatagccatcttcttgacaaacaacacagccatttcaagcattattgcagagaatcgttgcaagtgtcagaaatgatggctctgttagacccagtctgattatctgcttcagtgtagttataaaaagagagagagagaggagaaaggaaaaaaatgtatctgagataaaatactgtctcctcagtcttggagtttttaattgctgcctctgtctataagccttrtaaggtgagctctctaagatactaattcactcactcccatctttttaatacatggtgtctcgttcatttcctcctcttgctttactccagacctttatgacttttcactgggaccactgcagtagtcacttaattcccttttctccagtcctttatcttccaatctactttccacattcccatcaaagagtagtttcctaaagttcaaaaatagtcatgtccctccccagtacatacagagtaattttaaaattacctagaatttaggggcctctgccatttcaggatccatcagcttttcctaccttattccctcctctttcttttcactctagcctctactcagtttggattattcacagtccctgcatatgtctttagtttttcctaatacctttgttcatgctgttctttccttctcctgagttgattacccgcctccttcaactgtactacattcatacatcttttaggcaccaatttggctttcacaagaacccttggagatgcccatgaatccccaaggccaagctaatccctttctcctctgggccagcacttacttctggtgctctcatcactcactgtcttcgattgtagttgattttagttttaacaaaggtctaaagcatcgtatatgctcaacaaatattgttcctaaaattcaattggcattccaggtcatcttgtcaaacttgttccttagcttataataaaactttaagttgctataaataacactttttcttattatgcaatagttatgactagagcccagatytggaaaggtaggggagcagagtagtttggcccttctcaaagtttgttttgtagaatattggtttacacattttttttattaccaataaaaaaagttgcagggtgaagtgttgaaaatgctccttcttttgctcaccccctcaaaaaaggctttcccagatcaatttattgaaaaaaagtcctcaccgctcgctgctttcaagccctttgcactcatatttttcctcagggcttattacctaaaataaaatgtatatttgtttgcttacggtctgcctttttgactagaatataagtttcatgaaaataggaaatttatctcctttacttttgtatccaggttacttaaaagcctagcacaatgcagatgcttaattaatatctcttgactaaaaaagtaaattagaaattctgtatgagttttctaacccagcatttcccaacttatttaattacacacattttgggaaatattccatgaagctgtattccctattcttagatgagctgagaggtaaaggtcaaaaatggaaagagattaataaagattcacagccaagtctctgtaacttacagtgggacagtaccaattttaaaaaagaaaaatgctcaatattagaaaaacaagaggaagtagccatctggaaactagatggacctctttattaactctaagtagatactgaagttctggaaagccacttgtaaggctttcccaatgaccataatcagaaatagtatgttggatacaaaatctagttcccggtaattaaaaattttagttattagaaattaaaaggccagtacaaaggcattgtggcataatcgttttgacagtcactggtgttaataaaatgttcctaattagtagcgttgtgtttgtttgtgtatatgttcattggaaggctttaaaccaaattaccatgtgaagaagggatcagttcaggagatgtatacactgcattaacatttatataggtatgtacattcttgagattttcataacattgggctttaaaattatatgcaaagatgctacttcaaacacacttagcagcacaggtgttctaatwtattttgacattaattgttaggtgctcagaaattcaattttggctktattttcttactaaagggctgagaatatattgcaaaaatttctgattgtgtcacaaaatggaaaagtgaattttctaactgggttactttcctacgttccctgcatcctgttcctaaacacctttctcttcagtttcatgttcagatgaatgagagaatgctttgtggttgtggactctgactaaggactttttgataatcagtgaaacttatctattgtatggctaatatctaaccctgaaataacttttgttctcctgagaaacaacgacaaaaagatgatgaaatattccatattattcttggatcttccctacttacccctttctctgtgcctccaagcatcctcatttcatatatcttaaaacrgttccatcaatcctattggctgggtgaggttctgtgtgtttttttttctttcactatcagtgctctgaacacagtagtttccataggatagaatgctgccttccatttcttcattcatcagctgcttgtaacctaatccctrttcctaaaattcgactgaaagtcacaggctacaaatcacaaaatcatggaatctggtgacctcgtttcctttgtagcctccttgctccaactgcagcatttgacacatacttacttacacagtaagtctttgaatctgtgactgttttctatgtcactccttactatctgccttcttctctagccatacaaatgtaagcattcccccagttttgccctccacccttgtctgtgtgatgtattctctacgtggatgattccatctaattaatctacttcttgcatgaaatataaggaatagatccatggcatagatcctctccaaacctccctttttattatctatatctaactaacgtcatacatcaaacttagcatgtttaaatataatgtattttttctaaaacctgaaaataactttttwaattttttctctttctgatcttctatctaaaatcttaattgtcttctacttttaaattacttctgttttagaatctgtatcttcctagtctttcctcttcattctccagttcaagctctcactatttcttgcctttactattgtagtagcctactaattggtctccatgtccctagtttattcaactcttgtccctcagtcctggctcaagccaccctacttattcatgctaggtgccatcctacaacacagctaatcccamcactttgctgctcataagtcttcagtgtttgcccaccctacatctagagaatgatgtctgtgtttgtcatcaaccacaaacatttacaacatagcctcatctcattttactgaatttcttacagcaaatgtttattttagaaaatgtataaaatagataagaaacagaaaatatcctagcatttaattttcctttcattttttttttgcctcctcatcattatgaccaaagctagctgtgaatcattcccaaatacatctgccattcttctttccatggctttccatgttatttatacccctctatctcacctaatttctaatccttgaaaccctatccggccttcactatacatcacaacattctgtttctctaagaaaacttccctggtatttgaatctttgtagaagaaatgaatgatgatatatataaagcattttgagctgtaccttggaagttattcctctctggtatattttatattttgcctttttcatagtcaggtaactgctgttgttttaagccatgtacatgttattccaaaactaaaccttaagattcttaaatgtatcttattctctttcctatgatttgcatcatttccaggagctgataacataaattgtagcatcatgatgtttgcatggtagagtggaattaaagagaaaagttagttaggaaatagaagtgggaaaagaataaagatggaggaaagagagagaccctatccttttggggagatgatgaatcctctaatacttccaaggacaaaaacttcaaattgattcttttggaaggtctgacttaaaagagtgagtagaggttagtatytgagaatatacaacactggtaatggtggtgtttgatgttgagccagttcatagttmgctccatccatttcagatgcagcaaaaaagaacagaagcaagattctatcactgggaaaagttggtagcattcaaccctaatagaatcgtctgggcgcggtggctcatgcctgtaatcccagcactttgagaggccgaggtgggcgaatcacaaggtcaggagtttaagaccagcttgaccaacatggtaaaacctcatctctactaaaaatataaaaattagccagtcatgagggcgcgtgcctgtaattccagctactcaggaggctgaggcaggagaatcgcttgaacccgggaggcggaggttgcagtgagctgagatcrcrtcactgcactccagcctgggcracggagtgagactctgtctaaaaataaataaataaataaatacatacatacatacatacatacatacatacatacatacatacacacacacataaattggcagtggaaaagggggttgaaaaacttgagaaacaagtttaaaaacaagasattgtacagaaagaggctgtagataaacttcctccttgagattcaagagcttcaatctcttggtgatgagcagwtgaaaagatttccactttcctgcagttggataagcaccactgcttttttgacaagcttggctccctgtgcatagctaggatacagctgaattttgattccatggaagctcttcgggaagtatttttactatgccactagcattgtgcattggttgctttgcwatgtgtctaaatggatatattaggagttagtgaaacttaatagaggggcaagcatggtaaaagacaggaaaacagcttctgacagtaggagaacaagtgacggtagatgacaggcagtagtggagatcttgctgaatggtctgacttgctgatggatggctatggagtatagagaatacaaaagcatcaaggaggactgaggtgtttaatacagatgtctgaaagtgggtgagtgtcatttcctgtgatagaaagaaagggaagagctgatctgaggtggcagcagagtaagcaggacttaaattatgttttagccttgttacctaacatgtctgttagacagctaagtggagatkcagtacatgtgtctgtaatgcagcatcaaatgacattaaagtctggaactgtttgtttgaactaaataaaatatatgtaaaacaaaggatgctgtgctgaatcctgagrcatttcaatattagagaaaaaagagccagaactgagcaatggcaaggtactcactgtctrtgtaagaactgagatttggcacaggaagagaaacaaaagggatattattattagtagtagtagtaktatttgagatggagttttgctcttgttgcccaggctggagtgcaatgacctgatctcggctcactgcaacctccgcctcccaggttcaagtgattctcttgcctcagcctcctgagtagctgtgattacaggtgcccgccaccaagcccagctaatttttgtatttttagtagaggcggggtttcaccaggttggtcaggctggtctcaaactcctgacctcaggtgatctgcccacctcagcctcccaaagtgctgggattacaggcataagccaccgtacctrgcaaaagggatattaaattttttatttatttatttttactattgagcacgttctgagtacctttacataattctcacaataatcctatggtatggatgttaaccttctcattttaaggggaagaacttcagacttaatggagttagataatagggagatgagctaattttttttcgtgttactcatatcctaatttttttattattgatttctgctaaatttcccrggctactttcagaacttaggctataatctaaggtacatgtggacttttatttttatttgggagctaagagcagccctggagtcagactgccttctcagctaggtttcttgcttcacaagggaagccaggtgtcrtgatgaatttacctcctattctctgactagtgcttatcaagaatagaatcagaaggcttagacagtaattttacgtgttaatgtcctcttaactgggaattaaagttatcccagactccaggagaatgacaaactagagcrgtgaaacatgattgttcacattttaaagtaccttagcaacaaacacacctacagaatgtttaagacactagtctccttccttttatctgactgttattttcaagcaattaaaactaagtcatcttgttagagtttctgtacagagaaaagcataattacatggtattggaaccagaaaacgagttctagatctatatctatttacctatttctttgtagaaatcycctatttatctttctactaactaagatatgtcagatatgtatttttgttgtttcatttctttcaaaaatttttctttcaacaagcttcattgcatatytcagctcctatctarcaaagtgggtggaaagtcaatctctattattttacgctctcctccagccrcaagtcttcccttgcactgagctttgagacttttctgtatcagtcattagccactgatgtgcccatttcctatacattacggtactatcacaccttttcatttcactttatccaagcctaactcaatacaggagaatctttggggaagctgactracgaccaagggtcagccatgcatcctgcagcatcccctgctattgggctccctcaccaggcaagtgaacaacgaacaaggcttcacsctcctggacaaacactgccccttgtcttctctcctgtcactgctgtatctgtgtttgtctctccctctccttcctccctcctcttcttcccccacttctcccttctttttcttttctgtttctctttctctctctaccctaaaagatccttttattctgtattacccccccaacccrcaatggaaacttcaaattttctgtcatgaataaaggataaattaatttagttcaggcagctattgcttccagtactgctaaaattcccttgggcacacattttaaacaatagcctaaaaaagtaagaagaaaaaaaaacagcaaaataaaaattgatatatcaaaaattttccatcttacatatatttaaatacagtgatcatatcacatattagcattcttttatgcaaacaaaactaaccttaaacacttcacaagatttttttttcttggtcctttaatcatttgtgatatttctctgtagacttgatccaaatattttcctttctaaaattcaaagatcaaaactggaatcagttatttgaaatgatttaatggaagcaattatactctcaactcattatgtctctctttcatttttccttttttttttaataaagcactttttaaaatttcataccaggccactttcctaactgttcttgagttataattctggccataggtacttccgaaatttctcttcaaagcaatgtttagacatcctctgaaattattattacttagtacctggcttcttctgatgagaggatattcctattttctcggaattttataaaasaaaaacattgaactggaacaaaaggtataaaaagtgatagtgaaaaattaatacatttaaatatattcatgtagttttgtttttattttcaatattgaagttgaaaatagataagactgagcatgaacaattttagagaccaaatacaatttcagcatgctttgtattcttccaatttgcccccaactccactatttcttattgaacagtcaagtattctattagtagaaaaaatatgcatctctggagtactgcagttatgttttcataggatcaaagaatcacaggaaagtaaagatgaaagtaattttagaggtcactgaatctaatcttacaactggcaggaaaccacatctccctgcttctgagaggtagcagaaaacctgtgcttaagggatctcaatcatgaagtgaaaggaatatggttttttcattagacagacagggataaaagccctgatctgctactcaatcaaattttgaaaccattttgagcttatacraaaactaataccaaccagtacgactgcttgcagtatatgaaaaaaaatatctaaaaagacgtcgtattgcatgataggacatgatacataggcgrtctctccctacttcacacacttgcgctcctttccaaggcagcctacgccttacactacatagmatttgattatttgaaatcaacaaccacttaatcataaattttcctcttctccagtgcaatggatttttctyattctcaatgtcttcagtctttcctgatctgccaggtttcccaaaccccactatcattacctttgttaccatgctctggtatcctctagtttacaggaacccttcccttagaataccatgtcaagaaaagtacacatgtgggtagaactcacaactcccatgagtgggcattttgcttaatgttgcccaagattgctctttcttttgtagcaaacttgtccataatcattagaaacagtctatgatgttcaaagcagtgacactggcttatgtcttttgagtaatttcctgatttaggggcttttcctgtgattaacataatatattctaaattatattctgaaatacagttagaagagaagacagtttaaatggggctggggatcctatgaccacataggctatgcttacatttaggccaatgggaattatctcactcatgatattcccttattaaaattttcacaacatttaaatagttgcagtttttgaaaagtcctgaaactcgacttttaatattctaattataaatgtaatctwyggaaagtttaggtaaaataacaaattatctagagtatttcgagttatttaacttcctggacattgatctaaactgaaaatgaaaatccttctccatttcctatcagactatgatataagcaaactgtgaattagggaaactgtgttctcaagattctttactatttgttactatggaaacttaagatttttaaatttatttcctcatctagaaaaggtgtacgttcaacttgaatactttttaaagccatttttacatctgagaatctatgatcctgtgatttcttgtgccacactcacagctcttattgataccagattcattatatccatttttacacagatctgcaggatttaaatctgatacaattcaacagtctagggcctgaaacgtggtactctattaatattgatccatcagatgaatgttgagtcaaataaagctctgcaagatattggctctaaaatcctggctcgtaatttcaggatggtatacccatagcttcaaacttgaagcatgtaattaaatgtgaaatgttctcattttatcatgggaggaaatcaggttggtggtcagaaggaaagatttttcaattcagttttaattggtaattttcctttgggaagcttgaatagctatagtcaaaggaataagatatcaaatagcaaacctattaatgaataactacccagcaggagaagataggaagactgacttttatttttagaagtcagagtgatttgagagagtatctgtgatgggtgtgacttgtgatctaggatacagcatagatacttgcagaaaagaaagtgaaataagcaaatgtcatcaaatcatgcacgttggattatatttacggatatatctcctcatgtaggcagtgatgtgtttaaaagtgagacatgtcttttaacttgtttctattttaagtgactgctttgacgggtcttaaataaataaataaaaaagatcattttctatcctgcagatttaacaactgcccttaagtgtctgatcttgtcacattttcagtggaaacaacattgtgatttgcttccacggtgatggccaaaactaatgacattggaatgccagagtaccttgcaagctactgattaattatttgtcataatctcctagtgaggaagttactaatgttattacttaaaacatcccttgcattttgcacttgcagggcacttacagattcattggtggccatgaagaaatgaccatttgtactattcttagtaggaagcagtcccaaagtcacctgtgtctactctgatacagtcatggggctcaagctttaggwtctgaagcagcctcctaggccatgttgctttaaattccagctgaatataagatgattacatgtgagacayctttaatatgttattctgatttccagagatggaagttaacaacaaattaattccgttgtaaaactgcccctctacaacaaaaacaaaaaccttttaatttagtgatttttcacttggaggacatatacaacatgcagactggaaaattttaagtattccttggcagttgtagaaaataaagccatctggcataaattattcccctatatttggaataaggaccattctaagatattttcaaattacttttcagacttttgaatgctctactcctcagccaggaggaatatctgtagggtggctccactgagaaagtgtatttctctactattatgttgataaattgtggccaatatgttaagctaaatttataatcagcatataatatttatactatgatgattgattgattggttgacagatgattctatacttttttcctaacaggagacattgaaaaggaatcaagatttcaataaagttattaarattttctgcagataaccttcaccttaaaactagacagattaggaggtagtgctaggataatattaacgataatagcaaccacaatacacaggaaaagaaaaccaaataccccacattttcarttataagtgggagctaaacatttagcacccacggacataaacatgggaacaatagacactgcacactattagaggggagagggaaggaggggagggtggttgaaaatctaccttttgggtactaagctcactgtccatgtacaatatacccaaatagcaaacctactcatgtatgcccctgtatctaaaatgaaagttgaaagatttwaaaaaaaagaactatatcttgcctcctcctgcccctctccctacctacccaacacatgcctgcatgcatgttctrtgactgagccccctctacagctggctgtgggtggaatgaacttctttgaaaagcattttctcctcattgccagaattattcaagcatgagatagaccagttattttcaactattctttgcaaccagaccacagcatgattgatttggtataattcaaattgctgtgacataattatgactattgtttacccaaatatagtytggggtggtacataaatactttcttctgcagagacataaacaattgctgctggtaagatcaagctgcatgtcctggccctctgctcctccacccacctcctggtacatccacttttgaacaccagtgggctaggttagtggcttgcaacttggtttgattatacatctctaccagttaaaaaggttctaggtgartagtatctttatctagttaaaaagattctagagaaatacattttaaaaggtgccaacrtaggygcacaaaatatctcggctcacagcatctgtcctatccaacccacctctgggactttgcaagccagctctttttgtgcacctacgttgggacgatctcattcatcctaacctcactttccaagaagggaaatggaggcttgaagagacaaatcaaatctctcaagcaggcagaactaagaggccaggtagaatctgaaggcagacttttggcctccagatccctcgtatttagccaagtggggatgctggcctgcctcctcgtgmtgatgtgagcctcagacaaatcctcctgtgccaggcttgatgccaagtgcttctaagaggtaggaagatgagcgagacagggagacacagacacagacctggagggcttcctggaagcagtggtacttgatggatgcaagaagtgaggagggcaaactagtcagagatggtatatgtgtgtgtgtgtgttccaggtgatagaattggtacacacagggatgagggtgccccagccaggagggtttaacttcatcagcaggcctagaaaagccatggaaacttccagcaggaaactgatgctactggagccatactttagaaaggacaggagaagttagttatgagtaacaagggtaagaatgagcatgactggagtggctaggaggaggtgcctggtgctctgagcagaggacatcataaaacaaatatatggtttcctgaccatatatggtctggatacaagggaaggggtccggtgtgactcttgatgtstatgaaggtagactagcagggatagaggaagggtggcagtggtgagcctggctgtgcaggctgtgatcagtcaggctgtggggaactgagggctggaagggagttgggcattgtttatgggggttgcgtgagtaatagaattcctgatggagacaggagatgtggaaagagagaggtaagaggggatcgcgggggcagagcraagtatgaaatacaaagagccagggcccagcctctctgctatgccagcagtgacattcgggctgggtgattgtggcagggactgtcctatgcattgcaggatgttgagcaacatccctgggccccacctgctaagatgccagtagcagtacccccactcctatagttatgacaaccaacaatccttccagatattgcccaatgtccctgggtaacatcacttggttgtaaactactgccttaaagataaatgataagaaggttagatagataggttatagttgatatatttatatgtacatatagagagagtctcatgctaaagcagggtctctcagtctcagcactgtcaatattcggagctgaatgtttaccatggactgtacagtaaccaaactattgactttattccctgaaatgttagctgattggcctgataagtagagtatcagtactcaataagaatgaagtagaggccaggcacagtggctcatgcctgtaatcccagcactaygggaggctaaagcaggaggattgcttgagcctaggagttcgagaaaagcctgggcaacatggtgaaaccccatctctataaaaaaacacaaaaattagctgcgcatgttggtgcacacttacagtcccagctacttgggaggctgagatgggaggctcacttgagctcgagagatagaagctgcagtaggccatgatcacgccactgtactccaacctgggtgacagagaacctgtctcaaaaaaaaaaaaaaaaaaatgaaatggagaacttacttaggagataaaaagaagctgaaggcatgctctttcttgaaaatctatcagacctggagggaaaaccatgtatgaaagtgacccaaaggaagttgagaaatgcacagaatgacctctagaggttcctttcagcwctaatgatcagtgaaggagacttacagaccctgatgaactgaccccaaccaggcattggcttgctgcttttttcccctacattggccagtgctgtcacaacactcactacagcaactccttccaaccctgccttgacctcagcctctgctgctggaaatgaccactggcccatggtccagagggtgtggctggcacagtggagggggaatgtgcctgacttgtatataaaggcagcacagtggctgggcaagacacacattgtggacagaaccaagtttatggaccagccttccctgtgaaatttgacttttccctctttgctgaattggtcaggttaacaatggttacccctggattacaggaagggcatgtgctaaaagcctctttggagacccacatggccctcagatgagcaattgttcagattccttttctttttcttttccatgggaataagctttcctctctccaaagtacatgttttaggcttttttattttcttgctactcccaaggacctggtgatatttttctttaccatgcattaaacagaatctgtgagtcttttctggaaaaaaaaaaggcaggagggaacatactarttaaaaagtttctgggtacactaccaagatgtacctatttattgatatacaaatggcataagttattgaatgcttgctataggcattctctaagaactttgtaagaattgacttacatgagctacttcatagcagttcgatgatatacatgttgttattatcaccactttacagataaggaaatagagacagacatactgaatgacatgctcaacgccactccactagcaagtggcagaaccaagcttgaaacagctggtctgactccggagtctgtgctctgatctatatcacagctatttctatatgtgctattctactaatatatattttttgaaatacatgaaaaagtaattttaatagaatgagatacatattggcaatattgaagttctcatacttttgtcctctgctccaatgagccatctagaaccacctcagatctatgtgccctccttccaagatcatcttggggggttcttataggggaaattcaaactgctaccctcaggggtcttagtgtccttgtctctatttggattctgtaatggaaatggggtccataactgtagagtctctcctccagtttggtctgccatccactagttcaggtcacttccctccctacctctctgctgcccctggtagcctgggctttcccactgagacccagccaggcagaaaacaccctctcagtattccttcatgcccctttgtcctccagcctaaactttccagtccccttatatcaggaagttactaggtaatgcactagctcaatgaaaaaattaatttgaacatccacatctttctttccctttctatcttcaatctgtgataacgttaccttcttgtgagaacttctctaactttcctatttaaaattctctctgtctctgtctcacacacatatgaatctttycctgccttacttttcttcatggtgcttttatcagatgttattatttttctattcctgctcgtccaactcaaaaataaacattgttgaaatctctatctgatgtatccaaccttgtattcccagtgcctacacagcagcaattggttcatagtagacactaaaaactttgggttgaagaaatgaataaactccttctctggkattaacaattagggatttgaagccaatagaagaaataatataatgtaaggggagcttttcttagtcactttaaaaaatatcaatgcctaaaatactgtacattttctacctggtgtgctggaaaaagttgaatagtaaccaagttactcatacaattgacaataggaataaatgcaaatcaaaaataaacccccttttgctcagtaaaccatttgttttccaggcagtcttttactttgtcactgattgcatagtccttaggttctaccaaaccatgaggatataacagagcacagcacaacatggttgatttggtgttttacactaattcatattgtatgaaataattatgatatttatgtaaatgctgacactggtgtggtcaatgcctggtcaaaaatttctgtataggacttgtttggggattgcgaaggactagaaatcagccatggctaaggagcttcgttagaagtttcctttgaaaagttccacttttcataagactgagccacaatcagttttttgcctgaaaacatagaagagctaatagagaatatcccacccccttaaccactgaatgtgattgagattcttaatactctgaatactgatgaactagagcataattattttattttcaatttatatcaatatggtatatttcagactggccataattggagctgcttttaagcagaattataaaccaaccccctacttttttttatttacacagaaagtaaacaatctagaaatgaagtcttttattttctgtggtatcactctgtaaatatgggtctcttttcagatgagatgtccataggagatagatttggccctatctaaagaagatgagcaggaggtgatataatttatgagctgaactaacagaagggtgctgagttggattttattaaactaatattatggcttgcaaggatggcatgtcagatgtctcactcattttaaagattgtgccatttcaataaatcatttttataactttaaatacattatataggtgcaatgccagtagagagtatgtttaaatatgccagacacattggtttgcttcactacatcctgtgttgttcatttcattttctaaagatgtagttatcagattattttcatgagctaatccatgttttagttgtattcataaagtcttgatttggtgctgttatgcttatttgattcttccttgcacatatgtaatcaacccatgtgaatatcattacagtgtttctctcttccttcttgcacaaagagctaaaggaatctcctgttttaattcctttgcccatgtagtacaatgagaaaacaatacacaagatgcatttggggaaatttaccataagatttcatctgaaagagttgtgttatgtaagataatgcattgtatttcagaatatttaaggctgaattttttttactgtgtgaactctatactattttcttttcccccccaacttcccctcatttaacagcagacaaacccagggagcactgaatgaatccgatgatcctgaaacaggctgtctaactgataacaagccaacttctcgacacttctatcctgtcgccttgctgcttgtcagctcacacctgctagttgtgtggcttattttaagtctggcgttactcttagccaaataccaataagttttatgttgtattcctttttcttttctacaaatgacaatgaactttaaattatggggacaatgctgtaatatttttacattttcaaattcacagaatttaaaaaatgttaaattgtgtttagtttgtttttcctaaaatctaaaaaacaaaaagtactatgcattaggtggattattttgctcttttgttcatggaaargtgtttcccactgttaactagctcaagaagaatttttaaattactgtctttggaataagacaaagaacagaatcctgaaagcttgaagttctgaacctcctgtcctcatcccactaaatttattaaagaaattaagactgaaatttgcacaaacactgaaaccctgagacaagttctagagatgtgggaggttgcagactttatttccactgtgctaatatcatagatgccatctgctgatagaaattttttttaacctgttttacttctttgctgcaattaactcttttctgtcaagtaactttatggagagaatggctatttatgttttgtaattaaattacctgtttgtatctcttgtttgggttgatttggctttcagaggacttttctattctttttaacaaggtcttgtttgtgtcttgatgtaccattcccagcacttgtgacttttgtactgtccgtggacaagcactcttcctttataaagctgagacttggcccaggctgttcagaaagccattttctctcttccttgcacagctaaaataataaaatagagatgaaatttttctttaaaaatctatagggccagacttaataaattaaatgccttatttctagaacctgcatccttagggctacatatagattttaatgtgttttaaagagactgagaaattaatttgtggaaatgttataaaaaggcagatatatttatgaaactaaagtggagctgtattgtggagcaaattatatttaaagagtttattaaattttaaatgttaagagtaaagagacttaagtcatctctttcagagggcaataatggtattgggcctggcctaggatttaattttgtaagatgtatcatcacttgtggaaaaaaaaaatgtagagttgaatctttgttatttttacttggatggttgctgcaactctgcattaaacaaataaagcatatttatttattctgtgtttcatgaagttgtactttttcccctttcaccagagaaggatgccgcatagagaatgtactgaagaatatcaaatgcagaaagtatgctttcaacatgctacagctgatggctttccccaagtactacagacctccagaggggacttatggaaaagctgacacctaagtttaccaacatgttaataaacaggaacacaaatacatttcagttggataatcttcaccttggtcttttttgtttgtttttattgtcatgaatttgtggtgggggagatgatcacagatgtttcccaaaatctaggaactacttcaattcatcatcagcatattgctctgaaagaaatccattttaaaaaatcttacatgattcagtactgtcatttctagttctaagcttctatgtgttgagcctagctgattgagattggttcacaaagtgtaaatttcattcatgagtatttaaatgtttctgaggaaacatggatcatttcaataggactaggggtgattcacagagcaccactctccaaccaaatggaagagaggagagggggaaaaggaacatattttttttgtgatacaacttaatagcctatgagaacacagtcaacctgagaatcaatgtaagggatttaaaaaaaatgtgtagccactcaattaggtagagttaactcatgatctggaatactgaggcagtttgcaggtatgttccacaatgatctctatcatccagtcaaggtgtgactcctcccttgcaacaggcatatgcatggagtgagtaaagtggtcaacagacctttcaaaaccatggcatcttttcagaactctgacttgggttgtgtgatctagctgtgaatgtagcaatatagaacgtttaatagaatgataagcaaaacactgcaatgatctaaaattacaaataaaataaaaatgaacaacattttgatacccaaaatgaaaattcccatcagcctgaactttatgttgtgaagttcatgaatgtcagtgaggtatctctgagatgtttcttagcagtcatcctggtgtaagcatgcagttatggcataggtttgtgtgtgttaataagcctttaaaacatatgcaaccacaacaaatgataaagtaaaacaattattttctgttgccctgaatatcaaacttgcccttgcccttactcagcaaaataacatttataagttttccaaaatcccaaagtagaagtttccttaaaaaaatcatcttgtataataccagtattcaaacatgggtaaggttaatcacccccaatcactcaggagatagttgcagaatttgaattacaatctcttcttactttcctagcctgtggcttgtcacttctccaaattgccatgctaaatatgcatgaaaattgagggagaatgctagttaaaaagaaattaggatttatcactggaattgaaactaagagtacaaaagtctgaacgaatgaaacttttctccaaattttacaaattcttgttcctttctcattagaagagcatgctatccaaagcataaatctcccttgaaaataacagaggcttcttaagccctctcttagctatgatcaatggatgatattatgcttcccatagctaatgtgatagctccttgcctaggattcctgttgaaataaggattctagccccatgttaagtttttcaaattactacaaattttagataagcatttggagctttttatactagaattatcaattttttattttagctaattacctgtgggcattatacttgaggcaggtaccaaactacttacagcctttttaatgaaaatgtgctgtgtactttgaatccattcatagacaaaattaccttgatgttctcttaactcattctttattttagtgattaaatacaacctttgagttgttcaatatcatttgaaaatggtaggatttgtggttattttcattaccctattagatttaagatagagaggctgggatgacagaggcctccttgaatagctatgaagcctcattcagcatatcaaatggtagtctgagttctaagaaaccttaagtaatttatcattctgtaaatactcttataagcaataatttttatttgtatttttgaaaacaaactacttaaatatggaaaaatattaactggaaagccagcagtagggttttctatttttaaaagacatttcaaggatttcctgtaatcccagcactttgggagccaaggtggatagatcacctgaggtcaggaattggagatcagcctggccaacatggtgaaaccccatctctactaaagatacaaaaattagctggatgtggtggcacacacgtgtaatcccagctacttgggaggctgaggcaagagaatcgcttgaaccccggaggcggaggttgcagtgagctgagatcatgccattgcactccagcctgggtgaaaagagcgaaactccatctttaaataagtaaataaatgaataatatagaagtctcaaattatagtgcttactgtaatacaaatgcttatgaattttcattcattaccatactcatctgcatttccttatagaaagcctgtactggtgcaaacttctaaaagtggatttcatcaagaaaatgtgtttcatagagacaacaatattgcttttttcctgagaggcagttcattcttaaacaaccacttcactatttcttaagttattaaggctaaatcaaagagcaaatgttaaagtgtttaaatctctcttgaacaaacacagccacagtcatgctattctatctatattttcacttaaaagatacaccagcagacctattttaggaggtcatattgagccaaaaaatgaactgagcaaatgacatttccaaactctttttttgctcaaaaataatatgttcccctttgatattaaatgcagatatcaattctggattagctatttactgagccctaggaaaaacatatttaaagacaaggaaaccattcatttacatctcatatcattgctttttgcttttaaatatcgccttgaggtttgtctacactctgccaaaacaatccctgaacataagtttggtcagcctcataattcagtgagtcgagcaaccatttgttccaagtgataaattgtactaaatgacaaactgcccaatcagggcagagctccatggacccagcctccagcccttattttataagactaacccctcttctgaaaaactctgaaggcttaaaagctagcatttggatggaggatacttcctttttatccttcagctatgtatggcactttacataaaataagaggtaaaaaaggagagaaactgatgtgtataaagtaatgcctttcttcccaagcaaatcaaacctctccctatgtaaaagttgatagtgtaccaagagacacaataccactggtgggctggaactagctcgttctgatgcataaaagttgataattaaagtaccagaaattttgtaagctagttgttaaacattaccattattaaatatgaaattataaaacacagtggaatacattaaaaaccaatgtaataatcaaaacataccacttcccaattattttactaccttatactatttattagtactcttgagtctatttaggtctattacatctttacagtgaaaacaggatacaatattgtgctactgtgggtctcttcctgactgcagattcagtaacatggtgttcgtagcttgaaactgtccacagtgggagtatttacaccatagaaactggctggcaaatgctacaaactagcaattttaattcctggaaaggcaattgttgagcatttaccagcacacaatgaatgccatattcttttttttttattaggaaataaattattggaggcagtataaaattatttaaaaagtatcaaatgcaatcccttatcttcagatggctataattttggttatataaatgttttggtttttaccttctttaaagactcctattaggttaaaagtcatatttgatgactatattttattcataattaaattattaaatcaccttttctcctgataatgctttgccagagaattcttagcaattcaactgtagtctaagcaataactcagggctaaattcagggaactgttagcccaatcagatatcactaaaaatgtacttcaccatctattttggagtttataattttggcatttgctaaaagtaggaaaaacagtaacatattactgtgcccagattctaataaatatagctcaattgaaaccaaaactgttacattaaacaaattacactctggcactatgctaaatcaccacagatgttttaggtgtttgatttccaagcaggatggtatatcatttgtttggttcaatatatgaggcaccatttgtagtcttttaggaaataaattagcttttatcacagatttaggaaacttgtctaaaaaaactgtgatcatcagttacagagggaaggaaacatattgaacacaaggcatcatagtagctggaggccttaaaaattatgcacgaccaaaaagaatgatttggtgagagatgtgtagctgattgacaattttagtgtgaattcatattcatttaacccagcagcaatctacataagctatgctttttcccrcctgtatttatgtttcttagcttataaagtcccaatatattatatcttttgttgctttggcagttttaatttagagctctgcgttcacagagatgccacctatagcaaaaactatctttaagaattggaaaataaaatgaatgttttagataaaatattgcaagccattatgtgtagagttaatgtatggaaatttgcatttgtttttctgaatcatggtgtacattaatcactcattgaattctatttctaagcaaataagagaatcaaacatttctaaaaggaacatatgtcttgctattaataacaaggagacaggtaaaatagtaaggtaatataagcaaaaaaaaaaatgtaatgaatttagctatcctaaattggaatttttacagattgcatgcatacttagaattttaaatttttaaaagatttacaattgagtatggtacccacagagagtgagtaccaagggaaggaagacctaatacaagtgatgttgcctgataaatcacatcttgccaaaaaaaatatattttagtaaatacagttctttaggaagaaaaatgttgccctttcacactcacagtgtaaatacattcataatattccttcaatcatctaaattaccgccaggtcatgaaaggacgcgatcaatgatgacctattgcactcacaggcaacattgactcaaattttggcaatattgctatattatctagataattcttgtgatgtttttatgtcactatcaacattaaaaatattttgttaaacaactatgaaactttcaaaagtttgcatataactgtatgggcactctcatttcactgcatacatacaatactttgtatacacatacttctcgtgtggatattttataattttatttaatctaacatttaacttttaggtttttgtggtactcatctgaaaggttggcatttgttttctttttatgttatatatgtattttagatgaatcaataatgtgtattcctagaaattttttctaggcataaatagatcattttatgttggcatttaagagatatcatttttgttttattgttctgtgtaaaccatattcattgtacactgtgtgtatatttttgtttaaataaatgatttttattttttatgtttctgtctttttctccccattatacattgtttccattttcatcactacagaaatgtttaaaccttaattaaaatattagaaatgtagcataaacaatattccaattcccagttaattttctactgggccgcaattacagtgaaaatttttcactgatgccagtttaatctcattttcaccagcggaatttacttttcaggatggctattccatggaagcaagatcaaccrcagtttgcccgggcatggtggctcacgcctgtaatcccagaactttgggagttcgagaccagcctggccaacatagcgaaaccccttctctactgaaaatcaaaaacaatggctgggtgttgttgcatgcgcctgtaatcccagctacttgggaggctgaggcaggagagtcacttgaacctgggaaacggagaggttgcagtgagccaagatcgtgccactgcactccagcctgggtgacaaagcaagacttcgtctcgaaaaaaaaaatatcaaccacaattttaagttggttcagaaccaggtgttaatgtttaacatggagcaaatcattaaccttgtgtgccaagattatatgtagagtcatttaaacacaccaagataattttttcttagactatttaggtctaatcatttataatttgttatagcaattgatagtagaaggcaaattccaaaaagctctaattatatcatgttgcagaggaattagccaaatgaagctcctgcttacaagcaatgaa

SEQ ID NO: 94721 - DNA, 26950 bp, Homo sapiens
ctcctgggttcaagtgattcacctgcctcagcctcctgagtaggtggcattacagccacgtgccaccacgcccacctacattttgtatttttagtagagacgggggtttcaccatgttggtcaggctggtcttgaactcctgaccttgtgatctgtccagctcagcctctcaaagtgctgggaatacaggcgtgagccaccgcaccctgcctgaattgtctttttattgttgaattttgtttatatattctggatacaaatccctcctaagatatgtgagttgcagatattttctcccattctggcaatgtcttttcactttcttttttcttttttgagacggagtttcattctgtctcccaggctggagtgcagtggcgtgatcttggctcactgcaacctttgcctcctaggttcaagcgattctcctgcctcggcctcctgagtagctgggactacaggcgtgtgccacaatgcccagctaacttttgtatttttatttatttatttatttatatttttttgagacagagtctcgctttgtcacctaggctggaatgcagtggcacaattttggctcactgcaacctccgcctcccgggttcaagtgattcttatgcttcagtctcccaagtagctgggattacaggcgggtgccaccacgcctggctaatttttgtatttttagtagagatggggtatcactatgttggccaggctggtcttgaactcctgacttcaggtgatctgcccaccttggcctcccaaagtgctaagattacaggaacgagccaccgtgcccggccacttttcactttctttttttcttttttttttgttgagacaaagtcttgtgctgtcggccaggctggagtacagtggcacgatctcagctccctgcaacctctgcctcccgggctcaagcagttctcctgcctcagcctcccgagtagctgggattacaggcgtgtgccaccacacctggctaatttttgtatttttagtagagacggtgtttcaccatgttggccaggctgatcttaaactcctgatctcaggtaatccgcccgtctcggcctcccaaagtgctgggattacaggtatgagccactgcacccggccacttttcactttcttaatagtctctcctaaatgcacaaaagctcactgcctgtttttgtaaatggaagttttcttgaaacacagccatgctcatttgacaattacatattgtctgtggctgcttttgtactacaatggcaagagttcagcagtcacaggggcctgcaaagccaaaaatatttaccatctggccttttaataaaaagtccacaggcccttgtcttctaccatatacagagaacataaaacatcacctggaatggtaacgacatgctgagtacatctaaatctagaggtcctctggaagagctctctagtttgagtactgaagttttccattatttaaaaacaaaacaaaaggccggggcagtggctcatgaccataatcccaacactttgggaggccagtgtgggtggatctcttgagcccagtagttcgagatgagcctgggcaacatggcaaaaccctgtctctacaataaaaaaaaaaaaaaattagctgggtgtagtggcatgtgcctgtagtcccagctactagggaggctgaggtgggaagatcacttgagcgcagaaggttgaggctgcagtgagctgtgactgcgccactgtactcctgcctgggcaaacaagtgagaccctgtctcataaaacaaaaacaaaaattttaaactcaaatccagaccatatttcatacatagcaaacacaacatttaacaactatcattgtattgtacatcttaaaatcatatgggtaaattatttgacttgagataggttagtgctagtgagcgctcaggtgaggctagatgggggtttggaagaatcccccttaaaattgtctctctcataggacggcacacaaaaggtgcagaacaatatctttcacatgtggcgatactacaactttgcccggatgaggaaaatggctgactttttccttatccaatcaaactataactacgtgaactggtggtcgacagcccagagccttgttattattctttctgggatcctgcaactgtatttcttgaagcgtctcttcaatgttccaacaactacagatacaaagaagccaagatgctaagctaaggtgactatagcaccctggctgttttcttctggggcttagtcgaatcagctttgtaatgttatgggacaaaaatcaattatctcattaatgttttagtctgctgcacacatctaaaaaagcaaaatggcaataaaatcataacagtgaaaaagttctgaagaagtatgtattaaatgtatgcatcaaaatactgttcatcatatagcagtcccttagccttcactgagtctacttagaggctaacagaaaaccttagaaggaagatgagttgaaaaaggccacaatcaagtttgcttacatataaaagcaggagttggtaatgttttattcttaaagacttcacctttggaacttaaaataagcaatatattcattaaagaaatagtttaattttgcaatacagatagtctttaaattttttgtctataaaatatttaaagaaatattctaaggatcttaaagtaactttgggaggcacggggaaggacaaagggactgaatttttatgtcgtggcctctgatcagtgcttttagtccaatccagtcaagtaagtaaaggttcatagaaaaaattgttttataaaatcatagtgatgaaaaaaactttccagcctagcgtcatcccatccaagaaaaatactgagaaaacagcttgtaaaaaagaaggtaataaaatcaaattatactcataaaactctacacttaataacaggaatacataatatatataatataaaaataattaccatttattccatacctatcatttccaaggcactgtacactgtactagatgctttacaatcagatggagtctcactctgtcacgcccaggctggagtgcaatggcaccatcttggctcactgcaagctctgcttccccagttcaagccattctcctgcctcagcctcccaagtaactaggaccacagccatgtgtcaccacacctaattttttttttttttttagtagagatggggtttcaccatgttggccaggctggtctcaaactcctaacctcaagtgatccgtccgccttggcctcccaaagtgctgggattacaggcgcgagccactgtgcccagcctacaatcatgatttctaattccaaaaatcagactttctaattctcaggtagatggccaaagctgattttcaagttttgtgtctttttaaacagaagaaaatgaaccttattaaagctgaatgactcattcaaggccatatagctggtaggtggcagaagtggggtttgaacccgtttttcttctataccacacaccaattactgtatagaaaaatagctgaattgctcctattagccaaatttcatttttaaaaccccacatgtggtttattattctgttatggcaatgtctatgttgcatattaataaaaaagaaaatccttgtgtttagaaaacagtgttatcacagataacaataagctattcttgttcctggttccaatgattttgaacctatttctcagaacaagaagccctctgattcaaatatgaaacagtattctatttcgtcacaaagatctgaaaccccatttttgagccatctctgtatataataagaatccagcctgcatttgtcagtgatagagagtacagtaaataagaagtccctgaagaggccagagtgttgacaaaattcaacatgatggtggagtccacacaaacacaggaaacaaagctcggcctttccatacagccgtctgtccttggaatggcttcgttttaagtcaacgtctcttcatgccgcacatattccccaatgtctgcttgatgaaataccacaatcgccatggggtctacttttctgcagtcttgtgtagatttggctgccaccccaaaaccctgggattcaaaagaagagacactaactcactgaagtcattcaatatgcccatattgagggctggaaataacaaagacggaaaaaatacagttctggtctttctgggattcaaaacgtgctgagaatttattctctcaagcactcagattgaagacatacccttcttgaataagagtacttgagttctgtaacagctaccatctctactcaccaaagggatgtctgccatggagtacaccaccacgccctggtactgagaagtattttcagtgattcgacccagaccagatttcaacacatggttcccatacaggaaggactgctctgcaccaggctttatccaaactttatactataagagaattaaaatccaagagacataaaaacgttactatttctatccatgcagacaagctagctgctggatctgtgaataattttctgaaataattttaagggaaacagagagactcatgttttcctcaaactgtctatctcctgaacagaaatgcaggaagttgcccggtgcagtggctcacgcttgtaatcccagcactttgggaggccaaggcaggtggatcacttgaggccaggagttcgagaccagcctggccaacacagtgaaacactgtctctactaaaaacacacaaaaaaatcagccaggtgtggtggcacatgcctgtaatcccagctactgaggcacaagaatcactggaaactggaaagtggaggctgcagtgagatcgcaccactgcactctagcctgggcgacagagtgaaactgtgtcaggaagaaagagaaagagaaatgaaaagaaaaaacagagcaagaaagaaaaagaaaaaaatagaaaaagttattttctcaactctacaaggatcatcctccatggccaggttaacagctctttttctggaccccggtgtcttcattgctgccacttatttgctttctgatctctagctgggtctccctaggctcttctacttcgctggagaaaactaaccctacgcagccacatagcattcctatcccatagccctgaccatgctcaagctgcaagacctctacacatctccatgtgctgaaactcctccaagcacactgtcagggactctgtgggagagaagctgccggacaatctgcctaatccttgacttcatcgcccgtggcagaattggaaaccgccccacaaaccttggcataaggtgcaaggtaatccagagctgtgacgtgcaaccgaaacttgtgggttttagtgaattttccaaagcaggtccccagcgacaccagcttgtccccggaaatattggcggccagcttcataatcttctcactaaaagggtaaagggggagcaaggttgcggatgaaggaggctcgtgggacccaggacccctctcccctgggtccatgctgcctgcccggccccgcctcacctcacatagtacacccggtcgttgtgcagacggaaacagtaggtgccatcgggccggtccaccagcagttgaagattctccccaatgctgagggcaaaaagaggactggagaccgcgcccgaacgaaccggtctccggcaccgcgcccccactccacccttggccaccacacccacacactcccgcgtccgccccgcgcgctcctactatttcgctatcttctcaaacatgacacgggtctcctcttcagtcaaaggccgcatttttccccctgggttggaacaccggatcctcgtgccttggtaactggaaacggaagtcggtcgctcgctgctccccggcaatcccaaagccttcctctctagccccgtaccaatagttcgtctcgctagcgcccaatagtctggacgaccgcaggggaaagcaagccggccggatgagaaagcatagagaccggaaatgtgcctgtttcttcctgtcctaagttcggagtcagcgccccttgtggtccggaagggaagtgacgttgttgctgggaagatggcgaccgcggcgactatcccatcggtagccacggccacrgcagcggctctcggcgaggtggaggatgaagggctcctggcgtcgctgttccgggaccgcttccccgaggcccagtggcgcgagcggcccgatgtgggccgctacctccgggagttgagcggctcggggctggagcggctgcggcgcgagcccgagcgcctggcggaggagcgggcgcagctgctgcagcagacgcgcgacttggccttcgctaactacaagaccttcatccgcggcgccgagtgcaccgagcgcatccaccgcctgtttggcgacgtggaggcgtcgctcggccgcctgctcgaccgtttgcccagcttccagcagagctgcaggtgcgacgcgcctggcgctaaaggggttttataactgtaaaagctgacatttacgatggtagaaataactaacacataaagcgtttaccacgttccaggttctctgctgagcgctttattaatccatttaaacctcacaacagccttcgagrtaggtactgttattccttttttatcttttttgagacggagtctcgccctgtcgccaggctggagtgcagtggcgagatctcggctcgctgcaacctacctctgcctcctgggttcaagcgattctcctgcctcagcctcctgagtagcagggaccataggcgcgcgccaccacgcccagctaatttttttggatttttagtagagacggggtttcagcatgttggctgggatggtctcgatcttttgatgtcgtgatctgtccgcctcggcctcccaaagcgctgggattacaggcataatccactgcgcccagccctgttatttccattttacatatgagcaagtcaagacagagattagtgacgtccaaggacacagctaggaggtttcgaattcagaactggttacccagaagcacgtccctccctcgaagggcagttgtgggcacaaagaaaaaggattcatgcaaagctcttattatcgggtctgacacagttaacattataggtgtgagctgaatatatgtgcacatttatatacttattttatacgaaagcgtggaccggaggtcatctgcttcaaaacttccattgacgggaaggtgacaaggaaatcctcgcatttgagggcatcagatatcaaaaagtctctccatttggatggctggatgtggtggctcagcctgtaatcccagcactttgggagcctgaggcttgaacccaggagttcgagagcagcctggccaacatggcaaaaccctgtctctataaaataaaaaattagctggtcgtggtggcgtgcgcctgtagtcccaggtacacaggaggttgaggtgggggggtcagttgggcccgggagattgaggctgcagtgagccatgattgtgccaccgcactccagtttgggaggtcgaggctgcggtgggctgtgattgtgccactgcattccagactgggtgacaaagtgaaactctcttaaaaaaagaaaaaaaggctgggtgcggtggctcacacctgtaatcccagcactttgagaggccaaggcaggcggatcacgaggtcaagagatcgaggccatcctggctaacatgctgaaacccccatgtctactaaaaatacaattagctgggcgtggtggcacgcgcttgtagtcccagcyactcgggaggctgaggcaggagaattacttgaacctgagaagcggaggttgcagtgagccaagatgatgcgtgccactgcactccagcctggtgacagagcaagactccgtctcaaaaaaaaaaaaaaaagtcctttgtgagtcatattctgtctccattatccctagttctgccttccagcctttcatgattaaagtttaatttttcttttgagcctttggatatttgacagcagcttttgtacccttccatgctccagaatagataggggacttgataaagcaggtctctgcaaatatggagaagtgttgaaagtagactgtggcaggaactatggttgaacattagcataggagaagatgaagacctgaggggaaagattgtggattctaggcagttagtgcttcattttgaaaataatgatagctactgttaaatatttaactgtgtctcttttactatttttactttgacgcattcgctctgtttcaagttctatgttaaatgcttcacacacatcatctcatttagttcttacacccttatgaggagggtcctatatactttttttttttttttttttgagacggagtcttgctttgttggccaggctgcagtgcagtggcgccatctctgctcaccgcaacctccacctcctgggttcaagtgattctcctgcctcagcctcctgagtagctgggactacaggcgcgcaccaccatgcctggctaattttttgtatttttagtagagatggggtttcacttgaactcctggcctcaagtgatccgcccacctcagcctcccaaagtgctgggattacaggcgtgagccactgcgcctggccctatataccgttttactaatgaggaaataggttcagagaggccaagtaccttgccacagccagcaagtggcatatctggatctccatctgttagatttattaattgtatgtttttggacaagttgcttaacctctctgggattaaaaatttcctcaattgtaataatacttaccttataggtggggtgtgaggaataaatcagatagatcatccagcccaatgttcatagcaggtacttggtaactgtagctaaggtttgggtacagagcagtgaaggatcaacattcttctgattattactaggaactttgtgaaggaagccgaggagatcagctccaaccgccggatgaatagcctgaccctaaaccggcacacagaaattttggaaatactggagattcctcagctcatggacacctgtgtccggaacagttattatgaagaggccctggagcttgcagcctacgtacgccgactggagaggaaatactcttccatccctgycatccaggtagccaccttgcccagagaggactcaaagtaatgttcttgtaatcatttattctgtggtcaggactgaagctttaggtagaaactcttgcatgtttcacatcagtttctgccagccaggtatgcctgaacagaaaacattcatttattyaaaatacatattaatcatgtgccaagcactgctctatatgctggggatacagtgtgaataaagtggtcctggctctcatgcagcttacgtgctaatgggaagtctgataattgacaaagaaatgatatcatttcagatagtggtgtctgaagaaaaaaacagggaatggggtaagggagtctagggtaggtttctttaggtagggtgatcaagaaggactcttctagggaggtaacatttaagctgagacctaaatgagaaggaggtgccagcccacaaagatctggggagagagcaaaccagaaagtgtgaagaacaagtagagagggctgaagtgggcagaaattgaggtgtttaagggatacagaggcagccagggttaatggattgtagcagcgggagagcactaggaagcaggtgaagatggagagccaggtagggccaccagtgtaagtcccaacaagtggttggaattttcttgattgcagtgggaagtcactggaggattttaagcttttttttttttcttttttttttttgagacagagtctcgctctgtcccccaggctggagtgcagtggtgcgaccttggctcactgcaacctttatctcccgggttcaagtgattctcctgcctctgcctcccgagtaaccgggattacaggcctgcaccaccacacccacctgatttttatatttttagtagagacgaggtttcacatgttggccagattggtctcaaactcctgacctcaagtgacctgcctgcccacggtgctgggattacaggtttgagccactgcacctggccaggttttaagctttttaagcaagagagttaactaacctgatctttgttggtgaacctacaggcatcagctttaggaaattacttcacatttcaggaaagccatgggaatgttggtctgcagtcttcagagttaggggaatgggttctagagagcatccttcccagcgcagtgtgactctctctgtgtattgtcagggcatcgtgaacgaagtgcgccagtccatgcagctgatgctgagccagctgatccagcaactgaggaccaacatccagcttcctgcctgcctccgtgtcattggctacctgcggcgcatggacgtcttcactgaggctgagttgagggtgaagtttcttcaggcccgagatgcttggctccggtccatcctgactgccattcctaatgatgatccctatttccatattacaaaaaccatcgaggcctcccgtgtccatctctttgatatcatcacccagtaccgtgccatcttctcagacgaggacccactgctgccccctgccatgggtgagcacactgtgaatgagagtgccatcttccatggctgggtgctacagaaggtctcacaattcctgcaggtgctggagaccgacctttaccggggcataggcggccacctggactctctgctgggccagtgcatgtactttgggctgtccttcagccgggtgggagctgatttccggggtcagttggctcctgttttccagcgggtggccatcagcactttccagaaagcaattcaggaaacagtggagaaattccaggaagaaatgaactcctacatgctcatctcggctccagccatcctgggcaccagtaacatgcctgctgctgtgccagccacccagccggggacgctgcagccacccatggtgctcctagatttcccacccctcgcctgctttctcaacaatattctggttgccttcaatgatctgcgcctctgctgccctgtggccctggcgcaggatgtgactggggccttggaagatgcccttgccaaggtgagcacattctgttggttttytgctaccctggghcttctctggtaatgggtggccagatttttgtaataaacccgtctatttgacggtgtctgctgacatggagaggtctagtgtggttttggaggttctcctgattgagaagctctggccagttgcccttcatgggacctaggacagtccatgaagtgatttgcctatagtaacaattcggtaatacacgtattagctttctagtgctgcataacaaatttccacaaacttagtagcttccagcaacacatttattaccttccagttttggtgggtcaggagtccaggcacagcacaaccgggtcctctctgctcagggtcttacagggttgccatcaaggtgttggctggactatggcctcatctggaggttggggctccatttcagactcatkcaagttggcaggggtcagttctttgcaattgcagaactgaagcctcagctcctagaggctgtccactccataggcagctgacaacatggctgtttgcttcctcaaggccagcaggagagctactctcttgagtctcttcttttaggtacctccttttaaaaacttcatwtgattaagtcagatgattagggactttaattacatctacaaaaccctttacctttagcatattcttttatttttattgttaaaagtgttttattttacagagagatagtgtctccctatgttgcctaggctggtctcaaactcctggactcaagtgatcctcctgctacagaccctcaaagtgtgggattacaggtgtgagtcacttgaacttgggaagtccagcatcagagtctgtgttcttaccctgtcgctatgccacatatctgtagtgtcagctaggctgctctgttggttttgaaacttctctttcctagctgttttcttacagttttccagtggttctagctttctgaaacctcggggcttagtagaaagcttgtatagttttgcttcattttcctggatccagcacagttctggttggtcctccgtggaagttmagaaccatgtattgggccgggcgcagtggctcacgcctgtaatgccaacactttgggaggctgaggtaggaggatctcttgaagccaggggctccagaccagcctgggcaacaaagcaagaccctgtctctacaaaaaattttaaaacttagccagacgtgatrgtgcacgcctgtagtcccagctacttgggaggctaaggtgggagtatcccttgagcccaggagtttgaagctacagtgagctgattgtgccgctacactccagcttaggtgacagagcaaaatcctgtctctaaaaaaaaaaaaaaaaaaaccaaaaccatgtattctctctatagttttatgacactcctccactggaaccggaaactatacccgtaatgtaacaagttgggtytgaacttcacattaataaagtgacacaattgtggacaatgaccataattctgagtttaaatgagacagtaaaataatgtactgttaaattactttgttcaggaaaactggaggggcatacatttttttgcctagtttcatgcactgctgtcccagtggtgataggctgtcccagtaattgacggtgcccttgtctcttaggtaactaaaataatcctggccttccatcgcgctgaagaggctgccttcagcagcggggagcaagagctctttgtccagttctgcactgtcttcctggaagaccttgttccgtatttaaatcgctgtctccaagtcckttttccaccagctcagatagcacagactttaggtaagagaatgaaaattctgtaaactgccttactgatgtgtaattcacatactaaataattcatccatttgtgtaagtcagtgttttttagtaaatatgaatccaattttagaatatttccatcactccaaaaagatccttcatgcacgtttgtagtcattcctcgacagcatccttagtccctggcaacctactttctgttgccatagatttgcctcttctggacatttcataaaaatggaatcatacattatgtggctgtatctggctaagcggaagaagccagtcacaaaagaactacatacgtatgattccatttatgtgaaatatctagagaaatggtttttacagtcttttttttttttgaggcggagtctcgctgtgttgccaggctggagtrcagtggcacagtcttggctcactgcaacctccacctcccgggttcaagcaattctcctgcctcagcctcccgagtagctgggactacagactcgcaccaccacgcccagctaatttttgtgttttagtagagacggggtttcaccatgttggccaggatggtctctatctcttgacctgtgatccgcccacctcggcctcccaaagtgctcggattacaggcgtgagccaccacgcccgtcctaaagtcttttttccaattcactttcacgtccttgtccctttgtggtaggagaggggcttggttgaggcacagcttcccaaagggcaatgggtcagtgcatcacacgtgcaaagcctggctgccctctgctttttccctggtgctgcctgaggtctgggttcctgctgcaggcaccctacactgctgttccgttacgttctgcttcacagtatagcttcccattccctgtaacaaaggtggtttttgctgtattaaaacatagtaattgatggctgggcgcagtggctcatgcctgtaatcccagcactttgggaggccgaggcggatggatcacctgaggttgggagtttgagaccagcctggccaacatagtaactccgtctctactaaaaatacaaaaattagcctggcatggtggcgggcgcctgtaatcccagctaccacggaggctgaggcatgagaactgtttgaacctgggaggcagaggttgcagtgagcagcaatcacgccactgcactccagcctgggcgacagagcgagactgtctcaaaaaaaaaaatagtaatggctcgttttttttcccttaaatttccttttttttttttttttttttttttgagacggagttttgctcttgtggcccaggctggagtgcaatggcgcgatctcggctaactgcaatctccacctcctaggttcaagcgattctcctgccttagccttcccaagtagctgggattacaggcctgcgccaccaagcccggctaatgttgtatttttaagagagatgggatttctccgtgtgggtcaggctggtctcgaattcctgacctcaggtgatccgcccccccctccccggcctcccaaagtgctgggattacaggcgtgagccaccgcgcccggcctcccttaaatttctatattgagttttattagtaactgttttccattttgctttccccacgtctgggttaggcattcctcccactcagctctccaagtacggtaacctagggcatgtgaacatcggcgccattcaggagcccctcgcctttatcctgccaaagagagagacgcttttcaccctggatgaccaggcgctggggcccgagctcacagctccagcaccagagcctcccgccgaggagccacgcctggagcccgcgggcccagcctgcccggagggagggcgagcggagacgcaggccgaaccgcccagcgtggggccctagccggcgtcccctgcctccagaacgcggtgcgtgaggttcccggcgcggggtggccaggactgccycgccctggaaggtccggggcgggttcgggaggcgggaaggcgctcccgggaggagagcggaagggggcggtgctcactgccagtctaagcaggaaggcggggatccagtcgcggcttcgctgtgtgctggccgacggcgcttcccggcgtgccccgcgctgcggccggaaggggcgggccgggtcactgttaagggggccgccatggcccggctgtggggcgcgctgagtctttggccactgtgggcggccgtgccgtggggcggggcggcagccgtcggtgtccgggcttgcagctccacggccgccccggacggcgtcgagggcccggcgctgcggcgctcctattggcgccacctgaggcgtctggtgctgggtcctcccgaaccgccgttctcgcacgtgtgccaagtcggggacccggtgctgcgcggcgtggcggccccggtggagcgggcgcagctaggcgggcccgagctgcagcggctgacgcaacggctggtccaggtgatgcggcggcggcgctgcgtgggcctaagcgcgccgcagctgggggtgccgcggcaggtgctggcgctggagctccccgaggcgctgtgtcgggagtgcccgccccgccagcgcgcgctccgccaaatggagcccttycccctgcgcgtgttcgtgaaccccagcctgcgagtgcttgacagccgcctggtcacctttcccgagggctgcgagagcgtcgccggcttcctggcctgcgtgccccgcttccaggcggtgcagatctcaggtgcgggcggcggggaccggggctgctggagcagcgcgcgcgtctcttctgcccgactccgcgagagcgcagaagtggtcgcggttcatacgccggacctcccgcaggagcgaagtgggatgcgggagcggagaggcctcaggacggatagaagctcctgtggggyagagcccgctcagataggacgcaggggcgaggagaggtcccctagttccgctgttacctgacagcctggcgtctgctttctgctcccttgctctctgaggcaaacacgctcttcggccccagttagatccgccacggtggagttggagaagtgggggttagcccccgccagcctgacccagcccagggggctaggccattcccccgtggtaccacaggatgcctcgcggaatgcgggctctgctggggtcggggtgattgttcctgcacagcaagcccgtcggttcaagatggtcagaaaaacaagtggggtctcaagctgcagaacctctgttaggagttgggagcccacaggtacctcagaagtgggaggagtgttcggaagggtcgcaccgtagaaagatgatttctcatctcagctctacagtgagctcgataacctaattaccagagttgggaaccaggttgaacgcttggtaatggaccgagatgagggacgttttccagttagaagaggagctgctgtctacatttgccatctgctgttgcctcttgtcaatgggaacagccaggaccgggggcaggggtagggaggttgaggatgatgcagttcagctgttcccactcaccagggctgtaacttcctttgcagggctggaccccaatggagaacaggtggtgtggcaggcgagcgggtgggcagcccgcatcatccagcacgagatggaccacctgcagggctgcctgtttattgacaaaatggacagcaggacgttcacaaacgtctattggatgaaggtgaatgactaaagctttgctactggggctgaggattccggataccaagacgcaaacactttcactttgagctgggcaaatcttacttggcatcaacttggatggctcgcatatgacaggaaactggattgccaaggcatggcagactgagctggagkawgatgtcagaaatgtttgccctgaaatcagttacggacaaaatgttggctacaacttgaggagaaaaatcacccccaaaggagtggacatttcctaacaattctgtatggaggaaggtggggtaattgcattcgtctgcagtagacacgagttcctcggacctgtataatctcccaaagccaaggtttggtaataatgtagtccccaaatacctgaaagctgtctttaaaaatgcaggtaagcatgtgactggccatttgtgccgagttcttatttttacggagggcttgtggccttagacgccagtttgcttatggaaatgaaasagaatagtccctgttcaaggatgtgtttcatgacagcacgagtgtaaatgagtgcccacacattttaacagccttgggcaggattttgctgctgagatccctagagcagctggttcttggctcattcttggggtagaggccgtggatcagggctgggggcaggggtgacaattgagaagtgcactgagccctttcctgttaacaattgggcatagaaagcaggattagtacttcctggttatacacttattttgtaaaaatagaattaatatcacagcaaccaatgtgtaggtttaagaaagtggccaggtgcagtggttcacgcctgtaatcccagcactttgggagggcggggcgggtggatcacgaggtcaggagctcaagaccagcctggccaagatggtgaaaccctgtctctactaaagatacaaaaattagccgggcgtggtggcgagcacctgtaatcccagctactcgtgaagccaaggcagagaattacttgaacccaggaggcggaggttacagtgagctgagatcacgccactgcactccatccagcctgggcgacagagcgagactcaaaagtatgattctggctgtagagttttctttttttctctgtctcaaaaaaaaaaagtgtcagctttgtcttgtcaagaggtgaaggaacttgttttattcttttattttttttttaagatagagacgggggtcttactatgttgcccaggctggcctcaaattcctggtctcaggcaatcctcctgcctcggcctcccaaagtgctgggatcagttgtgagccacactacccagccaaactccagttttagttaaactgtttcacctcatttttatgctgagttttgtaaagtaggtwttcttgctgaacagagtcctgaaaatcaaactatacaagtagtaggaagtccattaagctgtttagaggaaaaagtgttataaatggcagttaaatgaacccaggaaagacccatcctcctttgtggctttctctgaggccccatgaggccaagcagaagcaaactggctctaggtgcagccagactttgaaaaggaatcccggccaggcttggtggctcatgcctgtaatcccagcactttgggaggtcaaggcaggcagatcacctgaggtcaggagttcaagaccagcctggccaacatggcgaaacactgtttctactaaaaatatgaaaattagctgggtgtgctggtaggcgcctgtaatcacagctacttgggaggctgaggcgggagaatcgctcaaacctgggaggcagaggttgcagtgggctgagatctcgccactgtactccagcctgggcgacagaccaaggctctgtctcaaaaaaaaaaaaaaaaaaaaaaaaagggaatcccaaccagatactggtgcaaggtcagagatgcagccaatggggagatttgtagaaagctcatagatgctaaaaacatgggtctttaggaaaattagaattcagctgagcctcctttcatttggacaatgttcagaagctcttacagggggctatggcaatcttttgatgcttcttatagctttctgaggttaacgcttttgtggtgggcatcggtagcaataaaatgcaaactttattgcatttccagtaaaatctctcccactttgagcaggaagcactcacaaaaaacgcatatacatgtcaacgttgtgagctcatcagagttttagaaatcaacttccacagtgaaagccaatgtaggcagaaggtttataacagaatccccaggcagagaagtgaatttcagagcatttcagggaggaaactcctctgcacatgtcagcatgtttaacrtcgatgatggcaggttgtgtgctggcagccagagtctgaggccactgtccaaagttcagcgtcagtggttcctgttgctggtcatggagagagacaactggaaagtcaggtgtcttcacgctctaactagagcacagggatggaccatagccatgctaacctttgttaacccctaggacttgtcaaggtgtttaagcagtaggaatgaggaaacaacgttctgattcaagtaaatgtaactagaagtaaaaatttaaaaacttgtaagctcactaaagtgaagctctgcagacacggttcatatcctggtggctgagggcacataaccaagaacttamacaagcacccccaagccacaaagatcccagctgctatggttgaggggtaacctgccagcactggagccaagtgttggagctactgatccaaagttagctcacttctgcagaggctctgaaccagagcaaagaaatggcccagtgcaagcccagtgtgagccaagagttggccatgtaatcagttctggcccaaccaggtttgaaaggtagaggagcagtactgggttttggagagggaaggttggaacaaagccctttgcaggctataagcttcatttactaggccaggtctttctgtgtgaatgtgctttgactttggtctgtttatatgcatggggtaaacgtgggacagcctctgcagcttcactgcctgccggacgtgggtccagggctgccagctctgggtccttggtctgttgggggtcgcaaactgaaatggccatggggctatctgggcaggcaacacagatgagtggggatgggggaccccttctgtacagagcagcctctacttagtggccgctgacaggctgccccatgaggacgcaggcccaacattacctaatttaatcttctagaagtcagaattctgaatttttatgtcaactctcgactttttttttttttttgagacagagtcttgctctgtcgcccaggctggagtgcagtggcgcgatctcggctcactgcaagctccgtcccccgggttcacgccattctcctgcctcagcctcccaagtagctgggactgcaggcgcccaccaccacgcccggctaatttttttatttttagtgagacggggtttcactgtgttagccaggatgttctcgatttcctgaccttgtgatccgcccgcgtcggcctcccaaagtgctgggattacaggcgtgagccaccgcgcccagcaactctcgacttttaaatgttagcggcccaaagtgctgggattacaggcgtgagccaccgcgccyagcaactctcgacttttaaatgttagcggcagaccaaaccaaacaaacacagctgcaggacgggtctggtacgcagggctcccactttgcagtctctgatctgtaggccgaacaacggcaagaactgtctggatcccacaaacatccccagccaaacttctgaggccttaaggggaggaggccttgcacacctgactggagaacaggcctaagaactgcagtgttctgtttcctgctctgctttagaaaagagaggagacagaaaaccagagggtcttttaattggaagcaagggtggcccttcagagtctcagttaagagtcaaggaaagatgagatcacttgggtagctcaagaagggaaaaggatttattagaycatttccaggacagggacccaggggcagtggctgggttcagtgttctcacgctcagaggaagaaaaggcagtggtgaacacccgcctgactgccttaccctgatctaaacgacaccatctcctcccccaaggaagacacagccctggatgtgaacctaggagggtgggaatggcttatgtcactcggtctttgaggcagagcttgggctggggttgcaggggcatcagccaatctgctctcaaggagcaaaacttgggcgtaaaaggaacgggcagtggggctagccggctgtctggaggtctgggtgacctggcagcacggctgcttctcccccgccaccccgccccactccttgacacttccaggtgattttatctttataaataagatgaaaatccaagcagcattaatttaggggaacaaaagatggaaaaaaaagggggggaggcagaaggagctgatgagcatccaggagaggaggaagtaggaagagcagtgtccactgtgtgccccagggcagtggagtgtctctgtggctgcaaggcccttccttctggctccctggcagacggccagacagcagagggaactctgtattgactgggacaagccctggagccctgtctggctgttgacatggggagtgcctggatttgccccaatcaacctcccaccttcaccattgcccaagtgaagcagcttttaactctcttgcccaaagtcctctgagaatttcttcactttcaggaggtcgtctgcattcaccgtgggccgggtggtggccagagaccgcagcatgtccgactgtgaaggcaacagtatgtgcctgagcaggagccaggctccaggtccccaacctcccctcagcacacaacaggcgcagctgagggtgggaagaggtttgccttcaaggccaccccagaggcctgcttgaatctgcctatggcagggaccctcttccctctcgaggcagctcagatgggcctcctcctggtctgagaatctaagctccatcatctcataactccccttacgaacttgctttctttttttttttttttttttttggagacggagtctgtcacccaggctggagtgcagtggcatgatctcggctcaccgcaacctccacctcctcggttcaagtgactctcctgcctcagcctcccaaatagctgggactacaggcacgtgccaccacacatggctgatttttgtatttttagcagagacggggtttcactatgttggccaggctgctcttgaactcctgacctcaggcgatctgcccgcctcggcctcccgaagtgctgggattacaggcgggagccacggcgcccggccaggagccttcttagctgcacacccccaacaccagccacaagggcagacccttgccaggatggcacgggccaggctatgcaggtgaggcgctgcctttgcaactgcgtcacagtcttgacacattcactgcctcactgcaccgcaaagccaaacccatggattgacgtcatattatctggacctgactttacttgctaaagaatataaaatgcaggctaggtgtggtggctcagctcatgcttgtaatcccagcactttgggaggccacgctgagaggatcacttgagcccagcagtttcagactggcctgggcaacactgtgaggccgtttctaaaaaaaaaaggaaaaattagctgggcatgatggtgtgtgcctgttgctactcaggaggctgaggtcagaagattgtgtgagctcgtgaggtcaagcctgcagtgagctatcactgcaccactgcatctagcctttctctgtatgtacaaaatgctaatgctgccacctgcattctgggcccccagtgagtgtaatgccagcttccctgagctacaaaggccattctcaacagcccaggacatagaagaagactattttttatttttgagacggagtctcactctgtcacccaggctggagtgcagtggcccaatctctgctcactgcaacctctgcctcccggcttcaagcgatccttctgcctcagcctcctgagtagctgggactacaagtgcacaccaccacacccggctaatttttgtatttttagtagagacagggtttctccatattggctaggctggtctcgaactcctaaccttgtgatctgcccaccctggcctcccaaagtgctgggattacaggcgtgagctaccatgcctggcctggagaagaccgtttttattctggacccaaaccctcaattttctgggctctgtgcagccctcttccctcccctgtcaagtcacttaccatgcaaaccacaggctctaagagtttgtccccagggacatccatccaagtcatctccatggctcctgggtcccctggtgagcatggagtcaggaggtcatcaatcatcatgctggggttggtgcgagaggggccacagacctgaaaccaaatggatctgactggggcagctgcccctcagtgtcagaggggctcgacccctccggtctctaaggaagtcccaaagagaatgctctgtgggtccctagcatctgaggaggacgggctccttcagaactcgggctgggtggtccgagcgactcatgatttgcatgggactctggcaatctgtagccccaatgccttgatgtcttcctcattaacactgtcacgtctcaccaggaatacagtgacattaaaagtgtgatatggtttagctgtgcccccacccacatttcaacttgaactgtatctatctcccagaattcccacatgttgtgggagggacccagggggaggtaactgaatcatgggggctggtctttcccgtgctattctcgtgatggtgaagtctcacgagatctgatgggtttatcaggggtttccacttttgtttcttcattttctcttgccaccagcatgtaagaagtgcctttggtctcctaccatgattctgaggcctccctagccatgtggaactgtaaggccaattaaacctctttttcttcccagtctcgggtatgtctttatcagcagcatgaaaatagattaacacaaagtggttttccaactgaagtccgctgccttggcaaaacattcccccaatgtccacaaggctcattccctcacaccttcacctcctgtctcaggcatcaccccagtgccatctgcccttccctccatgcccgagacacctctctcctaaccctgctccatctccatcctctgagacactcactgactgtgttgactgtctccccaccaacaacggaaggtctaggatttttgtctgttggtcactcatatcttcccagcacttaggacagggccgggcacacaggaggacccacagcaaatactcagcagagatctgctgaatgaatagacaggtcttcctggtcattttatatccaacactttccaaacactgatttggtgtccaccccgcacaagagcacacagtgctgacggaggaggccgcagcagggttaagacagtaaagtggccctgtcctctgctttcacacaccctgagatggccacactccagaagagctgcagggaggggacagtgggtgcagcccccatggcactggccctcggctctccaggaggcctcagagactgtgtcacctgagcagccggggagcaggaccaggagctgggaaaaaaaaaaccgaacatcccgctcttactatgagatttttctcagcagtggccgcgggcactcacctttttgaagtgtgtggccgactgcaccttcctcacgggctgcatgagagagtcccgcacgatgatgctgatgtccgcgcccgagtagccttccgtcttccgggccagctcgtggatgtttgcatccgtgaggttgtggggagtgctcccgagatgcaaccggaacatctgggcgcgggcagcttcctccggcaaggggatataaattcgtttttcaaacctagagagcccagcacacggcaggagttgacagcggatgatggaatggtattcacggaaggggaggcacgaagatttgagtgaaacggacgcatttcatgggccagtgatgctggcggcacatcctcaacaagccagcctcacaaagggctctgcttggcaggcagacgggaagactccagggaaaaggggccaggctgcacccgggctgccagcagcaggcggaccgtgaccatggtgggaggaagcctccagccctggcttctcctggggaagactcacctcctcctgatggccgaatccaacacccatgggatgtttgtggctccaagaaccagagtcccatcattgttattccccacccctgtggagaaagggagacaaagactcagactctggacacctgcacgggtcagttgaaacctggggacagaccccgggggctttgtgtgtcagcaattgaagccatccctgtgccacccaccactggcagggtcccaagtgagattaaaccacatcttggtctggctgtgccaggtgagacctatggcactgcctgccatgggaggggtggagtggcccgtgaggcagaggcctcaggcacctcttgggaattgaagtccacccgtgccctgaggggctggagctggggagtgcctctccgaggctgagaacaaccaaatccagccgcagctcagaataaagcccagggttggcttcaggtgcaacaagaaccaagggggccctgggcccggcacacaccctgcatctggaccaagaactccgttttgatcctccgggcggcctcactctcattttcatttcgggacccgcagagggaatccacctcatcgatgaagatgatggagggcttgtgctgcctggccagctcaaacaggttcttgaccagcctgtgaaggtgagaaagggggtgaggacaagacgttcacgtccgtgcccgcctgggctcccggcacttccctcttctcacccttcccacagggaggcgcaggccacggtcatgccggaattgcggaaaacgtggtggtgaggagccctcgggccacactgcaccaagaggaggagcacaccttggtgtcagccccaaacgcagagcctcaatcccaggagccccatgcgctagctctgcacttacaacacgtcagtccccttcttccgagcccgtctcatcacacgcaaaacaggagtcagtgtggggaaccatgtcccccacacactgccccaacagggaccgcaacccagaccccaaaaatatcctcacttcctttcccttctcttgtggagcacttcacctctcccaggtcccttccaccttcacttgtctttgttgggactgtgtcccagccgataagctagcgacacactgctcttgggtaccctccctgaaaaccaaaccactcctctgagaggtgactccacagggtgggccgctgggtcactagcagtgccggggctgctggcagagcatggcctggtggccgacttacttttcactctcccccagccacttggacatcagatctgaggaggacacagagaagaaggtggagttgttggcctctgttgccacggctttggccaggtaggatttccctgtgccagggggtccgaacagcagaatcccccgccagggggtgcgcttgcctgcaacagagaaccacagaagttaggcctcctgactggggaaaggaataggaaaagcagagggtctcgagtcccatacatacagtaaaacagggcattctgtgaaacaacggactctactggcaaacaagtgatgggagctacattccctgctgtgccctgtgctatgaccccatgaccttgcacagtgcccctgctatgaccccatgaccttgcacagtgacaccggctggcactgcttcctgatcctgcccccaccctgtgacgtgatcgtcatctcatagctccagccacagcagtgttgtggacaccagcgagcagccaggcctggccctctgcaggccccgggggctgagtcgccactgactcccgggtgcctcggagtgccagccctgcggaagcctggaatttttacattggggtttgaaatggctcaactctcacctgtgaacaagtgtgggaatttgattggcaaaatgacagcttctttgagggcctccttggccccctccagcccggccacgtcgttccaccgtatgttgggcttctccatcacgacggcacctgcgagagggaggccggcccgggcccgggcccggccaaggggcatgagccaacccagcagcggacccactctcatcccctgccgctgccacagggccgcgagccacttacccatcagctgttcttgcagtttctttttctccggattatccccttcact

SEQ ID NO: 94722 - DNA, 119853 bp, Homo sapiens
  misc_feature (1)...(119853): n = A,T,C or G
aaagctatccctctcccctactctggcactctctctcctcctcaccttgcagtgctcttcatagcacacattgccatttgttatattaaatattttacatccatccaataaggagcaaggctttttgtttgttttgtatattccctgcgcccgaaatggtgcctgccacatattcagtgctctattaatatttgttcaatgaataagtgaatgaacaaaatatacaaagttctgggtacagaggggttgaaactgaagacttaattcactttggtccaactttttctagtgattgtagaattgatttttaatccacatatttcaaattctttctgccttctaaggttgctttatccctcaaaattcaaataaaatagctagaacttcctcctgattacaagattcacagagaaaggaggggttaatcatttcctagccagaatttgtgcttcctgtgaatttttgttgttgttgttgttgttgttgttttgttttgttttttgagacggagtcttgctctgtcgcccaggctggagtgtcgcaatctcggctcatcgcaacctccgcctcccggattcaagcaattatcctgcctcagcctcccaagtagctgggattacaggtgcccaccaccatatatggctaatttttttgtatttttagtagagacagggtttcgccatgttggccaggctggtttcgaactcctgacctcaagtgatctgctcgcctcagcctctcaaagtgctaggattacaggtgtgaactactgcgcccgaccttcccatgaatttttaatcctaactggtcatatagcctccaagtttgccatcttttctctggcctcttcctctcaggcagacattccttcccaactttcccaacccaattgataggggcagtggtcagagcagacttcgttacaggttggaggataatacagcagagagattttagtactttttcatgtgctagcactcatgaaaaatgatacctgtacagcctcatgaagtaaactaactgatctctgtggggcttggtataaagtttcattgtgttttccttgtattacagaattgttaaaaactaaaatttgaagtattgagaaaaatattaaactttgagttcatatacaatatcctcataaaacatttaaaaattcttatcttttgcttgcttcagtgaacattttttcttatatgttttctaattgagatataacttacataccataaaaatcaccccttttaagtggtttaatttcagaacattttcatcacaccaaatagaaaccctgtaccccttcacagtcatgctccattcctctcttccctcagctcctggcaactactactctactttcgatctctatggctttatctattctgggaatttcatagaaatggaatcaaacaatatgtagacttttgtgtctagcttctttttgggtgcattttcatatgaggttttatgcttaaaatggctagttacaatttttgatactttataatgattcattcaaattcttgataattactctcaatgagaaattctgttcactcaaatatgtgacaaaagcttatgaatgacttttacaaccataccagactgtgcaataattgacattatacctaaagatgctaatagtcctttcttttattagttgaaccacataaagctatcatttttatgtcaaaactggttgaatattggcagtcacaatattccaactaatattttactgggtaatgtaatactggaattccttgtgataatgtgaatggattttgaatacagttcagttttttatgccaagcttttatttgcagaacatactgtgaaaataaagaataaagatatgtgaaaattaagacagctgcatgggatcagagaaataattcagaaataatgatacctaacataaaagtacacacattaagggagatgggggactttgtgaaagaggggatatataatatcatatatgtgctctttatactacgactaattgcttcattaggatagtgacttgttttctctgataactaaaatataagtcactgcagaaactttagaactatatattaacaccatgagaaaannnnnnnnnnnnnnnnnnnnnnnnnnnnnnnnnnnnnnnnnnnnnnnnnnnnnnnnnnnnnnnnnnnnnnnnncagaggctgatagtgttatcttgcactgtacccatagcctgttgcctgagctctgatttgtgaggaatacagcaccatagaaagagaaaatagcttaaaagtgaaacttttaagatattactttctgaaagtcactcagccaatacctattcagggaattggtcatgggtcttattccacatttgatgcaagattacatatcattccttagaagctgaattccatcttmtctctaggtagaactatctcccatcctttcacctctccaaagtttccaaactcctgccttctctggtcactaggggaaatacacattatccagagaaatgtatacttctttttcttaactacatttattcagaaaaagctctggtacctatctttgtctaaataagaaactaatcatctttcctagactaaagggccatcatttcatacaaggaattgtgctactgtcctattaccagtgttcttgatattataaacagaatcaataaatagttgacggacttatccagaactctggggccagcctggatctctgctaatctggaktttccctttctgatatcctgtgtaatcattgcatgttaaaggtttttacaaggttaaaagccaatttgttctcctatggacgaaagggactcacctgatacaaagggaaggaaatgtatttcctctttaaaaaaaaaacgcacacataaaattaagatctatgtttacaactagtaataataatgtagatatccttgttgtttctagaaataaagaatttctactgtcaacaaggcagttatagtcatagcatggttttaccctatcccaacaaaaatcatttactattcacttccctaatttattgaaagctgtgctgcttagcccacagtagagagctccattaagaatgtgtgttctcaagccagctctttcacctgctgtcttgccatcttggataagttgctctaactctttgtgcctcagatgtctcatctctaaatgaagaatgacctcatagggatgataagaggaatacacgaagtcatagctgtaaacttcttagtacagtgtctaacagaaatggttcactagcactcaatgaatattgaggaaagaaaaaaagagacataaaatcctgtgattatgttgttaaaatcagggctcatctacaagggacaagtttaattgcctgcagcattgatcttcttcttcttcctcttcctcttcctcttcctcttcttcttcttctcctcctcctcctccttctccttctccaaaagtcagtcagaaaactgatcgtgggaaatgtcctaatctgtgcttgactcataacaagtacaaagaaaaagcagtggttgattatgaatcataagaaatcagcctgtgtgccactttaggaaatgtgaaatattttgaggtaaacaaaagtaaaccacgctgctttacacgttacatgttaaagcagtagcccgaaataatgaatatgtctctcttttacatataactgtataacaaatataataggttctaggaagaaccctgtttactgttttagaaaaatgttttctgataactctgtcttctgctgccatactaataatccttgagtatgtttaagaaaggaaaaagagaagttaggaaattgataattatcatttattaagcacctattaagtgttttacacagtgataagcacttcagctacctaacttcatatagtcttaataacacagaggaagatattattagatccattttacctacagagcttagtgttggtacccaagatcacatatctaaaaatttgcagagccaagatttaaaaccaggtcaaacctaggcatttgactactgtgccatatattttgcattgacaattaattatgaagtattgagagttattagtgttgagagtccaaataattttctagctggaaaagatgaagttccctcacttctatattatacagttgaaatattggttttttaaaaaacttcctgagaagtgcaaaaaagaaaacctttctgaaattacaagaaagtaagtatcttttaaattaaaaattactatatagatttaaagtagctaatgtcttaaattaagaatcgtattttgtctttttcaaaataggaatcactctgaggagaaaattggatattacagaagcattgcaaaaagaaaacaccaaacacaacaaaacctaataaattgatagaaacccaccttaatagtggttattccaatgaccttcatggtatttatgagtattgatttttaaaaatttgattagaaatatttaaattatcaaaatgatacaaatttcattcaaatgacagacacaaatagaaagctagtaatctcccctcactatccttccctgagtaaacaattttgaggtgtatcttcacgtttttatatttatattaaaataaaccaatatataaagaatatgtataaggctaagttgtattacataatgttttccattattctactactatgctctttagacttaaatataatagattttcttctaagacaataattcaaatcttagtcagtgattctcaacccttgtgcacattagaatttctagaggagcttgaaaaaaagacattgccatagcgccacccccagagattctggtttaattggcctgggtggggccttggcatcaagctccccggttcactctgatgtgtagctagttagaaccactgatttaagcaatccaaacaggctacatgcctgaattgtcctggtatgtacgttcccaggaaggccctctgctgaggtaacaacaccagtgtttgattgggagagctcaggggggcccagctacagttttaagtctcctctataaggttgactctcagataggaaatgtgtttcatcttaaaggatgttagagacagtcatatgactgcaaaaagtgctactagggccaggaatttcagaggccatgtaaatgacagtgtattctactaggctgggttaattctggggattaagtttgactaagttctagagatttgtccttacctgcagatggaggcttccctaatggagcatcataggaagccacacccagaacttgtttctcctcgtctggcagaagcacgttctcagtgggtgcagaaacttgtttggcttctcttggtctgagagaattttcaagccgaccaaccagctccctgtgtctgtactggtgagctctttactaatagtcaaacatttgcatgctcatttagttttcttcactcttgttgcacatctgagaaacacttgagagaatggaagagagaggcacaatataggagagctgtggagagtttggccccactttttatatttgtttcaatgggataaaacaggcagccaagattattaggttttgttctgagttattggttcggccttcactaaatggcttttcctctttccaaattagacattttgagaaaccagacaggttgttgaaacttatttagaagttttaaaaaaagttgtgaattttaagcaaacggaccttggcaggtgtatggacaaagccacattatcctgagtaagggaacggaagggcaaggtgtgaggaaaacgaccaaatcagaattgtaatatttttcctcatttcttttctagtcataaaaacagtaacattacatattatttatttattttgtggtagggtctcactctgtcgcccaggctggaatgcagtggcgcgacatttttagatttgatctcttttaccctccaaaaaataattgtccagtgttccacgtttagctaaaacagtgaattgttagaattgcagcaaaacaatgaaccaaaccgtcaaccgcgagcaacctgtacttgggaggtgaaagtcagaggtgagattgtaagggctctgggtcactggggcatctgcgctgggcagaagggcagctcggtcaaacagctggagctgggagccggtcagttgccaggccctgccgctgctacgtcacggagggcggggcggtgggcgattggcggtgcactgcagctcgggctgctctgcagcctggcggagacgggaggaggagcggagggagaagtaggttgcgagctcagcacaggctccggcgctggctcccgcagctgagtttgggagatgtctaagtgattttttttttttcccggaaggcaaatggctggcgtggaagcacaacccgctttcactcttcgaatttgtgcttagctcttttcttgtaccttgcgactcgtgaccaacatgctgtgatgtgtgccgagggaggaattggtaagagtgagacggcgaatccctctgactgtcccagccttctgcttcaccgcccacccgcttttcctttctgtttctctctcctgtttctccccgctccacttccctagtcgtgtttagatttgatgacatggctcaaaactacagttctgggctgttactgaacttaaaaaaaaaaacaacaaaagataaaatgattacaccattttcaatcatttgttaaaggggaatttaaaaatctattttaaatgctggattttgtaaaaaggtaaactgcacacgcgggcgcacacgggcacgcacacacacgcattcacacacacacacactcctttgtcatcccgttgtgaaataagcagtttaaagaaattttggttatctgcctcaaaggtgatgaaaagggaaggtgttgaagatttagcccagcagattgattccttaaggttgattccctaaggttgattccttaggaagaaaaaggtgtttgtattggagctttctcggaaatagttttcaaaggagtgctacaaagaagcccccatgcttcccccaaaacactaactttaaagaacctagttgttattcggggcaccctttattttacgttgtaaaacatgtagttttaatttaccacgtacagcagagagacatcagttggttagggaatggatggttattttggtgtctgggaccctgtgcctttagaaagaatatgttttaactgctcttatcatgctagctcaggtttttaaaatgtgatctgaataagaccaaagtttcttcttgcgttcttttcatgctggttctaagcagggagaaaaacaagtctgtatggacagagcraacctctaactcaaaatcaaccttgagagatgcatcaacaaggacaggsgctcctcatccaccaatatttacttgtatcagcctttaaatcatgtaggtcacatttctgtgaagaayagcatcatcgaaaacccttgctgacttgtgaagagcaaaaatcattgcaacggagtagtttgttcagtgcccgcagcaagaacctcccactccgatccacctcaaaaagtaataactgcttcttctggactgttttctattctcactacaaatacgtatcatatacctacattgagatagtttatttttattaaaatgaggtcattttatacatttggaaaaataacttagcaacattttaaagttttagggagtttaaaaataacatttaattttcatgctaatttaacattcattaaattgcatgaaaaagagggaaaatctaagcactctaaactaggatgtggggagtgtttgaccctggcttagcaaaacctgaatacttttcatacttagtgactaaatagaattgaatagggccgggcgcagtggctcatgcctgtaatcccaacactttgggaggccgaggcaggcggatcacctgaggtcaggagttcgaaaccagcctgaccaacatggcgaaacccgtctctactaaaaatacaaaattggctgggcgtggtggtgcatgcctgtaatcccagctgctcgggaggctgaggcaggagaatcgcttgagcccgggaggcggaggttgctgtgagtcgagatcgggccattgcactccagcctgggcaacaagagcaaaactccgtcccaaaaaaaaaaaaaaaaaaaatagaatctcatttattttgctattgtcagtaaaacgaagggaaatgctcaaatatgattataatttataatagaacagaggtgactcacctgtcagacaaatgtacttcctataattgactttttaaattaagggttaaaaaaatgtacacatattcaagccttcattacatgttttctttattgtctgatatagttggaagtagttcttctaatgaagaagaatcaaagaaaatgctacaagtaagattgtctgagaattctcacagaacaatgcactgataaatataaatttaatagtgcttgaagaaaaggagaattgatttatcaactctaggaataaatatatgtgtgctggatgctatcactattcctcgtcagttattccttcgatattttcttagataaatttatttcatttcagaaatcattttagccatagaaacaatacttttttatcgctttgcagaataaggactaacagtgatgctagttttgtaaaagagttgtggccttaatggaatttttttaatgctactcaataaaaggtatatcaatacaactatttgaggcaattacgtggtattatgtattaaaacctgtgaatgttgggccaggcacagtggctcatgcttgtaatcctagcactttgggaggctgaggcagaaagatcccttaagctcaagggttcaagtatctgcatggtcccattttgctcccatctctacaaaaacaaaacaaaacctgtgaatgttcatagcctttgactaagtgatcttgggtctaaaaatatagcctaaggaaataatatgaatcgcatatgaagatttataaatgtttattaccatcttatctgtaatacaaaaaatggaaacaaagccccaataacaaaatatttaaataaatkagtgtagtttatatatctatattgataaaactcagttacaaaagttttttaaaaatttaatgacttggaaatatacttgcaatgtattccrtaaaaaagtgaaatttaatatattatcttatgtgtaaaatataattttgaaataaatatataaaattcatttaatcaaaagtatttattaagctgttactctaagacaatgtcctaaattaataaggattgaaaaagattaatgcagttcctatttgcatacaagtttcttttgcatcaataggcatatccattaaaatatcatatttcccccaccccctagaaaatgtattcctaggtggtaaagttacagcttgattttcttttttatatttttcctaatattccaaaatcttttaaagcaactgttatttttataatgacaaaataccactttcagaaatatcaccaagaaatataataagcaaaaaaaaaaaaaaaaaaaagataaatggtaagctctgtattttacatgctccctttaaaaagatactataaaaagcagtgcgagattgctatggtctaaatgtttgttccctccctttctgaattcatatgttgattcccaatccccagtgtgagggtagtaggaggtacaggctttggaatatgattagattatgagaaaggattcctcatgaatgggattagtgccctcataaaagaggccacaaagagctgccttgccccttccaccatgggaggatgcagtgagaaggtgccacctatgaatcagaaagtgagctctcaccagacacagtatctgctggcgccttgattttggacttcccagcctctagaactttaggaaataacttttgattgtttacaaatcacctagtttatggtaatttgttatagcagcccaaatggactaagacggagacagatgaatactgctatacaaatgatccccaatgaggaaatagatataaatgagcaattcgcaaaagacaaaaaattttaattgtctaaggttagggtagaggggatgttaacctcccaataatcaaagaatcccagcagagcgataaattaccacattttcacacatcacattaacaaacgtggacaacaaatcaaaatgtatcatttttttgggaaaattattcagtaatatgagaaaatattcatgatatggaaaaatgtttatggtatgagaagtggataaaagcaagttacaaaatgatatcctagttttgaaaaaaaaaatcaacctatgcacagaacccaatttattggtggggaataaaccaaagattaatagtatttatatttgggtggtaggattatagttgatttgtatttttctcatggtgttaatatatagttctaaagtttctgcagtgacttatattttagttatcagagaaaacaagtcactatcctaatgaagcaattagtcctagtataaagagcacatatatgatattatatatcccctctttcacaaagtcccccatctcccttattgtgtgtacttttatgttaggtatcattatttctgaattatttctctgatgagaacatttggattataagggaaatcacaaaacaaagctattctgctcacattcactgtttcgcctccacctattttctaaaataataagcagtgttgaacagatttgagctttacttccctttaatttcctgttgatttcatttgccagggcctacggctgataggttttaattaaatactccttaatttctttttctaaagtctgcttattcagcttaaggcctttttgaatgaggaagatgggtactactacattcctcttagtaaaacttacaaggttttaactctttaggtaggctaggtaatacaaatcataattttcttggttatgagaaggaaagygaaaatcaattttgacctgtctcaaaatgttgtgaaatctttktctttgatttataggattcataactacttagcttgtgtttttaaactttcatttccccttaattagactataataatatagttagaaggttttagttaacattttaaattataacatctcttcttctttactaaattctttcctagagagatgtcctcagatattttcttcacaaatattctatttatctgtgatgtcctttagctagaaatcaacatttctgccttgccaaggtcaaaaaataattgcctgaatctgaagcattattatacttttaagatccctaagccaaggactaagaaaaaagtgaaatgctttcaatgggatatggaaactctgaaaggtaatttttactttgagtcccagactggctttctgctcccagattgtcttacttcatttgaatcaggctagtgcatgagaagaagtatggtggtcccaaatgcctaatttgtcacatcttctttgcctgcttgatttgggtcatggtcaggatggatgggttgatgataggaatatgtggatatgtagtattaggatgtaggattggtaacgggcagaggacaggagtggagccagcacgggtggtatagggcaagtgaagaacacgagagtgtggctcatgccagattgttgtgttgcccttgtcagccagtaggattgctgttgtcacagatgtgtgctcagagatgccttaggaagtctctaatgatcctactccttgttaggtaattggcaaactgtcttgtgaagcacattattcaggttttccagatgagtcgtccttccttttctccctttcaatgtattgttcacacttcttgcaaatacatctttttttttttcagtcagaagtcttttattttatttattttgttaacacctctgatgccatgtgttcatagggaagaggttccagcagctcaggttccttcccattggctctcacaaagtgtgcttctctgggtggagcaggctggtgcttcagttgaacccaggtacttttctctttggcttttttctttttctgatcattttccttcatgcgtttcaggaaggtatctcgcctattagagtgcttaatgtgctcaatatgcacattaattctcttggcaagaatcttgcccttaacttgtttacaacaatgccaacagcacgctggggaactttgtagactcttccagttttgccatggtaacactggtggggcattcctttttgaacagtacccattcccttgaaatctccaatatcacgtctcttatagattcacaggtatgtggccaaaggaacaactccatgttttctaaaaggcctagagaacatgtatggggtgccgctcctctttccctttgtgtttgtcattttggcgaattactggaagatggtggttctggccaaaaggaagtgcaaataaatcttataaatgtctgtatcatatcacagtcttctcagatatctttggcaatttcccatattcttcatcttagcaagtcagggcttcagtttggtcccaacctagattttcatttaatttcgcatcacttcttaatttgtacttgaaactgctgccatattgaactactcattgttacttaaataaacagtctccaccctccttgcctccttgccttttctaaaatctataaatctcttctgtcaggattctaaaccaggctcacttataataccttcttttctgggaagcctttcctcttcttcctttctatcctctgacctcgtaccatgctttctcataagactttctggtttccctaaattcatatactgcacgattatcctaattttatcttttttattgaactaaatacttgacctgttctggggctagtttattcattcccaaagcactcagcaccgtgcctaggacaaggtaaaataaatgtaccttagaaaataaactcctagaaggcagataattttgtccgttttgttccctggtttatttccagtatygataacaatgcctggcatatagtaggagtgccaaaaatattagttgaaagattgaaattactgagcaccttcagtgtgttaggcacagtgcattgtttaataaatctctttacaaaattgtgtgaggtggtgatattatttccattttacagatttggaaactgatgctcagaaaggctaaaagcttgtggtaaagggacaactgtgaatctgtttgtcaaacttgtgttcattctgctaaytgctattagcaatttgttgcagttttgaaaatagctaattatattatcagtacttattcaaattaaatgtagtgtgatgtgtaggtaccattgagtaaattattgggatcgggtatttatcatgaatctattttataattccaatgaagatcaacttgtttttaataccatttgtagttttgatctgcctcttatttgtgtttatatactattcttagtaatacttataggcctcaggtacagtttaaatatatgtgttgagacagtttaagtaattgacatgtgtaatccatgcttttattgcattaagtcatgtgctgaagtaatttttagccactgtgaaataatgcttctctatgtaataattatattaatattaattcatccactagcttccaaaagaaaatctttaatacattttcgaaattaattaaatctttcatctatcagactgaattttcctttttatagtttaaacaaaataactaatgttaccacctatctatcttcatcacatatccagtaatatgctatattctttaaagaaaataacagaatataattcagaattttagtctctaatgtgcttatttgcctcatctgtatagcttgagctaataatctgtgggagacctttagaaaacctttgatgtagtctattgatataatcttttgatcttacaatttttcaggggctaaattctttccatttcagctacaaataactctactttcctattcattattctttttatctcttaccattaatctttcttttaagcatgttattttcctttgctttttaaaaacttctgtagttacccaaacagaaaataattgccctatttcttgtatataagaaaaktagtttcactgattatttaaacaataatatatacatcattggtatgggaaagattagctgcataaaaatcatatttaatggtaatgacttcatggggaaaatacacartccctgacttatgatggttcaacttatgatttttccagtttatgatgatgcaaaagagatacacatttagtagaaaccatacttcaattcccatacaaccattctgtctttcgcttccagtatagtgttcgataaagtacatgagatatttaacacttgattataaagtaggctttgtgttagatgactttgtccaactgtatgctaatataagtgttctgagcacatttaaagtaagctcagctaagctgtgatgttcagtaggttagtgtatgacatgcacttttgacttatgatattttcatttaccatgggtttatgaatgagcatctgcattcattaattaaaaataagtccagagtagatttgagctgcctaggtctatgattttcaaagtgtggcccccagagtaggccccatcagtatcacttgagcttgttagaatgcaaattatcaggccactgcagagctactgaatcagagaaactggtgtgattgtgtgcttgggttggggagggggcggcagggagggcagaatctgtgttttaacaagctctctatgtgattctgatctgtgataaagctggagaccacaggcttggagtaagatcctcaggtgagcaggccagtatattcactgggtttgacaggtaggtatctgacttaaaaggtctctgggaaaggggatttcatttactttcctgtatgctgtttcagatacctctgtgttattactaagctggctgcaaaagtcattaatttaatacatgaaactgaaaacaacagtcagaaacacaatgttcaacacttaaaagtttgtgttggataggttttatgttattatttgcttcttggcaacagattccctttaaaaaaacagaattaaactaaacttttgtgcaaatgtttcataagggaaaaagagtaagactttttccccccagttctttgatcttggctgtatttggggataatgattgaaagaagcaaatgtgaatcttatgactttcagtagagagtttgtgcctagggaatcaagttttcttagcgatcctgcatgcttttgaagtggtaaggaacgatacgcctactgtgaccattaaagttgtaactaattaactctgtaaaattaaaatccaagcataaaaatattttcatagtgcatctgtaaacaacataggctgtattcttttaatatactttggatataataaagttagattaagtacctcatttattgctggaaattctatatcccagctcactttatcttaatgggcccatatgatgttgaatgtggtcattttggaatgttgtagattggtcatgttatgaagatattagaaataagcagaaagaattttgaaataggctcttaattaggaattgaaaattttcttacctacaaacttttattttcccactgactttaattttctaaagagcaatgaaggtgatatttgaaaagtataactgacttatttttgagatttttgtattactttcacatcaaaaactctatatgccctacataagtataggcgtaaaaatgttttattgaaacaattatctgagctttctttcgcagactaccatttaaattctgttttcacaactaattttcagaaagaagagtctcccaaaactatattgacayttaagtatgctatttattgaaatttagccagacatttataaggtaacttttagtaattatcttttggtaaaaacaagaaacaaaaaccccaaaactgaatgctttaattaattagctttgcaacatttataattacatgtaatgcttctttgcaggaacacacatatttgcctttatcaagaagcttatacactaaactatgttgaacttacatgtcaagaaacttatatactaagttaaacgtaatttctggtttaatattgagtatagcattattagtatgtacgcatgttacccatggccttatgtgtgaccattcattttcagtattgaagcagcacgcttggcttgcattttatgaagttgtgctttaaaaaaaaaggaaagaaaaaaaagagttaaaggaatgcacctcttttccacatcttaaatgtaaaagcaatacattaagttctgtgtataggcttcatgattatatgaagtttcatcaaaatttaactttttgattaaaatgaagwtctgttttctaattccaaaataagtatatgtgttaatggtaaaaaaaacatggagagtataaaaacactgaaaaaattaaaatctgctattaatagactatcccaaaataaccactgttaatgtttttaaaaatattttatttgaaattcttccatgtttatatattgtatatattcatagttgagattatacttgtatacaggtctaaatcatgctttaaaactttataaactttaagcattttatgagtcattaacaattcttttaagcaacttttttttttttttttkgaaatgcagtttcgctcttgttgctcaggctggagtgcartggtgcaatctcggctcactgcaacctccatctcccgttttcaagcaattcttctgcctcagcctccccagcagctgggattaccggcatgcgccaccgcgcctggctaattttgtatttttagtagagatggggtttctccatgttggtcaggctggtcgcgaactcctgaccygaggtgatctgcccacctcggcctcctaaagtgttagaattacaggtgtgagccaccatgcccagcctaaacatcatttttaacagctgtcttatatttccattagaaatagatttaacacaattagatataatgcagtcaacaatttctctatttctcaacatttgtgtagtgactttcctttttctttttttttttttttttttgagacggagtttcactcttgtggcccaggctggagtgcaatggcatgatctcagctcacagaaacctccgcctcccgggttcaagccattctcctgcctcagmctccggagtagctgggattacaggcatgggccaccacgcccggctaattttgtatttttagtagagatggtgtttctccatgttggtcaggctggtcttgaactcctgacctcaggtgatctgcctgcctcagcctcccaaagtgctgggattacaggcgtgagccacygcgcccggctgtgtagtgactttctaaggctgagttcagtatatttctactgagggccagagaggacatttttagagcatattatcctatgggtctagagaagtaagacaagtaagagcaggttaaagtcccccaaaactatatgaatgtatgccttcattgagcattatgaataaagaaactctttgctacattctacattcagagtcaaaaaaatgctaactctgtcttaaattcttttttttaggttactrctgaagttgaaaatatttttttcctatatatttatagtatatggcttctgtgtttgttcaggctttttttccaactgtgctattcatgtgactattaaaccagaaatgaataatttttaatatttatcttataagatattaattaattaattaatttttgagactgagtttcactctactgcccaggctggagtgcagtggtgtgatctcggctcactgtaacctctgcctcctgggttcgagtgattctcatgcctcagcctcctgagtagctgtgattacagttgcccgctaccacaactggctaatttttgtatttttagtagaaacgggtttcaccacattggccaggcttgtctcaaacttctgacctcaggcgatcctcccaccttggcctcccgaattgctgggattacaggcgtgagccaccgcacctggcnnnnnnnnnnnnnnnnnnnnnnnnnnnnnnnnnnnnnnnnnnnnnnnnnnnnnnnnnnnnnnnnnnnnnnnnnnnnnnnnnnnnnnnnnnnnnnnnnnnnnnnnnnnnnnnnnnnnnnnnnnnnnnnnnnnnnnnnnnnnnnnnnnnnnnnnnnnnnnnnnnnnnnnnnnnnnnnnnnnnnnnnnnnnnnnnnnnnnnnnnnnnnnnnnnnnnnnnnnnnnnnnnnnnnnnnnnnnnnnnnnnnnnnnnnnnnnnnnnnnnnnnnnnnnnnnnnnnnnnnnnnnnnnnnnnnnnnnnnnnnnnnnnnnnnnnnnnnnnnnnnnnnnnnnnnnnnnnnnnaaaatagatcattgtaataatggaacttgttagggtgatactgaaacaatggggcagagtccacagattagctcaaataggccatgaaaatattaggataagtacctatctgtagaagtcttagcttactttatagttgaatcatactagtatataaaattctggcaaacataataatattgtattcaaattgacttaaataatttatgacattcataaataatgacatagtttaggaattaataaaagcctatctatatatgcatgaataagaaaatggtagtggagcaaacagcaggastattgtatgtgaattgccactaacttgctgtgtaatcttgggtaagtcattctttccaaacctctgttttcttctgtgtaaaatgaagtatttagttggatattaacattctttctggctttaacattctgagttttttgtttaagctgttaagcatctttaaaatgcttttcctactttgaagaaatgttggcatcaaacaattcataygtattcttataaaagcaagaatagctaccatttgttaatctattatatgtcagatgtcttacgtacattcccattaactcctcacaacaaccctacagagcagatgatatcattgccattttcctcattggaaaactgagggtcataagaagtcccactagggctgagtgggagagccagaatttgaacccatgactcggaaatactctgttctttccactgtgctacttacctctctcttggacaaatgtgatggcttcttttaacccagagtttctcagcagcagcatttcttgacatttgggactagataattatttgttgtgaaggattgtcctgtgtattgctgcatatttaacagcatctctggcttctttccacaaccaaaaatatctccagatattagcaaatgtcctagggggctggaaggggaggtacaattggccccatttgaggaccactgctctaatacaacttaagtcatcagtagtatgaggacaaacatagttactttctccagcaaaatctttaggccattttaagggtcaagatggaattaaccaagtatatctccagcaaaggaacctacctacttcttcatgcaataatacttattatacattgattgtcccttattctcttaagatgcatcccatttgaagagcattttttgggatgcatggtatagcaacaagaacctgattaatgtttgttaattcactgaaaaagtattcgttgagggcatgttatatgccaggcattgtccagttattggttaaaacagtaaacaagatggccttgtaggagaaacaggtattaartcattttagctcattctcctttatcttcctaataatcttgtaaagattctgtttagaaccacaatccagtgtgtttatcatgttttacatacatacacaacttatcacatgaagctggagtttgccttccttagtgtgaatgagtaaagatcacacactgggaaatttgtgttcttctgccagttcaaatatatattttggctctggtttttaaatgagcacgtatctgtgtgctagcttcattttgaaacttaactgtttatctctcggttagtcttttaacgctcttaccattttgtggtctgaagcttggccacatacatatcaaagtttgtcttatgggaattaatctctgaagtatttcaggtaatgagggaatctcatgaggttcgtgcctgatccgtttactagactctgtacttctggaggacagaaaccatggagttcacataggaattcccatcacgttggtttcaatgcctggaaaagtacctggttggcaatggtagcctttcagtacctattttctaacaaatataaggaaaagaaatctctaaatagtgaaaatagatttcactaaataaatcttgctgaatttttatcttctrcttcctgaagaccactggggtcatttatttacatttcttaattattgtaaggtagttggaagtaaaacttaaatcttcataaagacagatttggacagctgatggggaaaaaagcctgtaaaattattcaaaacaaggagattttcaagtactggaagaaaaccttatggaaatgctttgaagaccctgaaggcatcactataaagaatacgcttgtgctcagagcattggtgctgaattctcagagaagaaaatttatttaaaatgctgtgtcaaatataggaaaattgggtacacattgtataatgatttctatcctggatgaaattgttttgatactttaaaggataaaccttaaactgtctttaaaaaggttactcagaataacttcctcttggagagttttagaacgataaaatttaaatacttcagctgtttctaaaaataagtcctatttgttttatttccttttttatgtcttcctgttgcagagtttcgttagtgtccattttaggactacatgctctagatcttaatgtgaactgtaataacttcagcatgcataataagagctgtagtgagctacataccatgaaatgcctgttattatatcacatttagaggcagtgtgtataagattgttaaagatattctagtctttgctgcatataagaggggtgttattttactcattcattcttgggttcattccacaaatattcattgaaaatctactcattgcctgatattatactcttctaggcctaggccatatcagtgaaccaaaaagacagaaatttctacgctgatggaggagggagacagacaaaagctaaaataccaaagtaaattatgcattgttagaaagtgacataaaggttttatgaaaagtaaagcagaaaaggagaataacaagaggcagatcatatggagcactggaggtggctactgtaattatatgggagcctttagagagttttaagttgtgaaattgtcaggatctaaattaggttataccaggactagactgataatggtggatcaggttgattgtaataaaggtgatgagaagtggtaagattctggatatagtttaagggaagagtcaacagaatttgcggactgacatgatgtgagttgtaagtgaaagaaaccaaggatgactcaaaagtttttgggctgagcatctagaagaagggagctgccattagctgacagggctaatataggggagaagcagtttaggggagagtgcttggacctccatttgcacttgttactgtctggagatgggctgccttttgggcatcagtctggagttttggaaagaggtctatgctaggggaacttgtggaagttctctttggatagctttggtattctcagaaaaatagaaacaaggtcatcaccaggaagaaagtcaggagggagatattggatgtaaagaggagaaaggaaagggtatgaaacagttgtgtatgagagtgggagaatacatggcctggaaatgcagtatgattgcaggcagtgtgaatggccaacttaagagtttgcggtcaggacgttaaagtgactctgacaaggtgttgtgcatttctttccagccactttcaacctgtaggtactggaacagagtacatagagctttacatgtgaatgtaagcagggtgagggttttgccaagaaagaagtgagagaggagttcactggttgagagaatatacaaggaagtgattacagtattaaccataaaatttgaagtaagtaaggaaataagaccacttgagaatatggggcagtgaaaagatggttggtggttgtttatgggtaggatcagtgatattggagttgggttaaaagtgagtcatttatttgaaagtaaattttatttgcatgtattgaattatagttcaaacacatataaagtcctctataaggcacagtaagcagtaaaaatgggtaacctcacctagtacaaaatgaatgttttaaaagtaaataaatgcaaatatttaaatttatttaactttattttttcaaatgaagcatgcctttagcgtttttctctgaataacttaactttaattttttaataccactcttctcctattctctctcccaaccctcacattccttgatgggttgccagagctatatgccttctgccagctcttattcaagtgttactgccctgtatcagagccctctgatagccaccaaggctctcattccatatgagatayctggattaagcttaagtaactacttactaagctgtgccacttgggtgagtttctcactctgtttcctcattactaagtggagataataatatgtactttattgtaaggattaaagtttatgaatgcatttttatcctttgcatataacctgttatatgtctataaatggtagatattgttatgatcttaggtctattaaattaataatatttgttaatgttgaataaccaaatctcaaaaaatgctatcttgtcatttcaataaygtattattttagaagcatgtaggatcactaaggtcaaaacacagtattgctgccatcaatattttcatatatgtttatgcttttttcagctttaaaaagagattaagacatattaggaactcaccataaatgagtaagatttcttttagttcccaataacatagagaaacacatatacaactgcaacattttacctgccttttgctagcctaaaccagctttgagcctaattatkcataaacagtgaataattggacatgtgatcccttcaaaaagaaatctggactgggcgcggtggtttgtgcctgtaatcccaacactttgggaggccgaggcgggcggatcacgaggtcagatcgagaccatcctggctaacacggtgaaaccccgtctctactaaaaatgcaagaaattagctgggcgtggtggcgggcgcctgtagttccagctactcgggggctgaggcaggagaatggcgtgaacccaggaggcagagcttgcagtgagccgagatagcgccactgcactccagcctgggcgttagagtgagactacgtctcataaaaaaaaaaaaatctgaagtgtattgaagaagagaagcattatcgctttcaatgtctgaatggaccatccataaaatatatatatatttgataatatatatatgattatatgtttttaattatacatgtttttcttttatatacgatatacatatacgtatgtatataatatatgtatgtatgtaatattacacatataaatatatattaaatatacatatatgtatgtgatattatatataaatatataaaagctttattctcacgagagaactgaagaaattcttactgagtgcgtgcttggaaacagtaagaatgggtaactagttctagtatgaaacaatgcatctagataccacattctacttttatatgtctttcaaaataaacatgtcatatgtgaaaattctaatttgactctccatcagcaattatataaaacatgtcactcaggtgcagtggcttacgcctgtaatcccagtactttgggaggctgaggcaggcagatcacttgaggtcaggagtttgagaccagcctggccatcatgatgaaaacccatctctactaaaaagacaaaacttagctgggcatgctggcgcatgcctgtaatcccagctactcaggaggctgaggcaggaggatcacttgaacctgggaggcagagtttgcagtgagccgagaccggaccactgcactccagcctgggtgacagagtgagactccrtcttaaaaaataaataaataaaaataaaakaaaataaaacatatcacttattgctgtggatattccttccctcagtctgagtgagaggctgcttctgtgatgtagaacagcatcttctgtttccccaacgtcaaccacagtgtctggcatatggtaggttttcaggtcatgtttgctgagtaaattgaaaatgaatgaacttaatttaagcactcttttctaaagatatgtaagggctatgtgcttcagtacagttgacctttttccatttagggtccttaaaaatgacaaaactattacaaatatttctttattagtggtaaaagtgaaaagtagtatgacttagctttttatgaacttatatagcgcttcctcccatgataataatcactagttatcaaaagtaatttcttatagggccgagggcagtggctctcccctgtaatcccagtgctttgggaggccaaggtgggaggattgcttgagcccagaagtttgagaccaacctgggcagtatagaaagaccctgtctctacaaaagaaaataaaaaattagctagatgtggtggctcatgcctgtcatcccagctacttgtgaagctgaggcaggaggatagcttgagcccagaaagtcatggctgcagtgagcagtgattgcaccactgcactccagcctgggcatcagagcaagacctgtctaaaaaaaaataataaataaaaaataaaataaaataaaataaaattaagtactttaattcaatgttatgggtgacatattacccttgcctgactttttgtatatatctaaaatatggaatatgtactcctactggggatttagttcaaggtcacttaacagaaaatattgaatggcactaagaactccaaggtgattttattcagcaaatctgattcattccacccaatggagaatataaaggattatgtaacttcattattcaagatccacagttttcccacaaaataaattgacccttgtcatcacaaaagcccatattagatatatccatagacggttcatacttaccttcttttccaaagattatgtgaggtgaagaaaaaccttttttttgtagatagaggatagtagttaccaagggagcaataccaacatgtcacattggcacctggggcagcaaagaaaccaccaaagatatcaaaccatcttgatgcttttgtcatgacctatgaggtaaggaatcagtctccctgcagtaataagcttctatagagagtgttgaacaagtgggtcacagatgacacagattggagcaagaccaagttttatcagggctcactgtgcttcaggcagggctggctacctctgatgtgtaggtcaaggagacttttttttttctttttgagatggagtctcactctgtggcccaggctggagtgcagtggcgtgatctcggctcactgcaagctccgcctcccgggttcacgccattctgctgcctcagcctcccaagtagctgggactacaggcgcccgccaccacgcctggctaatttttttgcatttttagtagagacggggtttcaccstgttagccaagatggtctcgatctaggtcaaggagactttcatatcataagtctattgtgaaacaattcctatcttattcttagaaatccatagatacgaaatttctctgtgccttttattgactatgatagagaactcttgtgtcttccatggtttacaacatataagaactttgacattttgtttgtgttttctcatcttggttgaraagaaggttataagtctatcaaggccaggattcattgttctttcttggtcaacttttggaaatgttggttgaaactaattctaactgtattaaatctgcagaaagaattaatccttaagacctcatcaacaatcttttgtataaactagacttctctcttttagttaattctagccttagacatgaggatcttcttgtatccgctgtcaagccattagtgcatagctgaggttacacattcaaagaagatgggcttcccaataacatgagtgatagctaataaattgctcagtcttaattccaactgtgcattttgcaataaagttacttagcatagagtagtgattctcagggtgtggtccccaggaccagcagcatcagtactatctgcaagtgtgttagacatgcagactcctgagccccatcccagacctgctagatcagaaacctagcagggtgaggttcatggccaagtgtggtggctcacacctataatcctagcactttgggaggccgaggcaggtggatcacctgaggtcaagagttcgagaactgcctggccaacatggtgaaaccccatctctactaaaaatacaggaaacaacaaaaaaattagctgggcatggcgrtgcatgcctatagtcccagctacttgtgaagctgtggtggaaggatcgcttgaaccagggaggcagagattgcagtgagctgagatcgagccaccccaccactacactccagcatgggcgacagagcaagactccrtctccaaaagaaaaagaaaaaaagaaaaaaaaaagaaacctagggggtgagattcaggagattctgatgcaaaacaaacatagggcatcttgaaatgattatagatttttttttcttttagaccagtgaacttgtgtatttttcaaactgttggctggtgatgacctcaggaatttaaaaatgctaactgagcccaagagaattcattatcctgtatttacctttggtaatctgccctactgcaaacttttcattaagcattcattaagggaaataggacttttgagaactaaatctgccttcaagcacatttgtgtatagtaaggaacttagtatcttttagatacattctgttagtgatggagtgtagtttttaatatcttctagaaaaaatactataattagaaataatgtaattttacatgagaatatttgattatttaaaattttatatattaatcgcattatatagttggagccaatgattggacatgttgagaaaattttaaaacattctttgaactttacttttttctctgaaaaatgaaatgaaattccacatcaagtgaaaactaaattaaatggcatgtggaagtattttgtaaacagtaattattattaaagtgttagtacttaccaagcaatgcttgatttatgtttcttcaattctgatcttagctgatttcatacctaaaattgaaagcttgtagattttagaactttaattacaggttttataatctgtgagtaaatgaaatattggatgggaaaattaatatctagmatcatgcaggcctgctttacagaagcactagagtattccagagtattacataaaagtaatacattttccttccaaaactttaacttaattttttaagattgtaaatcaatacctctaaggacagcagattactgaggatagtagagtatctagatctaaaacattctttcttgggttatgtgatcatcattgaacttcaagcacctggttgtctatgtggttttacaaagtttgtttttgttaattctcaagacagggttcctatggttggcagagcatcaggtcaaaaaaacatgagaccagttggtttattagcagaaaactctgaaaaattatytctttgaggaatgagctaaatcttagaattatgaatgatgtttctaaaaatgctgcccatcatgttctttattagagcttttgtctactagattgctggactttctcttagtaacagttgagaagagaakattgctatcctcagttagttagttgcctagaagcctcccccattaaatgaagagcagacttactaaagcagagtgtgaccaggtggtgcagtatgaggtgcagtttaagaaaktaaacatagatgaataattgatacagttgttagtatcaatactgtgcacacaaattctcagctaatatttatgaataaatattatagagagaacactttgtaaaaagtcacaatggtagttaacccttacttaggacttactatgggtcaaacaagtgctaagtgctttttatatattaactcattgaatcctcatagcaaccctttgagcaagtaaagctggcaaattggggtgccagaaattgacattggcctctggctccagaacctgtgctctttatcactctatgctgcttacaggttttagaaatacactagaagagaaaataatgccctcttgaaagagtctttcaggcctggagaagcagattcctgctcttaataaaggtgaatgatacaatcacaagctaaaagtgaatgcttctgttttctcaaaattagatcttacactcctacttctaatggcagaaaagccagattgagccatgcaaaaggaaatgggatgtctttatgttcttttctataaaattcagtgatcaacagacatttatatatcatctaactttggccaagcactggacagatgcatagagaggaattaggtatgttcccgactttgaagaataaagccatctgtaacacactatggcaagtgcatatgagccatgctcagggttctaatgggagcagagcagagaacaccttatggtgtctgttgtgtggatccctcccaatctccctcattccgtggtcaagctaaaacagtctcaaggatgaatagaggctggtgtggtgagtgggtgatatggttaaccagccctccagaaagagagggcagcatttggagaggtgcaaagtgtacactatgctttgcaacctccttaactcattgggagtactaactaaattacatattcatagaccccattccagatcctctaaatcagaatctccaggggagaggctttggagactgtgactaacaggggccccaagtgattcttatcagggggtcttgggcaacagaggacaagtggaatacagttcgttcatgaacgttgttgggatgagttttggagagaatggtgaagaatgagattaggtagtatgaaggtcactttatgtcatgcctgtctttttgattgttcggttttctgtttgtatcctacctaatgctgctacttctcaggcattaataggtacattgaactgagcatttacttggacaactttaaattgaaagctttggacctaagcccaatgtataagattcccacccttgacttatctgtggcttgagaaacacttaaacaggagagtggggaagaggatgagcattgtttatttatagcatgtcccttgactattaatcgtgtttcattttatttgttagaagactgagtagctactaagtagtacagctaatatttgagcctggrcttacagagtagaagaaatgtgatttgtcaaaaagtggtgagcaaagtgctcattccttcatttaaaacgggtgaactgcaaaatgcagggttggagtcaaggtccatagtaacctctgttaccatatgaagatgtgtgcccaccattcccttgattcttttaagaaaaaccaattatcaatattttatgtgaatttatctctattttaaaatcttgcttttatatgtgtgtgtgtatacatgtatttatgtttataaaacaaaaccatgtgcttgccgacactctgatacaaaataagtcattgggtagaattttgctgtaggactaatggtttgtgaccactgtgttaaatcatctctgaagtctaagccttaagatattatgatttgtgataacgcttgatgaggtatgacttactgatttgctttcctatcatatcttaaagaaattttcctcaatatttatgtggagctttattaataacagaggcttctccaagtactaacatacttttaactttgttggaagtgacagagaaagagtgaaaggctctttcctgactactgtgggcacagtgctgccctcccctgagccttcttgtccaactgctgtctttcagtaattttctaccataagattctgttttcttcttcttttttaaatctgatattttcaaacattgaaaatattatttctttttattcgttttacaaaaacatccactgaaataaaataatttaaaagatctttataaatattttatctttagctctctgtagaacaaatacctatttctataggaaaagctttctgtgtrtaacattattgactgagggagaaagggttgtaaggggaaaattttgttttaaaaacttttgaattgacaaayacaaattgtatgtatttatggtgaagaatgtgatgttttgatatgtggatgtattgtggaatggctagctcaaggtaattaacatatgtattacctcacatactttttattgtggtgagaacactttaggtctactctcttaacaattttcaagtgtacaatatattgttactgtattaaccatagtcatcgtaatatacaatagatctcttcaacttattactcctttgtagctgaaattttgtattctgtaatagtctgttttctgcatttggggttgtggatctatttaggaacatggatctatccatttccatgtataatttcagcttygtgtgaagccacacactatcagtatctttttaccaacatgtacactaacattagtggatcttgaaactaattcaatgcatcctaactagtactaatatgagagagagaagaaagaagatccctgtatgcattgcaggtggtaagggtaagaaatatttcatagaacttttgtttcaggggkgtgtgtgtgtgtgtgtgtgtgtgtgtgtgtgtaaattctactttgcatcatagaatgtatttcttactgggagagcagttaacrcatttcaaaagcctctgatctaggatgactaaatagatccttggtcattcctgcctagtataagagtttaaattttaaactagcaatttgaaaggattttcatcatatgttaattacctccaagcctaggcttttctcctcagtcatttcaaagcacttctctgtctagcttaaatctgtcctctgatccaagggtcacttttcaggagaatgacagtgctgaagagagagttcttacaaaatgatgagctgcccagccttggagagtaggagagagactcttgtaggctctagaagggggccatggagggcagtgagccagccctaattctatcttcaccaaaattccttgaaaatgaaaagaaggaataaaggagaaaggcaatgtgggagtaaatagagaatctcatgtacatttaaagatattgaaaagtcctaaagagaaggagacctagaaatacttttgcaatgaaatgttttgcagtcgttatgggcttgtttcttaggaactgagtgacttggggaaagatgtagttcttgtctgggttgtggaataaaaagctgattgtttctgtgaaccagtaagtatgtttgctagcgtgaggttattagtcagacacaccacaaattagcagaagttaacacctcctgtatttgtttcatgtttgtttagttagtcctgtttggactctcaagaaattgtatttcagrayttaaaaagggaagtgagatttagattgttgtatgagattgtggacactagagggataaacattcttatgtcttagtaagaatttaatggcaagtgaatgcttccttttaargtttccagaaataaatcaaattgtgctgatttcaaccttttaaaaaaagtcacatttgtcataatggtaacctaatgtgcattatgtgaaactaatgaaaagcacttagtatttatgttcagtattttctgttatctattgattcacttataaagcactatcttatgttcttattctgggggagagttctagatatgttatgaactacattaataactcaagctgccattgtgagcagccagttaaaagaaccaagccacttttgtatgcttggtgaagtaaaaaccagcttttcaaatatacttyggaggcagacttttaaaaaattatattgaagagatagtaaatgttattttggccagtcaatcttcattgatttagttatctayaaataaatattttagaggccaaaatccaaaagaactgtttttttttcttgttcctattattagtataaaaccgatgaggctgacatgaatattttctctcatgataagacgggctatctattgtgggtccaatatccaggcacaactacatatactcagaggctgttgttcttcccatcaaaagtgattgtctgcctgtaatcccagctattcaggaggctgaggcatgagaattgcttgaacccctttctttcctatttttgttttgattaacaaactcacattttgttttgattaacaaactccaggtagggctgcatttcttggaaaataaggaaaccttagaaataaggaaaataagggaatatgttatcagtttgattttgttttgtagcaaagcaccccaaaacttaatgacataacatttattgattcataatttgatgggtgggcaagtcgggctgagctcagctgagacatctttattctaatttgtgccttctgggcacactcgcttgttagtggtcagttggcagtcagtggtgttatttatgtatttatagaggctatggtggtaaatggggcaactgaggcatgtggtgtgggctacagtggttcctagaacagtgagagagaataagctccagtgaacaagcacttttcaagcctctatttgctgtcttgtttactagtgttacattagctgaagcaaggcacatggccaagcccagacaccacaggtagagaaagactctacctcttgattggcagagagttatgcttgcagagataggaagaatttgtgggcatttttgtaatccacatagaatgggtttttttgatgtcctrtgatttatcagactttatgctatgtgacttacctgttattcatttagtcctcaaaacaatttcctgacatgcctggcattatgcccattgcaaagatgrtaaaactgatgatcagagaagttaagagacttgcacaaattaagcccaaattgtttgcttcaagttatggaatggccttttaggtgctgtctcttgttaagcaacatgatcagatgcttagcccatgaggcagaagatgtaygctttatttggttaaaatggagttctaaagactacttttactttctcccttacatgttgaaccattgrgtcatatatttatttggtatagaaaaaatattaaaatttcactatctttgagacgtttcagaagctcatggaagtgtggtttttgtttgtttgccaggtcagctacacaacctggatcttaccacagtttggatatgactgaggctctccaatgggccagatatcactggcgacggctgatcagaggtgcaaccagggatgatgattcagggccatacaactattcctcgttgctcgcctgtgggcgcaagtcctctcagayccctaaactgtcaggaaggcaccggattgttgttccccacatccagcccttcaaggatgagtatgagaagttctccggagcctatgtgaacaatcgaatacgaacaacaaagtacacacttctgaattttgtgccaagaaatttatttgaacaatttcacaggtactgttttatttttkaagaaaaccttagaatatcattctagttgatatataacrtatttttcattttcataaccctgtatattacttaaacctaagacatgtgacatcatccttgacmattttgatacaaatctgttgtggaatgatgactcctcccattcacgtagcactttccaattggaaaggtgttttctctttaccagaaaagatattgtaattcacatattataggttaggaaatgacttgactgtggtttagccaatgtcatgccaatgtcaagtagcagaccaggggctgcctctgggggtcttcttactcttgctttagtgttctttccaggaaaccacgcgcattttaatttcaaatttttcttactgataataggaggaaatagagctctgaagccagtgcagatgtcagatgtttaggtgaaacagtgacctaattcaacttaatatctcattcatggacaatctcctgtgagtttaggcactgaaggaaatggaagtgtgagtgccactcctctccttgtggagtttgcagttgtgctagggaaacacaatatatacatatataaaacaaaaagacatagggaatgcaatgagtgttataaagggctgtcaaatagaatgaaagcctcaaaaagagaaataataatggtaactggagcaatagaaggggaagtgacatttgacttaataacagagggtgggtgagatattcaaagcagaggtgtgagcaaagcatatttcagatggaggaaggagtatgaataatggcataaaggcagtagcataaaaggcttgcttgaagcctgggaaatagtgttctctgacttacatgtaacatctgtgctgaggagcaacaggaagtaaagtcagaaagatagatgtgacccaggaaagaggtcttgctatcaggataaagagttgagggccaagtctgcaggcacaattaccatgcttacgtcagtatttcactatggaagcagtgtggtgggtagatgaaargacttagagatgatggcagagaaaacatttaggaagacattgtatatatcccagtgaattgtaatggagacctgaccttggaacaatgtgggaatgaaaagaagggtgatctcttacagatactgtggatttagtgtaagacattcagtgaaaggagtaaaaaagatgatgtgaacatgttgagctgtgatgaccagaagtactaacagaaaaatgaaaaacaagagtaaaaagaaccttggctggaagagtattttgtttttgtaaatgtattcaagacgccaatgcaagtaaagagattctccatattctttagtcattccacatacattcattctcatyattcattctatatatgttccatatgcatttattaaatagtggctatgtttaaaggacagatttgaatttgttgaattaatggctatgtagccctatgtgtgtttcattcttttatggagtttggaatctagtgtacccaatggaataaaaacctgaaacagagttcaaggttagagctataggtttagatgtggtccacctggaaagaattgaagccacagagtagcagaaagggttaagaaagaaattttcagagtaaaaagatttggaggtgacaaaaaagaagtatatatagattattcttttgagaagtttcatggtcartggaaaaatatgttatcaaaatgtaatggcaggattaagattttgtttctcctttaaggaaaagggtgtcttgaacttaccatatggcccaaaattagggacccatggagaagtatttgaatayataaagtagaagaatggaagaagttcctgaagaaggtggttctgaatagcataaaagaagaaatagaagagttagtcacaagagaaaagaaataggcttttctactcaattttgaggcttgtttaaatctaatgtttggatgtacaaaaggctagagggttgatctttattttgttaattaatttttataccacatgaactctgaatttcttctaaatttttatgaacttttaaaaagaaaatagtattttctcttgtgcttttttctatttttttattgtgctcaagaccgtcccactcaaatatttactattttatatttaataaataatatctcacattatttatttattgattgattactctacccaggctggagtgcagtagtgtgatcccggctcactgcagcctccgacttctgggttcaagtgattctcgtgcctcagcctcctgagtagctgggaccacaagcgtaggccactacacccagctaatttttgtatttttagtagagacggggttttaccgtgttgcccaggctagtctcraactcctgacctcaagtgatctgcccgcctcggcctcccaaagtgctaagattatagccgtgagccaccacacccagccctgatatctcacatttattaaagaatgacacaagccagatgtctagcagggtaataaatagttcattaagattcattgtattctgctagttctatattctgtaacatacaaaatctactaatagaaacttacagaaaaacaatatagtactttgcctctgacatcagtccttgaagtaacttcttaacacctccctttgtgtgtttgggttgcagagctgccaatttatatttcctgttcctagttgtcctgaactgggtacctttggtagaagccttccaaaaggaaatcaccatgttgcctctggtggtggtccttacaattatcgcaattaaagatggcctggaagattatcggaaatacaaaattgacaaacagatcaataatttaataactaaagtttatagtaggtaagtgtaatgggacctttgctaaggactatgtatgtatcattgagaaatatgcagaatgttacttttttctccttaggtgtgaccaggacccttttgtggtggtgttggtgttgttgctmttgttttcaactaatatttcgtaaagtcctatggtgaatttaattcaagtgtcagaggaaaacaaaaacgtataagccattgtcaacccaggagccgacaaagcaaaagcttctgtaactcatgtataagtggaattaaaagaattaaacttcagggccgggcgtggtggctcacgcctgtaatcccagtactttgagaggctgaggcgggtggatcgcctgaggtcaggagttcaagaccagcctgaccaacatgatgaaaccctgtctctactaaaaatacaaaaattagccggacgtggtggcaggtgcctgtaatcccagctactcaggaggctgaggcaggagaatcgcttgaacccaggagggggaggttgcagtgagccgagatcgcaccactgcactccagccactgcattccatcctgggcgacagagtgagactctatctcaaaaaaaaaaaaaaaaggaggagaatattcttttttggtgtgcacaaaactagagcatcccatcacagcaacaacagagarcattcataggaggaggtctttttaggggcatatttgctgtgttggagacttgtattttcagtatttatgaaatagagagtctatgtagccaagaataaactcagtgaaggtgagtcttaaactgtagtgtatattatttgcagctcctgggtttttattcttagatgtaagttaatacttagtaaaccgtatagacaaatataacttgtcttcaatcttatgtgatccaaagaggaaaatgttaggaaaggcttctctgaagaagtgatatttaatctgaaagctgcagaattcgtattttgttcattattagaattcttcagtgactttcacaatgtttgtttttatgatctatcaagaaaacaaggaaaagaactttatttatcttttgtaagatgatttgagatttcttggataatgagaaattagttctgttttttctcttatactcatgtccagtctaaacgaaaccagaaaaacacatgtgttgtattttaaaatgaaataatggtataagtcattggttttcatttaaaggcatagagcatttgactaaaacagttctattaataatttagtaacatttgaatgcttattatataccagagatagagaactaaaatatcggtacagtctctagcctcaaaaaatagctataagaaacaatactttacaatgattrtrtgatgaacaaagtccagaatttggccagttttaagattacccagtgaatgtcaaatttagcaaatggaaagaatgcttattatatatatttttgaatacaaatgcaaatatataaataatttcaggccaggtgcagtggctcacacgtgtaatcccaccactttgggaggctgaggtggctggattgcatgagttcaggagtttgagaccagcctgggcaacatggcaaaatcctgtctctaccaaaaaacaacaaaaaattagccaggcatggtggggtgtgcgtgtagtcccagatattgggaggctgaggtgggaggatcgcctgagcccgggaggtggaggttgcagtgagccaacatttggccactacactccaatccgggcaaaagagagagaccctgtctcaaatgaatgaaataattacagatcttaattgcaatttggagttgatagtgtgtgtttatttgcttttctaggttgttctacaacatttaatctgattctctcagttagctgtgcaaccttgggcaatttacaaaaagcagctaaacacccagtttcctgtattatgaatgtaataataaaacttacttcatagcacctagtcttttccaagtgctaggtaaaagccgttatgattattattataggttaataatgactatttgctagagtttatgtttgtcacatcgagtcatttcattaacatttgagaactcctgaaaacactgcacaatttttaaaatattaaaattacccagtggaagacctggtataacttttttctcaggtgtccttttagacatagtccagattgattttcatataaacttaaagatgaaatgcagtattatagtcagttatttaatatccattctaagatgttcctttatgtttgtgtttcttaataggctcaggtaattttatgtgtttttatctgtgtataatataatttgcttttgtttggtattgtagaagaaatagtgcttatgtttttcccccagatcatttctggaacaattattataaggttataaagaaataaagatgggatataaaaccatgccttgttgatttaaatatgctaatgtaaatgtatatgaaatacaaagaaatcaacttacaaattatttctccacaaatttagggtgaaattatgggggctatttagcaagtttttggaagaagcatattaacatttctaagcagataatttggttcttttttgtagtaggtgrtgtttcacaaggcgcttaattttctatagaaaagtatcatttggaataacaaacactagtctagaaattaatcatttaaactctattatacccccaattaagttagaataagctattatagaaaacctgactttcttaagatttcccttaaaataggggccacttataaggttttaaaatctgttttaacataatgaaactgtcttgaaaataagactrttaatcattcaacaaatytgagtgcctgctatgtggtaagcactgagagacttagaggatttaaactaaaaatagatacaatgtctgccatcaaggaatgtacattattttctgacctttaaaaatcaccatgttgttgatgttagaagtttcaaaatattagttaacattttaggattatcttataaatccatagaatttcatgatttgtaaaatgagaacttcagtagccatctaagataattaaccttagtaacacactttacgaaacaaaaattttagattcttcaaattttcttgaaaatacacaattaaaccacattttatttggtggttatcagaagtgactgtagctggtagtaaactctagtatttgagagggtagactctggatatacctgccttgtttcaatttacagggccacttaagagctgtgtaacattgaacaagttacttaacttgtcaaggccaattttttctaatttgtaaaagtggggctgtcctgttttcatgataccaaccacaacattgattcaaaaattaaataagttgatatatgtaaagcatctaataaatcttagctgattttgtgcccaatgataattcattatttgcttattataaataattcagtgttttattggaaacatactaaaaataccaaaaagaataattaattcataatcctaccctttctctctttaaagatmaagtgaagtaggcgtccacattccccacccttcattcttacttctcccttttgtcccttaccagctcccatcctagtggaatcactgttaatcgttcagtgtgtattagttccaacttttcccaatgcttgtgtagcagagctgtttgctactgaacttataagaaacaaaatgggcctagaagctttcctaaaggagggattgtggatgctgtgtcctggtcattgagagtcacacacaagcacaaacyaccaaggagatgcaasaagttctagttgtgcatttaggctctggggaaagaagaaagtcctcttactagttttaattatatatcaggaaaggaaatgtagccttatgtttccatctcccaacactgtaaatgttccaggctagttaaatgtggctgtgagcattgtggtttaacctgtggttgctttcccaccgtgctctctgaagccttctttattcctccactgggactgatgtgctgtctcacctttctttgcctgattcattcttgaacaccctttaagactcagttcgggtatcacttcctccaaggcccagtgcccttcctgtttgcccccatagtagcctgtagacagctcccttttaggaaattgctgtttgtgtctctgtttcaaattttgaccataacctctctagagtggggaccctatcttaatcatttttgtgtattttgtactatgcacctaacatggtaactgggatattaatatcggtatatgtttctagacctgagctagccagtgattgggaaaattagctagtgttttgttttgtttaaatcttggtacatgctacaaatggggraaaatgaagtgaatttgaatgtgaaagtgacttcatttgagttttcttctaatatagagaaagaaacttgttccttagagcaatgttacttcttatatttgcaagaatatgaaattcctaacccaaatgtcaaaatctgtctctctttgggccttcacgagttctcagcaaatttcctcctggctttcttcagatagaaagtagagagcagtaagcatgaattatgtacctcaaattataccatctgtctttacctactttcttctgaccttagatgaagagggaattccctttcttgtaacagtaatccttccatctgtatttttcatctcattcctgttgcttctctctagcttcaaccagcatctcctctccctcctttttcttccaccttgccttctgcattggcttctcccctgcatcctatgtgcatgcccagttcgctcgtctttactgtcctttgacttaccttccctggcagtggctaccttcaccccttattcttttcataggtaaccttcaggaaatattctacttcggtaacttcttttttgttttgttttgttttttgagacagagtcttgctctgtctcaaaaacaggttggagtgcagtggcgcaaccttggctcactgcaacctccacctcccgggttcaagcgattcccctgcctcagcctcccgagtagctggtattacaggcatgcaccatcatacccggctaattttttgtattttagtagagacagggtttcaccatattggtcagaatggtctcaatctcctgaccctgtgatccgcccccctcggcctcccaaagtgctgggattactggcatgagccaccgtgcccggcctctgtaacttctaattactccctgattcacagagattacactttcttcttcactcttccaatcaacaatttcacgttatcaactttctccaaggccaccagacctaacagccaaatactgtaggcagctgggtctttattatacaggactcctctgtggctttcaactattgtgactccctcttataaatttccttcttccttgatttctgagacaccacttatctcgggtcttctttcaccttactatcactttgaagactccctgagaaaccttatccttacctggaatcaactgccatctatgtacctaggacttccaaatctttactcatgatctccagatcaggaccctcaaactgctgggcagatacttcaaataaaagcttttcaaactgaagttatctcacctgtgatacaaccagttgcttctaaaatctgagacctgtgacagcaccatccatcacctcatagtacacgttaggaaccatagtgtcaccctggataattcctttacctgtagtaagtccaaaaacttgtttccggtacctaatatgtcttgatttcatcttttatgtatctgtgtcgctactgccttaattctgaccatcttcattcctcccctgaattatttcaataacttaccgttggtcttttggccatactcctaaataaactgccatccaaaaatccattcattactctgtctcaggagttggcaaacagaagtatggtcacatccttctttgtctggacctttagttactctccatttcctatggaatgaaattcctactcctagatatggcatggaggaccgaactgtcaaaataatacccctgcctaccttttttatstttgctctgttacctgcctctatggaagaatgaactgatatgcacagacactagggaaaagtttggaaaagacaaaataaactgttgatttgcctttctccatggaccaataaacccttcagataatcaaagatttcctttgttggtttcaaccttgtgcatttggtatgtcctgaaaatgtacttcttaggtagccttttaagctaaatatttcttgaaagagctgatataattctgtatggcagaatttgttaaagtatttgtgtaaggtgtgattgctatttaatctgatgaaataaaataagtgtattttgttatatttgtcacaaatattagttttttatggatatttgggagacaatgaaggaataagacagaccttgttaacttttgttggtggcatcatatgtgaaatgccacctaactagctaacatgacacatgacattctactatacaaatgtcctcattttaccctagggaaaatgacattctactatacaaacgtcctcattctaccctaacgaaaatgtatcgtggagcataatggtaacccatcctatctgcctgatgggaagtgctgtgagcagatgatgtgtcttatgcatcttcagatccttggtatctgaccacagagcagcatgaaggaattactttgtatctgaatgagcccatcaaatgttgattgtaattttattccagagttagactcaaacagcataatggttcaaaatcccacaggaagaaagagctgagaaatatgtttcagtggctcagtaactaaattttcaggtgaagcatttgtggaatttaggggttgccaattctgcggcttcccttttagcattttgtttgtttgtttttgtttgtttgagacagctctgtcgcccaagctggagtgcagtggtgtgatctaggctcactggagcctccacctcctgggttcaagcgattctccygtctcagcctcccaagtagctgggattgcaagtgcgtgccaccatgcccagctgatttttgtattttagtagagacagggtttcaccatgttggccaggctggtctggaactcctgacctcaggcgatccacccatctcggcctcccaaagttctgggattacaggcgtgagccaacttgcctggcccctttgagcatttaatagattaaaatttaccctaatacttaatatawactttaaattatacgctaaaaaatttttwaaaaaaaacattgtatgtatttttcacttgatattctttttttttttaaacttttttttaattacaggaaagagaaaaaatacattgaccgatgctggaaagacgttactgttggggactttattcgcctctcctgcaacgaggtcatccctgcagacatggtactactcttttccactgatccagatggaatctgtcacattgagacttctggtcttgatggagagagcaatttaaaacagaggcaggtggttcggggatatgcagaacaggtaagtcatatgttctcagttagtggcttattaacattttttttcagaagatgactgagctcattttcacattacagataaagagatttttaattcattttcaccaggatgaaatagaatcccagaaggtttcattcacttccagatatgagtggaagtatactcttttctagataagaggataaaatgacttcagaatttacacactttagtgtagcactcatatttttgagaatggaattaaaggaacctaacagaattatttttcttaaacttagactttgtatcttatttttagttatcattatttctaaaatctgtaattacttatataccaaagcttaaaactttagcagcttttcatgctacatagcttttagacgcttctcagtattgtgcagacggaaacagaaaccttgaagttatattgacataggtttaaatgaatcacaactctgctattaatttactgtgagactttggacaagtcatttaaacactttatgcctcagttttattatcttaaaatgaaaatgatggtatctactctatagcattgttgtaggattcaaatgaaatagtacatatgttttcatatgtattatttgaatttcactatgtatgaaaacagcatatatagtgtctaaatagtttccctcccctttctctggaagcatttgagatgaagtattttacaatttaatgatttttgttgttgttgttgttttgagacagagtctcgctctatagcccaggctggagtgcagtggcgcaatctctgctcactgcaaccaccgcctcctgtgttcaaatgatactcctgcctcagcctcctgagtagctgagactacaggcacgtgccaccatgcccggctaattttttgtatttttagtagagacacggtttgaccgtgttagccaggatggtcttgatctcctcacctcgtgatccatgtgcctcggcctcccaaagtgctgggattacaagagtgagccactgcgctcggtctattttttttttaacccaaactactgttaagtcagggttactccgtcttacacttagaaaccaaaaaaagtggtttagcctactaatacctttatctttggtaaatttcatcttgtcatattgggcccacctctctacctatggatttcatttagatcctctgtgattgatatgcctcctagactactgtcattgtcacttctgtaagtagtctggtaccaaagacattgktaaaaatcctgcactacttaacgttctgttgtaccactacacacccactatgagtattaatcagcaattaatatttgcattaaaagtaatggcaaaaagcatgactacttttgcaccagtctaatactaatcagcacactgtgcattcattaagggtgaatctggtgacctcgattgtaatcctgctctaaacactttcttgttttgagaactttggcaaattactgatcctctttgtgtctctttcctcatctgttaattagacccaattattttagtacctacctcatggagttgtgaagaagaaattagctaatatatttaaagtgcataatagattttagtgtgtcgaaagaactccatggatattgctcattagaaaataaatcatatcatataattcacattttcatgtttcctattatatacttattaattatgatatatcaatatcaatagcatttatcttactggtcaaatggatatgaaaataaaagtaatgaaataaggttgatgtggcttgtttcaggggaatccataccttaaaggagctatgtcctacaaaggcactttgcttatttgttcattgttttcataaagaattctgaaattatctgtctgatccattagaaaatattatagatattgatgtctagtttatttttaaatgttttatttataaaatttggctgagatcaaatgcatatattctcggagtgttcacatatacatttaatctcaaaaaccacttatgtgattaaagaccaacaacaaaagtattttcagtttttcagtgctttattgataaaaaggtgtttataagtataagctctcttctggggagtcctgtgtggatttcggtaaatgactcagtcattcccatcacctgcagatgtttawtaatgccctaggaccattctgatcccaaatatggatcacatgattatgcctctactttccttcctttgggaaattcatgatatgaacttcattgcaraaaggcttagcattattttaagaattgatgaaagtgataaaacacttcaatattaagggtttaaccktgaattcttattttgtgattcaaaaaatatttttaggactctgaagttgatcctgagaagttttccagtaggatagaatgtgaaagcccaaacaatgacctcagcagattccgaggcttcctgtgagtaatacrtgatgaacatttgtgggtgtaagtggaattgtgtgttgcaatcgtacttaatttgataaagtgtttctgtgcttatacccttgttaaatcactaaaggtcgtaactttagccacctactaaaatagtttggcttattttaattawttaataagtatttatacacacacacatacacatataatattcattctggaggtatcttgtggcatccatatcccctttgccagggcagctagaatttggggtccttacctaatttcaggcatcagcccatgaatgctctatggccttgagccaagttatctacccactttgatcctcagtttcctgatttttaagagaagacaattagacctacttcacagtgtgagaagagcaaagttcccaaatcattttttgaaatgagaattatcctgatactattaccttgataccaaaagcatataaagacatttaatagaagaccaatatcctacatgagcatagatgcaaaaattccacacaaaattataacaaatcaaatccagctatgtatgaaaatgataatatattatgacccagtgggacttattccccaaaaatcaggtttggtttaacattagaaaataatacaatgtaattcaccattctggtactatattaacaaaccatattaaacaaatcaaaagggaaaaactaggtggtcatctcatagatgtagaaaaagcatcttacaaaatctaactttcattcctgcaaactagaagtagaagggaacttaatctgataaaaggcacccatgaaaaacctagagccagcagcatatttaatcatgaaatacttctcccctgagatcaggaacaagacaagcttacactggaaggtctagctagtgtagtcaggcaagaaaaggaaatgaaagatatcaaacaagaaagaagtaaaactatcttttattcacagatggtataatgttctttgtagaaaatctgnnnnnnnnnnnnnnnnnnnnatggtataatgttctttgtagaaaatctgatgaaatctccaaaaaactactagaaataatgagtttagcaatgttgtagaaaacaagatccagatacaaaaatcgattgtattttaatatgctaataattagcagatattgaaatttttaaacatacaatttattatagcatcagaaaaatggaatgcttaagtataaatctgacaaaaaatgtgagctacctgtacactggaccactaaacactagtgaaacaaaattgaagagctacttaattggaaatcagtttccccccagatttatctatagagtcagtgaaatcccaatcaaaatctcagcaaggtctttaagaaattgacaatcttattttaaaatttaagtggagatgcgaaataactaaagcaattttgaaaaaacaagaaaaaagctagaaggctaaaaccacatgattgcaagatttatcagaaaggtataataatcaggccagtgtcattttggcataaagatagaccaggagatcaatggaagagattatagagtctagaaatagactgacacatttatggacaactggtttttaacaaaggtgcaaagacacatagatggagaaaggttatcgtttcaacaaacagtactgcaacaatggggtatttatattttcaaacgtgaactccaatccatacctctcaccatttacaaaaattaactgaaagtgaatcctagacttaaatgtacatctacagttatgaaaactttcagaaaaaaaatggtggaaatctttttactttgtattatgcaaagatttcttagatacaacaccaaaatcacaatccattaaagaaaaataaaagaactcatcaaaatttaaaattttgctcctccaatgatactgtttttacaatgaaaagacaartcacagacaggaagaaaatatttgcaatccatgtatttcctataggacttatattcataatatataaaggaatctcgaaacccagtaataaaacaaacaatacaactttaaaaatggtcaaaagactttgaactgatgtatttgacatatgaatggcaaataattttgtgaaaagatgcaggttaaaccacagagctttacctgctacaattaaaaagatcaagtgtaccaagtgttggcaaggatgtagaggaacttgaacactcatatgctactggtgggaatgtaaaatagtacaaccactttggaaaacaatttggaaattttggaaaaagctaagcatatgcccattatataacatggccatcccactcctagacaattacccaagaaaaatgaaaatatttgtccattctatgacctgtatacaatgctcatagcagctttatttgtaatagccaaaaactggcagaaacccaaatgttcatcaacagataaatggataaacaactcaatgaagtttgttaaaattctaggaaaagtaacagtgcgatggaaggaaatgtagaatataatagtagcatcttttaattttatttttataggttcaatggtctttgtgcagatttattacatggatatgttgtgcaatggtgaggtttgggtgcctagtgtacccatctcccgaatggtgaacgttgtttctaataggtaatttttcaaccctcatgcccctcccaccctcctttcttttggagtccccagtgtctattatttccctccatgtgtccatgtatacccattctttagctctcacttatgagtgagaacatgcagtattgattttctcgttttgagttagttcacttaggacaatggtctcaagctccatccatgttgctgcaaaagtcatgatttcattgttttttatagctgaatagtagtccatggtgtgtgtgtgtgtgtgtgtgtgtgtgtgtgtgtatatatatatatatacacaccacattgtctttaatcatccattgatggacacttaggttgatttcattacttcactgttgtgaatagcatgataagaaacacataagtgtgggtgtgttcttaatataacattttcttttcctttgggtagatacccagtagtgggattgctgggacaaatggtagttctatttttagttcgttgagaggtcttcatactgttatccacaggggttatactaatttacatacacaccaacagtgtataagcattcctttttctctgcatccttgccaacatctgttatttttttactttttagtaatagtcattctgactggtgtgagatggtatctcattgtggttttaattggcatttctctgatgactcgtgatgctgaccattttttcttatgcttgttggcctcttgtatgtcttcgtttgagaaatgtctgttgatgtcttttgtctactgttttgtagttgttgatttgtttgagttccttgtagattctggatattggttctttgttagatacatagtttgcaaatatttcctcccattctgtacattgtctgtttactctcttgattgtttcttttgctatgtagaagccatttatttcaattaaatatgatttgtctatttttgttttgttgcatttgctttcgaagtcttaatcataaattctttggttaggccaatgtccagaagagttttttctgggttttcttctaagattttcatagtttcaggtcttacatttgagtctttaatccatcttgagttaatttttgtagatggtgagaggtagggatttagtttattcttctacatatgcctagccaattttcccagcgccatttattgagtagggtgtcctttccccattgcttatttttgtcaactttgtcaaatatcagttggttgtagacatgtggcttcaattctgggtgctctattcttttccactgatctatgtgtctatgtttttgtagcagtaccatgctgttttggttactgtagccttgtagtatagtttgaagtcaggtcatgtggtacctccagctttttttgttgttgttctggattgttttggctattgtgacttttttttggttccttatgattttagaattcttttttctaattctgtgaaaaatgacgttgatattttataggaattacgttgaatctgtagatttctttgggcagtgtggacatttttaacaatattgattcttccaatccatgagcatgggatcttttttcatttatttgtgtcatctacagcttctttaatcagtgttttgtacttctccttgtagagatctttcacctccttggttaaacgtatttctaagtattttattttgtgtgtgtgtggctactgtaaatgagattgagttctttatttggttctcagttagaatgttattggtatatagaaatgctactgattttgtgcattgattttgtgttttgaaactttaccaaagttgcttatcaagtataggagtcttttggaggactctttagggttttctaggtataagaacatgtcatcagtaaacaaagataatttgacttcctattttccaatttgaatgccttttattttttttcctcttgcctgattgctctggttgggactccaagtactatgttgaacaaaagtggtgagagtaggcctcttgtcgaaccggaacaacggttattagggggaatgctttcaactttccccctttttttatgatattggctgtgaatttgtcatacatgattcttgttattttgaggtttgttcctttgacacctagtttgttgaggatttttatcatgaaaggatattggtttttatcgagtgttttttctacatctattgaaatgattatgtgggtttttgttgttgttgctgttgttgttctttttgtttgtttgtttgtttgtttgtttttcgagacagtctcactctatttcccaggctagagcagagtggtgcgatctcagttcactgcaacctccacctcctggttcaagcaactgttgtgcctcagcctcctgagtagctgggattatagacacgtgccaccatgcctgggtaatttttgtatttttagtagagatgaggttttgccatgttgaccagtctggtctctaactcctggcctcaggtgatctgcctgccttggcctcccaaagtgctggtattacaggcatgagccactgcgcccagcctagttttagtttttaattctgtctatgtggtgaatcacatttattgatttgtatatgttaaactatccttctgtctctggaataaaaccatgtgatcatgatggattatctttttgatgtgctattggctttggtttgctaatattttattgaagatttttgcatctgtattcatcagggatattagcctgaagctttcttttttgttgttgttgtgtccttgccagatttgggtatcatggtgatgctggcttcatggaatgagttagggagcccctaatctgactcctctgacttgttggaatagtttccgtaagatgggtatcagctattttttttttgcactgatgagaaaatttgactataaatccatctggccctggnnnnnnnnnnnnnnnnnnnnnnnnnnnnnnnnnnnnnnnnnggctttttgttgttggtaggtcttttattaatgattcaatttcatttcttgttattggtctgttcaggattccatagcatctgtaagtagcactggatacagacatctgatagggtagggacagggagggaaccatgcagtggaaagagggaaaggcttagtcttaatcaggagataatgctggaattaaatcttcaagaatgagaagatgctaggcaaacaataaagtgaaaagaatggctggcatttcaggctgagggagcaacataggcaagagcacagaggcccaagactacagtgtatttgtattgttctatgtggctaagtatgtctggaatgtaggtgagcaataaggcagatcatgaagaggccagagcctgaagggccttgtgtattttgttaaaaagaaacatttatcctgaagttattggggttagtattagaaaartccttccatggaaattttagatggtcttcatgaaaagaagttaggcagctgcccctctctcatcagaaacattctcataagccatctcttaggatgagtccttttcaaggatcatttcctctagctgctgactgtgaataaagtttcctcttgtaaatgtcagaatcaggggctgccattttttcacctgaggtcagatctgtcttagggtgcagcctattcagctgtcctcttcccacagctgggcacgctgactccctgatgagctcagacttgcccctagcaggatgtatttggtttatgcggtggagagaacaggaaggaactctagtctacactctgtggtctggagcatatagcactctgcaaagaatctggcccagtgcatgtagttagatttttaaaaaactgtatgagaacactgttgccacagaaattctgatcctgtgtcccaattctgatagtttgtctagtgtctgagactccggctcttgctacctcagaactgtttgctcctgtatcatcttgacaagtagttcaaaatttctgggagtggagccatggcctacttttgtcagcctctcttttcaccctttggatatggttcttcttaatagacacattcgagcatcatttgctgtgctgggcactgagtcttgttcagagcacttacctagttccaaggccctattagctttctgcctatccaaattgtcacttttccctaggtttctgggcaacatgtttccctgccctttgattcccacttgtgatggctcctctgatatccgtttgctttgaaatttgctgctttattttctgactatcatgacctgactgccaaagtggcctcccttctggaatcctcagattctgccttcactagtgattggaggggcttttgtctactctattcatgtccatcctgagagctggcctcagccattggcagggaagcatttaataagagaatcagcctaggtagatacagtgattttctgtggaattattttaatacactaaactggctccttattcttttcctgctttgtggcctgttttcaaaaattaagcacaaattgagatgcttaagctacctgtctatatgacaccttctttgatcttcatrctctaaggtagaactgacatcctccctatttgtgactacactgtatgctgaatatcagattcgtatcatactatcatatttttactactcttacatgtttctacctgtattacctcctcttagaccacgggagtccagactgcatgtttgtttttctatttctagcatctgggttggagcgctgggcacatagtagatagatgtttcatggaagctgtatgtgacagccagtgcctcatacaaaactctgaaggtaccataccgtaagtgccaattatcagacacatgtaaaatacaggacatttttggaatttgcagtaagtgcaattaatatagaagctgaactttgtctaatggtggtacctcaaagtgatttaatggtgaaaaataaggatttcaggggaaaawatcttaatactttctgaggaactttggaattgatgatttcatgtgttaaattctttcctataaggactctagggataagaaaaaaaaaatgccacattgctgaggactggctggtgcttacttgggaatgctaatatgcaaatgtgaatgttgagacttcatttcctcatctgtaaaacgaaaaagctgaattagcttaaactcaaggatgcatctggcttttaccatctcttcgtacacaggcctgtgcatgtgcaggaatataaacatatatctgttagaagaaagtgctttacaatgtatgggagtgaaatgataaatctgtctttctctttctttgtagtatgaaaccttatttgaataatttttattttattttaattgtaatttcatatagcaaggttatattaacaacttttatatatgtaaggaacaagcagtgacttgtaaattgaagtttattgctagaaaacaacctaattttcatactgaaattaaaaggacagtttcaaaatatgtgaaaaccattactgttgctctgtatttttgccactgtagcaatttagtcaagtaattacttcaataatttttaaattatttattacagaaattttcaaacacaaaaaagtagaaagaaaagtataacgaacacccatgtggcgtcactcagcctgagctatttcagtttttccatactttgtttccacttccacttcctttcctacccctccactgtgtaatttcactgtaaatactttactatatacttatagcagataaggacttaaatgagtcacaaccacaataccattatcacacctgacaaaacttaaccattccataatatcatgtaataccaagcttttgttcaaatatctacaattgtctgaaaaatgttttctaatagttgtcttattctaaccaggatcaaaacaaggtctacactttgcatctggttggtatgtctctacatttcctctcccaataaattgagtcattgagcttacagaattgatcacattctagattgaggtgacttccccctccttgggttgggcttcccctccatcgttcattttctgaataaaccaggtcattttgcctgcagaatttaccacgttttagaactggccaactgcattcttgtggtgatgtttaacatgtttctctggccatcttattctctgtaaaccatcaagggacatttaaagaatctgatgaaacaaacagagtctctccctggaaaatagcaaacatgtatacacagatacatacatacacacacaaaatattgcatacaatttcaaaggcttcacagatcctctgaagccacagaccccagactgaaatgcctaatagaggtttgattaagcgcctgtagggccatgactttctttcccataaatcatgaggcccacgatgtctcctygtcccattgtaagattagtgttatcagccttatcctattattataaagttcccatcagcctttttaaccattgattttagcagccatcgcttatcattgcctagaatgattcttgatttcatccaagtygaaaatgataatttttaaattctatcaggatttcttccctcatcaattactaagttatcctaaatacagtttatactagaaaagcaggattcttgcttggaatatttttttatagtaatagaagttgtcaaacaatgactaccattgaaaataatgatagttggaaacttgttgcatcttttcctagacaaagtagtaactgattcacaatagcaaagacacagaatcaacccaaatccccatcagcggtagaatggataaagaaaatgtgacttatgtacacaccatggaatactatgcagccataaaaaggaatgagatcatgtcctttgtagcaatgtggatggagctgaaggccattatcctaaatgaactaatgctggaaaagaaaaccaaatatgacatgttctcacttataagtgggagctaaacatttagtacatatagacacaaagataagaataatagacaccagggcctaattgaaggtggatggtaagaggagcatgaggttcaaaaaaccacctcttaagcatgatgcttatcacctgggtaaagaaatctgtacaccraagccctgcaacacacaatttacctacatagtaaacctgcacgtgtaccccctgaacctaaaagtctaaaaaaaaaaaaaagaaacaaaaaacaaagcaagtaactgcaataaccaaagtaaatgggccagagatttgaaaactttcttgtgaaatgcctttttactccaagtcaaaaacattcaagggccatgagatttatttttatatccccacttttgctgtttaaaagtgaatttatatgctgtctttcttatagagaacattccaacaaagaacgcgtgggtctcagtaaagaaaatttgttgcttagaggatgcaccattagaaacacagaggctgttgtgggcattgtggtttatgcaggtcggttatgtttctaattttcattgtctactctgtgcttttctacaagttaacatttttcatttactcaaaaatgcaatctgttgaagcagaaaggaaattttgcctgataaacttaattattggtctctgtttttctaaatggatcacaaaagcagattgaactgacaaaatagatcatgtaactgygttttattaaattgtctgcaagagagatttttaaatatggtattcgcttcttggctttaatttgtacattttctatcatactgcacatccttcataggccatgaaaccaaagcaatgctgaacaacagtgggccacggtataagcgcagcaaattagaaagaagagcaaacayagatgtcctctggtgtgtcatgcttctggtcataatgtgcttaactggcrcagtaggtaggtaaaatttgattatttgctgacatcttttcagcaagatattaaagtattttatttcaaaattayatctgtgaatatttgactttggtaaggtggattttgtcagtagtgttttacctcatatccttgtctctttcatcctttagcctgaaaaatattaatattgactctatccatttacgttttgccatagtactgaagaaacctggagagtgacttaaagaaagagagagagagagagagaatgtatagccttttgaatttgaattttgtttccaaaaacaaacagttgatgtccaaccaaaaygaatactctcattccttctcctttaggaataaaattttttgtttgcatgccatatatttagcatccttttgatgtctgtgtattttttgaaaggtcatggaatctggctgagcaggtatgaaaagatgcattttttcaatgttcccgagcctgatggacatatcatatcaccactgttggcaggattttatatgttttggaccatgatcattttgttacaggtaattttttatcaagcttatggtagmattttaacatctttgctgcttatccagctatgttcagtttcacatccttttttaacctacrttaacattttaaaacttgtttggatcttcttaggtcttgattcctatttctctctatgtttccatcgaaattgtgaagcttggacaaatatatttcattcaaagtgatgtggatttctacaatgaaaaaatggattctattgttcagtgccgagccctgaacatcgccgaggatctgggacagattcagtacctcttttccgataagacaggaaccctcactgagaataagatggtttttcgaagatgtagtgtggcaggatttgattactgccatgaagaaaatggtgagtgttggatttccgtgaaaaccaaccttagcattggtctttttttgaaaccacttaagtgttggatgtctgacaattctgacatagaagtggtttatttaatcattgagtacttaatgcttccagatggcctttaaacttcattgttgttccttcaaaagctagtaggttaaagtcaaggagtctactgccatggtttctttaaaagtgaagtaaattactagtggaagtaaagggtgggaattggagggatgacaatgatactgtactataaatacttttgaaaagctgatgaaactatgggccatttctttgaaaaatattttggaaataattccaaaggcattacaggctccttctagcctcattgtttggcccctaggtatccattggtgcttgattaagaataactagtttaagcaaaatgagctgaacttctgactctaaagaaataaatttgtaaattccaagtttacaaaattctttaaagagttgaactttattaattttgcagtttataaaagaaatatgtgctcctttgaagataattcattgaagtgaacaaaacaaattaaaagccctactctcccaaggttaaccaccattaacaatttggtgaatatgtaaccagctatttctttatgcatatttctctatatgtgaacatatatttacacattttcccttttatgagttagaacatgtaatagtactatttttgtaaattgtttattttattcaacaatgtcttatgaaatttttcctaagtcagttcataacttaaaattaagaatatagttttctactatatgtggtcaaacttagtttgctatgcttaatggtggccacttagtttgttaatataaaagcacttgtagttaacgtcacttattcattcaccaaacattttgtgagctcccaatatgtggcatgagtccctgattgcatgtaatttagatttatgacaagaagatagataaacaagattaaaattatgataaataaaattcagcattcattatgcatcttggtacatatatatttattcaattgtttttataagacacattttcctctaaaatatcatgctaatttacattcctacaacccagaaaaataatgcttctttttcacacccacccataatgtaatgaagttacactttttaatctgtgtgatttttacagacaagttagcacttcattgtcttaatttgtctctgcttagtaatgagatttttacctttttatatgtttttcagtcatctgaatttccttggtaaattaattgaattatttccctgttttttaaatggggtttctttgttcttgttagtctgtgggagagcttttatgtaaggtcagggttaatgttcagcttgtatgcttagtctagattgtttgtggccagcgctgatgttcatttgtgcactcatttaaaacaagttcttaaatacttaggatatcaaccctgatgttatattatccttttcttctatatgtgacaaatatttttstgtttcattatttatcacttattagttttctatcactgcataacaaatcaccacaaaccataatggcttaaaccaacacaaatatgctgtctcacagtatctctaagtcaggactctgggtataggataagtgcctcctctgctcagggtctcccaccaggttgaaatagaggtgtctgctgagactgtgatcttattgatgacctcatcctatgcttagctcactggtatttcgcagaattcagtgtactgaagttttaggactgaggtccttgcattcttgctgctgtcatccccaactattcgcagctccaagaggttgcttgctgtttcctgccaaacagcctcacaacagcagagcagtttgcttcttcaaggccagcaacagaatttctcattttgaatctttctgacatcagggaagtcctgaatcctttttaaaggactaacctaatgagatcatgtccaccaaggatagtcttctttcaaattactcgaagtcagctgattaattacatctgcaaaatccttccacttctgccacacagcataatttaatcatagcatagtcacaaggtgcatctaccacgggggacaggactattcagggccatcttagaattctgcctaccacagtctctaaactgtgcttccagtgtctcttcttatcaaaaggtttatatctttgttatataaatttgtcaattattatgaatattatgatttctgatggtagtgttgagctcagacaacccatcatacctagtattgttaaaaaatatactatattttcttctaggtacatgtatttttaagtcaactttggtaacctgtgagtgtaaggggtaaaatgttaagtgtttattatgtaatcaccatgcaaatgtaaaatatagctaatcatattgaatatgatgacactctgcattatgtttcatcttatagtaaaatttaaaagccatcactaacccccatcaaacagaatagatcactgttagcattttaatgcacttttggggtcttttttttaacacatatgtatatgtttttgtttttaagatatgcatttgcacgcacacacatttatgtttttgtctttaaaacagaaatggcatcgcagtgtgattttacttttataaccatttttcttaagacttcatcattcattattccataaaatggaaccacattaataatgctacgctaaacctctatagtgcatttgtgaggttagtgttttcctgaattatttgaccacagatccccatttttaggaactgtcttgcagcaacaatgtttcataaaatatacagtgagaagcactgctttatttttttgtatttataacacaaaattttgtgttcataacatttcraagagctaatactagccctcctccactctagtcactgaacatacatatccctgcccaagtgagtatttttcgtttatgcctcctcacacagaaaagataccaagtgactgggaatcaaatgctatcctgactgaactgtaattgataagctacctgtttgggaaccaaagttctagaggtactaactttgcctttgaccacttctctaccatagacacacctagagcttctggtcttttttatgcagtggtttaaaattaaacacatgtgtatacacacacacacaaactagtggagaccagttctctctrgaaattaattctgaggcatattttcactgaagtgaaaactattttaacagtgtatctgtgttttaatggctagtcctttagggttttctgcaaaagtgttgcctaggagayaatttggtgaagaatattgctgcttggaaacaacctctcacacatggaattgcactaaacacacctgacaacaccattgtatattttaaaaccttctagcttcgaaatgtgttccatgtactggcagcatcagcaacacccgggcatgcttttaaawwgcagaaactcagacccctcttcagagcttcaattaaatgcattttaataatatccccaggtgattaatatgcatattaaaattttaamaagccactcctttaaaagactttaaagagaatgactttcttaaaaataaacttttaaatttaggataattttagatttacagaaaagttacaaaaatatcctggagggttccagcatgccctcatgccgtttcccctgctgttatcatcttgcattagtcatatgatatatttgagataagtaatgaacaaatgctgatacattattattaattgaaacccatattttatttggacttccttcatttttacctaatgttctttctctgtcccaggatcctagctaggatgctgcataacagccatcattttggtttctctaggtgacagtttctcagattttctttccttttgataaacttagcagttttgagtggcattattctgggattttgtagaatgtccatcaatttgggcttgtccagagtatacatttatgatgcacaatttgtgaatctgatttacatggaggcagtagcattgaacacttttcaagaacaaggattttggaatcaggcctcctgagtctgcatcccatttccactacctacaagctgtgtggcccttaacaactatctaatttctctgtgcctcaataaaaaggatcaatgacactatctatctcattggatggttaagagaatgagagaagataattcacataaagaatttagaacagcaaatggcacaaaatgagttctctataaatatagctgttgttactgttgttgttgttgtaaatattgttaaaataagaaataggcctatctcttaaggagctcatggtccgatgtgggaggcagatatgtaaacataaattatcatgttcattgtcataagatataaagtcagtgttcttgttccattttgttttgattttcaggcagtcagtattggaggtggattttgcactgattaaggcttgggatgttgaagccaagatactggatgttcttacgatgctggaattgtatggggaatttgtttagaacaaaggtttatatatcaaggatatatgggtgatacagttggaggaggtttagctgagtgtgttatttacaagcaggcaaaagttggaatgctggaaatgtttgcagatttagttcatagtgaaagggttgatggaggattgatgatacarttgaaggaagctcatctgaatgctgttcacctttgtttcgggccctttggagagcacattgaaagtatgataaactttttgttctgtagactcatgcccacttcttccatatatcaaattgatgcaagtaacaggctataggaagattactgggtatttgaagaggggaatgggaagaaaagacagatcggggattaaataatgaagagaaataaagtagacaatttggtaccyatctcaatatctaccttcagacaaaggaaagaatagactttgtaagttttttcttatgaagcaaaaagtaagaattcctgccctgctttgaggcattcatgtaactattttggagtctacyttaaggtaagtattaagaaatattaaagaaatactaagaaatattaaaagtcataacgatttggataagttttatcaatattataataaacctttgtttctcatacaatatatttttttaacacagggtctcactctgttacccaggctggagtgcagtggcatgatctcagctcactgcagcctcaaccctctgggctcaagtgatcctaccaccttagcctcacaagtagttgggactatgggcacatgccaccacgcatggctaatttttgtattttttgtagaggcaggatttcgccatgtttcccaggctggtctcgaactcctgggctcaagctatctgccagcctcggcctcccaaagtgctgggactacaggtgtgagccaccacacctggcttcacacctaatttttataaaattctcactgagcctggaattatagctccagtagctttgttttctgartcacattgtaactttactggtctatttccttttttgagaaggagtctagtctcgccaggttgcagtgaagtggtgcgatcttggctcactgcaacccctgccccttgggtttaagcagctctcctgcctcagcctccctagtagctgggattacaggygcccgccaccacacccagctaattttttgtatttttagtagagatggggtttcgccatgttggccaggctggtctcaaactcctgacctcaggtgatccacccacctcggcctcccaaagtgctgggattgcaggcctgagccaccgggcctggcctatttccttttcatagcttccacaaaatgattaaaggttgagtcacttcatatcttcttgattccacttttgcaattgtactgactgaacaagttttccctacagtaatagctgagctacctggaactatactaattatatagttgcatgaygactgatttccctaatgatggctaggagttacacgatcattaaatatagcctccatgtttatatgtgttttgaagtacagtattacccccttatctgtggttttactttccacagtttcaattacctttggtatagtaaaataagatattttgagagagaaaaagagagatcacattcacrtaagttttactamagtatattgttataattattctattttattattagttattgttgttaatcttttactatgcctaatttataagttaacatttatcataggtatgtatgtatatgaataaacatagtatatttagggttcaatactatccrtggtttcagacatccactgggggtcttggaacatatcccctgtgaaaaaggggaaacttctgtatttttaaaatattttttaaatggtgttacrtcatcaataaattccttgagctactcaaggatttatcagtctcagcactatttgggctagattaatctttgttgttgggggctgtcctgagcattgtaagatgtttagaagtatccttggcctccacccactgaatgccagcagcacacttcacccagttataacaagcaaaagtrtctacagccattgccaaacccccaggggacaaattcaccccatgtggagaaccactgagccaacytattatatacaaatcactgctgaggagctataatatagtgggtagtgtgctggctttggaggcagaagacctaaatcgaatttccagctccacccacarctagctgtttaatcatggttgaactgcttaatctctctgggtcttaatctcctcagctgcagagtrggcagtgatagtttctacctgatggcattaytttgaagataaaaaggaaataggtatacatatatattatacacacacacacacatatatatatgcatgaaaaaaggaggatctcaaaaaatattaacttcctaccccacaactttcccttaatactagggatatttcattgacatgtctattgattcattcatttattattcatttaataaatttttatttaaatgaaaaaacatggactcattgaaattaagcaggggatattggccatgtgttaaaattggccctgttaacatatataggtagattcagaaacagtaaagcatggggctgtggagtttaatagaactgattttaagactaatttgtaccatttttgtgagatggggcaaattacttaagtttatttatttgtaaaatgctggtattaatagcatctgctgagatataatgattaaatgaggcaagtgcctggtacataagcaaatgcctggtacattctgcacatgtaatctataaattcccaatgagtggtatgagtaagagtcagtatagctacagaggtctttgtggaggagctggcatttgaactaaacttctaaagatgttcagtatttatgtaaatagaaaggacgcaaatgaatatttcaagcaaaggcatagatgaaaatggaggagatcagaatctctgggacacaatatgtaaaccagtttttgaagctggaaggtcatactgggaaacattccgtgttgtttaggcagattatatgatgagacttgcagagctgggaaagatcttaaagtcaccgaatccaaatcgttcattctgaaatgtttcattctgaaaacaaaggcccagaaacagcaagtgattttgctgaaagccacttagtctttgaaaaagttggtactggaacctaggatcaccacatagacccttagcctctccttgtccttaaagaatacagacaaaaactattataaaaaaatagaatgtgcaaacattcttcacttcatagaataacttacccaaagccatactttatcctatagctaaatagagaagactggcaatccaacaagcacctatttatcgatggtctatattccagacactggatacaatgctgaacaattcacataaggcccctgctctcatagagtttctattagagaaaatattcacaaatatattacttttttaaatcaagaaaaaaattagcgataagtacttggtagaaaattaaaataaggtggtataatataaaatgattggatggccactttgaactggagggtcaggcaaggcctctctaagtgggacatggggcttagatctgaatgacataatcttgaaattccgtaggaaaggcttccagtcagaaggaacatctagtaaagaagccctcaggcaagggtgagcttgttacttttcaaagtaaagaaagaaggccagtgagtctggattttagtgggcatgtagaaagagaagtgaagttagataggtcagcagggctctgatcatcttgagttatttaagccaggatagggagtccagattttattctaagtgaattgtaaagctactggagtgttttatgcaggaagtgatctgatctgctttatcttttaggaagatcactctagctactatttgaaaaatggattgcagaggggcaaggagaccagttatgagactattgcactggtccagttgagagatgatggtggcttggactaaggtaatggatatggagagaagtagagttatttgagatattttttggatgtatggaggacagatgttagttatactttgaaaataagaagataggaaattaggaggattctagatttctggcttaagtaactgtgtaagtcgttaagtttcatttacaaagatagtacctatcaactgctgctttgaagtctgagattatcatattggcaaaacagacagaattctctgaccttttggagattgtattctactggatgattcaaaaaataaaataaataagatatatatgtgtagatggtggtaggtcttggcataggatctattataaattgtgtggtcagatctgggaagtcttcacttcccagtgaggtcatttcaaagatgggaccagttgagatcaccaaggaagatgcaggtagagaaggaaggtgcttctgcagctctccagtatttgaggactaaaaagaagagacagcaggagaaactaagaagaaacagtcattgaagtaggaggaaaaacagttaagtgtgatgttagagaaaccaaaagagacatttcaagaaggaaaaaatggtcaagtctgttggatattactaagggttcacataagataaggatggacgtgatcattggatttgacaacatggagctcattggtgaccttgacaacagcaatgtcagtggagagatggggacagaaagccrtgaaattacttaaagaragattggtgtcagtgaaagagggaagaattgtaagggtgaagtcattgagttcagggaggtgagattcagatgacaagtggagaatttggtgtctgaaacaaagagagatgctttgtccacagtaggaggaggaaaggccgagagtatgagtaccaatgcagataagtaggtagatttgaygatggaaaaagaagggaattttgatctgattgcttctcagtgaggtataaggtaagttcattgaccaaggctatgggaggtaggccttggcagccaggtttgaaaggggaggagatggtgtgaaatagctgcttaagtaactgcctgatatattcaacttacaagtggctcttctcagacattgactcagtgtgctttttatcccacagccaggaggttggagtcctatcaggaagctgtctctgaagatgaagattttatagacacagtcagtggttccctcagcaatatggcaaaaccgagagcccccagctgcaggacagttcataatgggcctttgggaartaagccctcaaatcatcttgctgggagctcttttactctaggaagtggagaaggagccagtgaagtgcctcattccagacaggctgctttcagtagccccattgtaagtakgaatgcatgactagagtcttgcacatccacaatgtatgatgagagaacagccttgtaattatgatagagtcaaactctgttgtcttttctaccttagaagagactacatgattgcagctcagcaagatcaccacacataattagaagtataaacaaacaatatcacactagtctacttttaaaaaataactcaatgttgagaggtagtataccatttctgaaaaaaaaaaagkagaatatttctggccagggctgattatgtgtgagcctgaagaaggctgccttggtttaagaatcatggctcactcttagaaccagcaaagcttaccagagttatctcgtagtcagataagcaagtgtaatttatagggacattcataggccatgtggtacattgaaggcctttttattgctctgtaatctcccaaatcccaccaaacttgtggtttttccctattcctggctccagaaggtcattttctaatatatcaatttcagagctcaacagaatgtgttcatgagttccagtgggaagtgtcaggaactgtctagtcacatccattaacaaatccattttactccagaaaaactagaggaccatgtagatgatggggaaaagagggaaaggtgctgtgtgaaaraaattagaaatttttgctgtatttaaaattacctgtataaaagttcaatttccttctttgccttttacattttattaagtcttgtgttttaccaaaatgaggatttcccagccatcagactgataatacctacaaaataggtgacaacaagaataaaccagctttggggaagctttrtgtttctacattgaatttatcatatggttttcacagtagagacatgatatgagtagacccctggggtctcatttgtcctgggaaggcctcgarcttcccaggatcctggctcttctcaaattgtcaacaaatgcataattacagcaactggagtgatcattttagtccagctcatttctgtggcactaatataaaaactattatattatatcttagccatatgtcaagtgattccaagacttaatatttctccaacttttgaaatggaagaagaatgtacacagttcattctgtrtactcattataagcccatatcggaaatatatttttcttctatttttctatsratatattttcttctattttatctttttatctatccttgtattgaacttttcattttccatccacctgaaagtaagaacatrttggctcttgtttagacagaagcagcacagtttggtaataaggtggatctgtgccacaccttattggtttcttgatcaaacctcaccctattcgtggaacaaatgattggttatttcttagtttaaagtctttgtccctttatagataaatttacctcatctaaaatatattctctcttcatatactacctctatccatcaaatctggtgaaatatttatttctttaagaactaaattaaaaatatcacctttttctgaagacctctcagattctcttctttcagcatccgagctctgtttacaccgtccctccgtccctccgtcccttcatccacatggcattggtcttatttctgcctctggcaatccaccattaactccctgagagaaggatttatccatcttgaatcaacatctagcacaaaggctggcaygtccattctcaataaagtatttttaaaggttgttgaaggaagctacttaccaggctgtcttttcatctgggccattttcttttcatttgccttatactccaatgtcattgctgattatgtggatgctcttgkgctgctgttactgttgtccttgttttgtttgtgttttgcaaaaccatacccctaatatatagaataactaggtyatggtcttcctcaatgtataagattatttctcaatcttggtctaarcaagtygattttatctttttgaagactaaagattattttgagaaaactacrtaatatttgatctgaaaaatgagcatctgcaaatatatcatataaaattctaaaagcccatctgtggagcccaggttaagaatgccagcttgagggcattctgagagttgtgatgtctacaagtggaaggttgtaagatggcacccttcaaaggaggcgagttacgagccagcaagtgaggatgctaggcagggtgctgatgaagatgtaccagcctttgggcattagaatgtcactgaggcccatgagtcctgggttcatagtacctattttagaaatagaaacctctrctttgtaagccagtatgtttatgcrtctttaatcttctggagtttttcattcaacaagcatactgtttattctacaygaaatgctcttctcttagatctttrtatagctgtctcctttctgtcattgagcctcagctcaaataccttctcagtgaagctttctctgtcacccagttccaagtacattccatctctcccttgtctctctctgtctcaatataaaggcatcttatttatttgctgttgggatagttttggatctaytgtctcccccaggtagaatgtgagttccctggaagccaggatcctgtctgttctatgcactcctcttaccttcaggggtgcctggcaccatagattagcaataaatatttatgggataatgaatttattaatgaattaatggaaggcatggcacaatactggacatggggatataaagtgaataagacgtggcctcagccttcagttttgttctagatagagaagagagacatataaatgaataattataaacctgtattaaagatgtagtcatagtagttaatccaaagtatagtaaggtcacaaagaagggaatgatcacctctaagggagtgaagaaggatcaagaaaggctgcccggaagagctacaacttgagttaggattaaactaatgagtagagagaggttcacagattggaaaaggaaggaaaggcatktggagctgacagcacgtggtacgtgcagacgttcagaaccacagggccaagggagaacrtggtrtgcaggaggaattgtcagcatgtggttattcacctttgtctttttttttttttttttcaggactgtgttgtttaggaatcagtggggagggggtggtggcaatagaagatatttgcgtccactcttaagccaaagttgcagtggtggaatggtgaacgcttaaaatgagtagagtggcatccggcaatgaaatgaaaaaccttgggtagaggtggaactaggggaggagtgaagaacagtattagagctccttggtcaactttatgtcccatctagagtgtctttgtccactactaaaccgtgggtttttaaagttttgcataaacaattatagtgggctgctgcttctctctgttttaaaacaaatttaacatttaaattatatgaaatttaaaacaaatttaacatttaaattatatgaaagccgttcaaaagattcaaccaacactattagagggcaaagggagttttggccagtttttacttgttaatttgaatttaaatagaggagagagagaaaaaaaaggaaggagtaaacctgaatgtgaaatctacaacttagtaatgtcatggggttggggggggcggtccttgctcccagagctcccaagatggtggcgtgtggcttccaaaatggtggcgggccacttccaagatggtggcaagcctcgtgttctctgacctggggttcttggcctcacrgattccaaggaatggaatcttgggccatgccgtgagtgttatagctctattagaagccatgggtcacggaagagaaccatggaacccctgactagtgttcaactcaattaggatgaacccaggcacttagccrtgcaggaacaatggcaagtggcaatgggtgcctcactggatcaggagcacagcagacaccctgccagatccgcaggggtggaagtcagcggcgggtctgcgatggtggcaagcagcagtggtggacagcgagcgaaagctcagctcgagccataacaaacacggaccagaagagtgcagttgcaagatttaatagagtgaaatagagctcccatacaaagggagggaacccaaagagggtagccgttgccggctccaatgcctgggtttatatccctatccttgtccctcccgctgtsctctcaggcaacagatgattggctatttgtttacctcctgttttttgcctaattagcattttagtgagctctccttactatctgattggtcgggtgtgagcaaagttgcaagccccgtgtttaaaggtggaagcagtcaccttcccagctaggcttagggattcttagtcggcctaggaaatccagctagtcctgtctctcagtaggaaggcataataggaattatgagggtaaatctaaaatttgagataggcagataccatgcaagattgggacaaagatactagactctcaccaggaaaccaaataaggctttgtttacattataggaagctgtctacatcatactctgtaatctgtgctctcttgtgaagtaaaaattttcttgaattttaaaaagatatctacttgagcccagtgggaggtaatatgtgtttattttccaaagagtgacatctttttcctctggttgtttctccctctctttccttataggatatgagattagcaaattatagtaacatatgacaatacacttttattgcttacccatgtgtcaagtactgagttagggatccaaagatcaataagatatggtccttactttaatgggccttccagattctctggggagagattccatacctatgtaaggaattatttaaagcaagatggtttgagtctggttctgaagttagcaggcatccagagaaggcagaagccacccatcactgacaagagagcaaaagctaataatgtaatcctgggtctcaataaggaagatttggatcttgggagaaacagctatggatacagtcatgcagataagaattgcatgtggtgactctatatcttcaccttaattcagtgactaacttcttagtcactagaaattaacttattttagtgggacmaactaaagtagaagaatgagcatgcctgaagcttctttgtatgtagacctttccttaaatcttctgggctcttttatgtatgttgttttatagtgcttttcaaggtcttctatggtcctgactttctagatttttcccactttattttggcaatacttctcagcacagttttgctgaccaaagccacacaaccccactttcacacactgttcccactcacctccagcttgggccaacttcagtattacttctgttctcgtggccacagcacagcctttcagtcatgcagccatcggattccctgaatggcatattacgttgactacataaatagtgtcttagtccattcaggctgccrgaacaaaataccataaactgggtagcttagaaacaacagaaatttatttttcacakatctggaggctggaaagtccaagttcaaggagccagcagatttggggtctggtgagggcctgcttcctggttcataaaaacagttccttctttactgtgwcttcatatggtggacaagctcccttggacctgttttataaggactttaatcccattcatgaagtcactgccctcttaacctaattatccccaaagagccctacttcctaataccatcaccttgcaggttaggatttcagcatacaaattttggggagacacaaacatttagaccgtagtaaatagcatttgtcacaaatgcagaagttgcaaacctttcatcaatgttagattgacttcagaatgcaagataatccttatgttctgaaccaattattagtcaaataattgctgagatcattgatacaatgaaatyactattagcttctatggtctctgactcagtcccaaatgtcttctataaaagaagtctctaaaaaatagaatttggaaagcctgcacatactagcctcttcttggagattcctaatacccattaaactctctgagaaatgctgaaattaaaaaacttgtttaaacttttcttaaacttatttcagtatagaactctttgttaattttttgcttattccatgttaacattcagagaaggatgccattggaaatattgccctgacctgtggaatctcataagcactagacaagagcataatcataggccttggtaaaataccatgcaacaaatttcccaggcatctcttcattgaccaaataaaaaagtctctccaactttaccactttcttctaytgactttggcaaggaggtccttaaggccagggttgttccctgagtaactgagggtctagcacaagtgccagctcagagctactatatatgtgagactcatgagagaatgtgaccaacttactaattaacagccatcagctcatgaatggctatgaactccatcaaactgaacaagattcaaattttgctaagtcaaatagcacaagccagtagaattaatgaatttagatagaaacttagcaatgctttttgacagcaggtaacttggtgagtctggaagccaggtgagactgctaacctgtctgaaggtgagtgtgtcatttgagaaagaaagaaggaaaaggaacattaaatgacttaggttcctgttctactggtctcatcttagtcattatctcatttactttatacagccacctgggaggtaagtgttatttttaccattaggtagaagaggaaaaggaggttaagtaagctgcccaagacctccagttagwatgcastggagctaagacctgaacctaaacccatatggtttccatcccatgctctcttcttattaaacctatgctaactctcaccaaacttttaagcataagtgcaaaccataatcttctgagtccatgtcatacatccttatattttactcttttctctaaatctcctctcctggctttcctgcagtcactgtgctttgcaggccagctgcctctaggactcttagaatacaatggtgcttttgtacaaccttgattttgagcatgtggttcctcctttgactcagctgaaaaatttctaaagcagttaactatatgttactggattatacttagatttctactacaacattattttgtcaaaactcgtactctcacgtgtgagaagcattgtgtcaaacaaaatggagtacattttttcaataacaacttcttagagcaaacctgtactgagaagaaagtatagttgccaaatgtatgtggtgatcagaaatctggaagaacccttattaatgtcttgtattacttgaaaatgctgataaaatatgttagcctgcttataatcatttttatttttggagagttgttttttacaatagcagtaacttgaaccataaaatactttgtttcaataacatggtatgaataatgcccaaagtttaagagttagtattcatcaagtgatggtgaataaatctatgaccgaggtagaattctgggctcaataaaatctacctctgctattatgtatttcaaaatgagaaaacactcaactagatttggtgaaaactaaactcctgtttagtttaatagttaagagagtctccattgatgaggtgcattctggattatccatttgtttttatatcttttattttcctattctcacttcccatgacaygatatacattacaattgtttttagaaaaataaagtttaccatctcatgattcatttagatcctggctatacamgttatttctcatgttgatttaaaactaatttttrtatacttcttataacaacacactgtcttattggatcttcaggaaacagacgtggtaccagacaccaggcttttagacaaatttagtcagattacacctcggctctttatgccactagatgagaccatccaaaatccaccaatggaaactttgtacattatcgactttttcattgcattggcaatttgcaacacagtagtggtttctgctcctaaccaaccccgacaaaaggtgagtaagttctctaatgcaaacaagggtcactttccagaagagaattttgggtttaaatgtatctgtactgagcttgatatatggataaaaatgataaataatagtagctgtataacactgattcagcatttgttctgtgctctgcacttaccatggtctatgtcatgggtccccaacccccttggttgcagaccagtaacagtctgtggcctgttaggaaccagtctgaccagcaaggaggggagggagagggccagtgagcattactgcctgagccccgcctcctgtcagatcaggggcagcattagattctcataggaacgcgaaccctattatgaactgcatatgcaagggatctaggttggtgccctccgtatgagaatctaatacccagagaatctaatacctgatgatctgaggtcccacccaacccgtctatggaaaattgtcttcacaaaactggtccctggtgccaaaaaggttgaggaccgctggtctaagtgatttattggtattaacaagwtgaatcctcctaacaatcctatgagttagatgctattaccctactattctccattttacagatgaggctaagtaatttacccagggtcacaaaactggtttgttggggaggtgggatttgaacctaggaaatacagctcggtgctactatattatttgcctctaagagggtagtgatgagagcaattcattttgctttagtttatgtgccaaattgaagctttctttgagacttctgagacctccaacatcgtatgtattatatcaggcaaaatataccgtattggattcaatatcatgtttaataatatttttttcttcctttttttttttcttggagacagtcttaccctgtctcccaggctggagcgcagtggcgtgatctcagctcactgcaccctccacctcccaggttcaagcaattcttctgcctcagcctcctgagtagctgggattataggcacccacaaccacgcctggctaatttttgtagttttagtagagacagggtttcaccatgttggccaggctggtctcaaactcctgacctcaggcgatccacctgccttggcctcccagagtgctgggattacaggcatgagccaccacacctggccaaaaaaagctagatttttaaagtctatttgtagcttagaattcatggaaaattcattttcartgcggaggaaaacttgtttaaygggctggtgattcaccatttgctgtgctagcctccttgtgtgtaactctctcaccttttactcacttaaaattcaatttgcagcacaacccaattcaatttaattttccatcagatcattttcttttggcagcttcagaggtggtcaactttaacataaaaacaatttccttccaattaagttgagcttcatcaggatctgtatttttacaaggctttgcctaggaagttgctctttgaaaacgtgattatgcagttacagaataaaggctgttcttttccccaaaaaatatttttctaataaatctgttcccaaagtaagcatcttttggtgttttccttttaagaaatattattggttattcttaaagaatataatattctactgcttgaaagaaaatctctgaagcatataagagtctaagcctcatggtatttcaaagtaatgatagaagggcagtgaataagtagctaatcagcattcatgtgagatacagaaacctcatctgtgattgtgttttactcttcatttctgagttgctgataagtttgaaaatcaaccagcataagaccttcaaattattataaaattagttatttttaggggaaaactttttcatttattgagcatttctgaatgagaaaatttttccatccaattaattggccttccatgattaatgtgaatttctcagtttagtcactgataaaagttaagatttaagagaaaccagggtacaaataagaaaaagttctatgaaaatagaaattcaaatccacattatgatattgataactcttcttgatgaagctactttgcttactggtccatttaaaagaaaattcaaagtaacaaacttgtagaatctggaaaataaaagagaaaaatacattttgttaatcttttgatttgctttcttctggtgtttttgttatgtatattattacttgttactttttttatactagtctcatagctttttcagtattgccctatagactttataagcttcatttttaaatattatataacatttcaagatgtgtctattttgctgttactgaatacttaatttgcttataattttaaaattgttatggttaggatmcacacagataagatcatggaattcctgtatttcaagttatttctttagaaaaaaaattgctgaaggatgcccactgctagcaatattaacattttatgtcttttattatcagttgtcaaatttctttctaaatggttgtagaaatgtatgtcattcattttaatattattaaaatattagcaaagtattacataaatattaaaaatattaataaaaatcaaattatctgaatagttattaaaaaacaaatttttatttgtattaatattttccatggcggtcgtaaatagagaatgggctgctagccatttaagtgagtggtaactctttttatatctaatttatttccagtttgccttcaaagttgttagaaactgcttttgactgtattgagacctttctaaattgtctttcatagatcagacacccttcactgggggggttgcccattaagtctttggaagagattaaaagtcttttccagagatggtctgtccgaagatcaagttctccatcgcttaacagtgggaaagagccatcttctggagttccaaacgcctttgtgagcagactccctctctttagtcgaatgaaaccagcttcacctgtggaggaagaggtctcccaggtgtgtgagagcccccagtgctccagtagctcagcttgctgcacagaaacagagaaacaacacggtgatgcaggcctcctgaatggcaaggcagagtccctccctggacagmcattggcctgcarcctgtgttatgaggccgagagcccagacgaagcggccttagtgtatgccgccagggcttaccaatgcactttacggtctcggacaccagagcaggtcatggtggactttgctgctttgggaccattaacatttcaactcctacacatmctgccctttgactcagtaagaaaaagaatgtctgttgtggtccgacaccctctttccaatcaagttgtggtgtatacgaaaggcgctgattctgtgatcatggagttactgtcggtggcttccccaggtaagtttatacaaaagtgaaatagtagtgatttgaaaagctcggagattaaaagaccatacttgatggctttataaaggcaaagaaacagctatytggggactaatcacatytggtgaagtagggggaagctgcctaggatttgatgggaaagcaagtaagttttggggctacccagtatctgagttcaaatgtgaactccatcattaggtgggtcttgataaagttagctaactattctgtgcctaagtcttcaactcaatgggtcttagagtacctcctttataggttcctgaaaggtttaatgacatactatatgcaatgtatgaagagcctttggccaagtgcctagcaaatggaaagtgcccaataaatgtcagctagcagcattatagttatgttactgttrttattgatgatttgggaacagtgtttgtatcaggttcttgtactttcctctgcccaaggggaaagaaacgagggaaagatttattctgagtggtcccttttacagatacccatttgggattcaaaaccagaaggcttttttatttgtttttttagtgtggmtaaaactactattgttttaaaaagtatttctgtaatttggcagactggtaggaactcaagcatcttgtccattatttcagatggagcaagtctggagaaacaacagatgatagtaagggagaaaacccagaagcacttggatgactatgccaaacaaggccttcgtactttatgtatagcaaagaaggtgagactgcttagtgcgctccatcttttttgttttttcccttgtttagctatcactgactgaaaaccagcgtgtagcaaaccctaatccagatrctggggaaagtcccctggacactggctctctttttacyttctctattccatatattggttggttgaagtttgttcaaagtattttgctacaaggatccctaaaacttatagtctctaagttcttgtatgtttcaatatgtccgtgagtgactttatatgtaaacagttgtttggctgggaataaaaatctctggatcttactttctttcccccaggactttgaaaatgttgatctctctgtcttacagcattaaatctgctttggaaagaatgagggcacagatgagccttaattttttcataataagctcttaatactcttttcttatgtgcccgtaagtatttatatgtaaatccaggtaaatatcctagatattatctcagtattgattattctttattgagaatgcatatcctttctaaacaaaagtttagcaagaaagaagatggagctccaataaattatttgagagatgttctcaccggaacttttcatttcttacccaaggtttagttcatgggagctgcattagggaaagtgggatctgttgtagaccccaaggaactcagtcaaccagctgcataaggaatcaaaagtctgatggctgggcacagtagctcacgcctgtaatcaggaggctgaggcaggtggatcacctgaggtcaggagttcaagatcagcctggctaacatggtgaaaccccgtctctactaaaaacacaaaaattagccggatctggtggtgcatgcctgtaatcccagctactcaggaggctgagacaggagaattgcttgaacctgggaggcagaggttgcagtgaactgagattgcgccactgcactccagcctggacgacagagcaaaactccatctcaaaacaaaaacaaaaccaaaaacaaaaagcctgccccacacacagttaaaggaagaatggagagttcaagatcaaaccaactctgccttttcaattgaatgatcctacccttgattaaaatgtagcccaacaggtgtcagattctctcaaatcgaatgacctgtggccaagaataagtagacagagaggggaattgcctcacctgctttactccactctgctttataaaaactgaaatgtagatttctctttctatggcaacctaaagacaaaggaaaatatattattgatcacttccccaggaatttcattcaatttttctttggaataagacttgtttcacccatagggcccttctctttttaccattcattaaccacataaaataaccatcaaaggagaatggcgtgaacctgggaggcggagcttgtagtgagccgagatcaggccactgcactccagcctgggccagagcgagactctgtctcaaaaacaaaaacaaaacaaaacaaacaaacaaaaaaaacatcaaaaggtatgaaaggtgctgctggttacagaatccttcgaactaaacagtcctgataccactttctcaactgcaccattagaatcaaactggatttaactgtcaattggagaccactcccaactgcatactttctgatttaattaaagacattaacccactgtcatcatatatggtgcctagaatttccagagatgctgagttaaagggtcatccatcatcagtgttgcactagtctgaccacagagtttgggaagctagtgtccaggtggtgtgaggatatggatctgacatggctgtgcccagagggaggaatatgtaaaacaagttgatggtttgatattttgccagagrtcagtcctggtattcccacaagatcatatggcttgcttcatacctctcttttaattcttcccgtaggtcatgagtgacactgaatatgcagagtggctgaggaatcattttttagctgaaaccagcattgacaacagggaagaattactacttgaatctgccatgaggttggagaacaaacttacattacttggtaggtgaattatgtttgtattgcctgaatggaggattttgaaaaacactggatatctttgaataagggttattttcttccattgttatctaataaacayatatggttctgcctaccctgtccagtctgatctctatccaacttccaatccattctattctgttgtccactgcagtgaactagacttcacttgtgatggggtcaggatggtcaccccaagaagatcatgtaaaatccaacacttaacatagactacaaagccaagtaaatgttccaataaatatcttggttcaaatcaagataaatatcaagaatagagtttcttgtcaggcattggataaggtgcttaataygtrttatcttttttttgaattctcacaacaaatctctatcttatgtagaggaaatttggggcacagagcagttcaatgacttgttcaaggtcacatgccagtagctgacagttactcattaaccaaacatggagctcatgtttgcctggctccaagctttttatcctgcacctgctactggactaaggaaatttatttttcttctcttcctgatttcaactaaaattgcacaactgacccctcttgtcttggattaaactgcatcttagaattatctgaagcactttaaaaaatattgatgcctgcatcctatcccctgagattctgattcaagtgatctgttgtgtggcttgggcattggaattttttaaagctccctaaagtgatgctaaaggcggtcaagtttgagaaccactgtcttagagtctggagatctagattctaatataagctctgatataccaagataccagcttctgagctccattcctctatttaggaggaaaacattgacctaacttagtatctagcaaatagagcaatgatgcctaccctaagtgatttctctgtgacagtgtaagtagtataggtccacatttcctcatctgtgattccaaaatcaaaaatgctccatgggtttagtgccaaaactcatttggcagaaaaatcatacctgatttgatataagactatttatagttattatcctaatttaggtgaacatttgtcagttttcctgcagaaatattaatatgcttgattaacaagtattatagaatatggtatatgcaccatattacttttttaatatctgaaaaatgtttgaattccaaaacacatatggccccaattgtttcagaaaagggaactgtagacccatgaaagaacactgcaaatagacattgtatcttactggcaggagyattctttaaaagcctgccctttaaaggacatgaacagacatttttctaaagaagacaacaacaagtggccaacaaacatgaaaaaatgctcaacatcactagttatcagatgcagacaaatgcaaattaaaaccacaatgagataccatcttacaccagtcagaatgtctgttaaaacgtcagaagacaacagatgttggcaaggatgcagagaaaagggaacgcttatatactgctggttggaatgtaaattagtacaacctctatggaaaacagtgtggagattctcaaagaactgaaaatggaattaccgttcaatccaacaatcccactactgggtatctacccaaaggaaaagaaatcattatatcaaaaaagtacctgcaatcataggcttatcacagcactgttcacaatagcaaagtcacagaatcagatatctaagtgtccaccaacaaacgattaaagaaaatgtgatataatatatatatatacacacacacacacatatatacacaatggaatcccactcagccataaaaaagaatgaaattgtgtcttttgcagcaacatggatgaaactggatgccattatcttaagtgaaataacccagaaacagaaagtcaagtaccacacgttctcacttataagtgagagctaaataacatgtacacatggacatggaaaatgaaatagtagacattggagactcagaaaagtgggaggataggtcggggagcaagggatgagaaattacctaacaggtacaatttacactatttgcatgatggttacactgagagcccagatttcacccctacacaatatatcagtgtaacaaaactgcgtttgtgccccctaagtctataataataaaaataaaatcccacccttatccttgggaatatcatagaattataaaattgtagtgtaaggttgcataaataattgactcaaatcccttcaatttacagataagaaatctagccaaaaggagaacgagtaagtttgataaatccattgatccctgaggcttccttcccaaaatattacattgcatataattttggtctgggtcgtcaaacctcctttgactctcctgagcagctggscagtttatgtagtgtagggttgagttggctaacagatatgattcaactgtagactagctgagcttcagctggctttggtttcttacaagtcctattgcactttggttattttttaggtgctactggcattgaagaccgtctgcaggagggagtccctgaatctatagaagctcttcacaaagcgggcatcaagatctggatgctgacaggggacaagcaggagacagctgtcaacatagcttatgcatgcaaactaytggagccagatgacaagctttttatcctcaatacccaaagtaaagtgcgtatattgagattaaatctgttcttctgtattttcaaaggcattggaacatttgagatttgatgtatgcaaggattaaaaaaaaaacaaaacagcaaccgttagctttttttgttgtttgtttgtttgttttggtttttttgagacggaatcttgctctgtcacccaggctggagtgcagtggtgcaatatcttggctcactgcaacctccacctcccagattcaagcaattctgcttcagcctctcaagtagctgggattacaggcatctgccaccacgcctggctaatttttgtatttttagtagagacggggtttcaccttgttggccaggctgatcttgaactcttgacctcaagtgatccgccagctttggcctcccaaagtgctgggattacggggtgagccactgtgccctggccagcaaccattagcttcttgataattttttctatccagaaacctaccttgtgcttggaaggatgtctattcttctaaaggcctgatggaaaattataatgattcagaggaatcattgctgaataaaggcattagaagaaagttttttttttttatttgctttcccccctccacactggattaccagggatctgacaggacttagcccaaaatgagaaaatatatcaagtcctggtacaggaatctacctcccttttaagataagaaaaagtgatagtttttattgaaatcaggtgaataaattattaaatattttatggcaattctaaaaatagactcagggaaatcgtgccctcttgtggtaattcctaggtagtgctcccgagaatatcataagtttgaagaactgtttaagggaagaggaaaatgtcattttttaaaaaagaaggaaatttaggaggcttagactcagcccagttttttctatttttgcctcccgctaatctctaacaccaatgtttaatcagataaataagggttttatttttctcagaagccttccagtatagtgatcccctccaagatttgtgcacattgtttatttttcttgaaaaacttcctcccattcttcttcagcagtcagacttaaccagtgatatcaatcccatcactgcagtctgccttctttgaaatcttgtggagcttttcttcaggatcacttcttgagctttgcctgctcaaggctgccatgattggttaacatgttttcgtttgtttrtttgtttgtttgtttgtttgttttgaggcagcccaggctggagcgctatggcgcgatctcggctcactgcaagctccgcctcccgggttcacgccattctcctgcctcagcctcccgagtagctgggactacaggckcccgacaccacgcccggctaattttttgtgtatttttagtagagacggggtttcaccgtgttagccaggatggtctcgacctcctgacctcgtgatccgcccgcctcrgcctcccaaagtgctgggattacaggygtgagccaccgcgcccggcctggttagcatgtttttatggtcagacctcaaccagcactcagctaaatggtacattttgagaaaagggaaaaatagagtgggttcccctttacggtggcccagtgacccataaccacaaccaccagccaactcccagtagctgcagggggcagaacagaagaaaatgcttagtcatttcagtcaccaaaagaatgtagcctaggtggctggtaagactagggatcaaatgcttggcctgccgctgactgagtatgtggccttagggagttacttaccctcctgtgccgctttttctttactcgtaatgggagagtaatgactgtttaatggggtttttgtgagcattaaatgaaaaaatataaattgtttaatgcggtgcctatcagatgagaggggttcagtaagcattaaaaaagaaaaatagagattgttgtgaacagtaaaatctttaggactgtgaaattcatttataatgcaatatatccatataaaaaaattacacttatacccttaaatttatataaataaaaaaattatttataaatacacaatttatcttatgtttaaaggcatttaaaactatcgattcaagaagtatttactgagtacctataatttttttgctatcgatagctattccacatgtgtgaattttccaaataactaaacagaatacaacaaacataatttagttttatcacaactcaagataaaaagccaggcacatagtatgggctcagtcactagtatttaactcttttctttccacctcccactcctagtccctcaggaatcactaagagtttaaaaggacttgaagatcatggagcccagtgtgtcacttagtgaaggaattgctcctataacattctaagcaggcaatgtggcagccagtggaatgtctgaagttacttttgtgtcatctttacaaatttccatcaacgttgttcttcaatttacaaattagattataagtgttgccagttgcaaactttaccttttactctcataaaagttttttttcttcatttgttttaatatagtcatatcctgtttgtaactagttactgcattggaatatacaaaggcctttcaggattggtcatttaattttttaagttttatttttgtaatttcatttaaatttttctcctcagattggtaactttctatcttcataatttatattagaatctacaaaaaggctttccatacctgatctcatttgacaattacaacaaatagacatagaagataaattatctgttttataacctgagactccaaatgcttgtgatttctctaagtacagctgattactaaactttaaattttctgattcccattacartatattttctaattatatattacatattacatatatacagttgattctccttatttgtagagttatagtttatgtagttgccccgagctctgaattarcaaacactgaccactgcttttagaggagatacaaagttagcttcctctgattacaacatactgtcaacaatcaatacatgaccttgtttcttctgaaatgtaccttatttaatatgcatattaatgattcattaacgttaaatgcattgccaacagactgtaacttatacccaaacaaagcttatctaacatgggtaagttccccccataggacacatcacagccttttttgcttggraacactgcagcccatgattgggagtcattttaaacagcaaaatcactgacaaaaagcagaaagatgcaaaaaatatggcaccaaatagcccatgaaaagaagactgctacagtttgagaactggcaaaagaaggcatcawggtgttcagcttcagctgggaatgggcatatcacatgacttaaatgtcactctatgcatgtgacactcaaatgtcactctatgacatgtaaccacaaaaacatctcaagtattgtgaaattacagataaattttatcaagtaggagaattcacaaatgtggaatccacagataatgaagattagctgtgtgtgtgtatgcatacttctgttatttttataatgaaaaaaatagttaatttgtaaaacctaaacacatactcaaataaatagaagagtacaaaaccctttataatcaatttataatcataaaactacaatttaaaatcatattttggagaatatccacacagactgtattctgtatactgtaagcatattggtgccacaaagactatatttatgttattgtatggtattgcagctgtattctttcaattacaataccttaaacacaatctgatgttaatgttttcaatgattgcgaggcatgttactttctaaatgtgccattttaatttaaccaaactccaaaagagttttaaaaataatttttactatgatgtaatgagctgtatgagcatatctgattcatctttgtatactttgccttaagggctttggaggtgtatgggatcaaattcattcctaaaatggagccctgtgaacactccacaagagtgtttatagtttttgtgctgtttcatgtgcacatgtccatatctacttcttccttgcttttcttattttgttgtaggttgagaaatgcttgataaaacagcatttaaaatcaaagcaaacaagctytgagtgagagctctttcacgaataaactatttcagacttagtgtataaactaaacttaaattcactgctctggatttggaatttgttcttagtgatcacttgacacagtaatttctggataagcttattgttcatcttcttgagtagaattcattcagtgaatgtttactgagtacctgatgtgatcctcttttaagcctcatgaagrcttcaaaagtaaattaaaagtgataactgcctttaaagaacttcctaactagtgtggagtgaggatgtatgcaaaggagacgtgataagtaccacaaagaacatcctggccagaatgcaagtgccatgagggcaggaattttcatgtttattggtgtagctccagctcttagaatgttttctaatatatagtttctcattaaatagttagtgagtgaatgaatacgttgaatcaaaaagaagataaaagcaataattactatttcaaatgcctgccatgtgtcatgccttacactaggagttttgcctgtattattttgcttaatcctcacaacgagattatgatggaaataatatttgcatatttttaatgagaaagttaaggcttagagaggttacatagtttgcccaaggtcaagcagctaataattggcagaatgagaccagaggactcttgggattcactgttcaagaaggcaaattgcacacatgaagaaatttcacagctatttctttataagaaatactggtgagatgttccccctccttttaacccatccccacatacacacagaactctctgtggaagactcgtaaaatctttgaaaataatcagttattcattatttgaggttttcttgattcagcaattgctaaaaaatgacaataaaaaatgtaactggttctgacaccaagggcgcctggaggctaaccacctttgcctcttgtttcaaggatgcctgtgggatgctgatgarcacaattttgaaagaacttcagaagaaaactcaagccctgccagagcaagtgtcattaagtgaagatttacttcagcctcctgtcccccgggactcagggttacgagctggactcattatcactgggaagaccctggagtttgccctgcaagaaagtctgcaaaagcagttcctggaactgacatcttggtgtcaagctgtggtctgctgccgagccacaccgctgcagaaaagtgaagtggtgaaattggtccgcagccatctccaggtgatgacccttgctattggtgagtgaggatgaatctgagtcctgctcttctccctttcacaccacaccagacaccgatccttctgtctctttcttctcccactgttccttccattttcctcctccctttttctctaccacattcatgccttcccatcacctatttgagcaccttcctccatcacctatttgagcaccttctgtgaaccaggtaatagggatgtgacatggtaaacaatacagtagtccagacttcttagttcagtgtcagacccccaaatcaacaagcttaaatcaagtaataaactgaatcacagaactgaaaaatccatgtgttctaccttcaggaaagctaaattcaaggacatgagaattcatttctttatccattccacaagtatttatcaagtgccttttttgtaccaggcatttttctaaggaatggagatacaagagtatataaaattggcaaactacctttttacaaggaacttacatctagtaggaaggcatgcagtaaaacaaagcataaatctgtaaggtatcaggtagtgataagtactattgaaaaaataaagtggaatgaggacacgtagagcactggagatgggctggggctgctcttttaaatacgattttcaaagaaggtctcactgctaaggttgactgtgagcagagatgtgaaggaaatcataaaggggccatgggagacatggagaagaacatttctggaagagaagacagtgaaaatgaaagccatgaggggaacygtgtttggtgtgtcggaggacaaagccgattaagcaaagggaggtgttttctgcgggttattaaaggccagagaagcagcagagggccagatcacatagggtcttagaggacattataaaattagggagccattgaaggattttgagctggagtgggacatgatttgccttaaatttaaaatgatcatgttggctgttctgtcagagtaattgttggactgcaaagacatatgaaatcagttggaataattcagcaagagatgatggcagcttgggcacagctgggagcaaaggaagggttgggacgtggtcagatgaaaaatgggcatggtctgaaaaaagacccagagacatttgctggcatattggatatgttatatgagagaaagagttgtcatagggaacgccaaagttatgtctaagaacagaaagaacagagctgccatttactgagatagaggcaggggaaattgggaattgggtcttactcatgtgaagtttgaaaaggccattaaatatctaagcagtgatgtcaggtaggaagtgagaataaaagtctggaatttaggaataagaaattggctagagatataaatttgagaatcagaagtctagtgggtatcaggccaggtacagtggctcacgcctgtaatcccagcactttgggaggctgaggtgggtggatcacttgaggtcaggagttcgagatcagcctggccaacatggtgaaactccacctctactacaaacacgaaacttggccaggcctggtggtgggatcctgtaatcccagctgctagggaagctgaggcaaatagtcacttgcacccgggaagcggaggttgcagtgagctgagattatgccactgaattacagcctaggagacagagcaagattctgtctcaaaaaaaaaaaagagaaataaaagaaaagaaaaaaagagtctagtggatatcaaagccttgacaccaaagaatgagtataactgaagagaattgtagtatgagattaagatctcagagactccagtgttaaactgaggacttggcatatcagctctctctttctatgtctgttttccctctggactgcttccagtctcaggtaaattttcccctcagggtggtgatgtagccactaaaactcctgggtttccatcctatcctattaacaacttgggtgaaaagatagcatcacttttcagattgctgcagtaaagtttcaggattaaggtggaattttgttcaattatcttgttgaataaacagataaataaatgaattattcaagcttatggatccagatgtttccaaagcaaaaactcctggatttataattatagataacataattataacataattatattataatttattacattataattatatttatcatatacattatatataatacttataatttatatcatgcattatgtaatatataacaattatattataacttataataatattaattaattggagtcatatgtccatttctgaaccaattactgaggccagggaatagaagatgctgattgtacagatctgggacacttgcttacctataaatatggaggtttgggttcaccctaacaaaccacataaactaagaatttccaaggaaaaccagtatacctttactgaaaaacaggtgaattgttggtgatcagttgttcattaccagcaggaatgtggtacctcctcctaagaagcttcctgtgttgggggagaccagtaagtctgtatgcaaccatgatactgtgtgataggtgtgctagagatacatagggtggtgctgaagccttatgaaagggcatctgatctttaaaaaaagtatgagaaggatttcccagaggaaatgacatctaagctgagagcaagaaaaattgaaatccagaaaaatgagctgggggtgatcaggacagtgttgttatcatgtgcgtggctacagggagaagggtgtatctggagagttgaaagtagcatgaatgacatgaaaaacaagatcagtctgggtaggtgccatagcgtgaaggagtttaaagcggtgttgagtttggaattcttcctgatggcagtgggatgccacttcatttctgtttcacttacttccaggaaacttggagaacgggatgaactttgaaggatttatttgttcacttgagctgcccctattgatttgcaacatttacaccytttctttactcctcatatgtttctctcctttttttctgcctcatgaaggtgatggtgccaatgatgttagcatgatacaagtggcagacattgggataggggtctcaggtcaagaaggcatgcaggtgagtggatattgtgcacccaagttctgtggccttgacctgcccatccaaaggcagcattctccatggtaaattctctgtggcagagtgaggctgtgtgtggctagctgaggagtgggagacaggaagtttacctatctattcattgatttttttttactaggtgagtattatggcattttcctgggtaattttagctgtattattcacttgttaaaaatagagcttatctaaaatcacaggaatatatattttagtcctgcaatggctgcgtaaattctgactctgaagaagctactaaggatttgaatgaaggacctaaagatcttgaggcaggagaccgagggaaaaaaagggaaagaagaggaaatgagaggagaaggaaggaagtgggagtgtcctatttgtgcgcacgtgtgtgtgtgtgtgtgtgtgtgtgtgtgtgtgttggatggtattttaggcacaaaattcagataaaagctcataatccaaaaaactgattttcattcatgtatggaacaaatgcggtcagaagaaggtagaatatgaggcctagggtttcccaagaattgtgctgtgtctgttctaacatgtttgatcactcaggatggcattctctccccattgcatctgcaggctgtgatggccagtgactttgccgtttctcagttcaaacatctcagcaagctccttcttgtccatggacactggtgttatacacggctttccaacatgattctctattttttctataagaatgtggtatgtaaccccagagaatttgtcccttttcccttcgtaccttccaagactgttgcatcagggatgaagacgaagtgtcctatgctaagctcactttccttattgatgtattgggaacagccaggactggtcttgctgtctttccagaactaagctgggaatgtgctatgtttcagctgctgacagcaaattgccaggcttgtccatctgctaacattttctactccctgtgcatttaaattaagtcctgtctgtttcatttaaaatccagtttttgaccttccataaaaaaggctgtgacaagaagaattatgaaatgtttaatgctgtcagtacagaaagaaaaggtttgcatccgttttactggaaataccaaaaaatatcagctcttccaaattaatgccccatgtgttataataaagacacagatacagatgaaaacctagtatgtcttagcgtgtagctggctgttgctcacagatgcaagaattctctagccaacctataaaatgtatttgtgctcagtagttatttaatgataaaggaactagattttgattctataattcctaaaagggcagaatttgattagaaatccaggcctctaatcttcagcctgctatttcaatttcagtttcctttttttataaaatcataggtaatcagacgtaagtatcttctaagtggggtaattatgtaaatatcatgaattttaggccaaattcactcttagtctttaaagtccatatgtagtatgttagtagtagacatgggttgatgtcactctattaaaataccatttttaggggaaaaaaagccatttttaggagatcccaaatgtgtaatttagaactctgtgtgcacatgtatgtccatcagtaggaacattttttttttcctatagcacagtacacttttcaggaatctctcaagactttactgattagaattagtgcagttagtcaaagttcagtaaaactcagatactttaggaaaatatttgaaatgtataaaatctctgcctgagtatgtgcttctagggaaaactgcagcttgtaatttacaattctagaacttagtggtcaatggcttttaaagagaagcccctctcccaagtttttattttaaacctttgcatttgttcaccttctcccctattgtggcaatatccattcacctcctcacctccttttaactccagattgaatccaacagtaaagaaatactagtattaggaggatatggtatacactctcgaagagagggagtgttggttagtagacagaatcaggacctcggtgatcttcctgctctataatccttgagtggccattcatactgataatctccagacttaattgatatctcttatttacctagctaaacaatgcatattttatgtgctatgcaaaggtcttggaccagaagccattagagtagcttatctttctgagaccatggttcttggatgttggacaacctttgaggtgccagtgaagactatggattcattcmcccagaatagcaccccaaaccacaaacaatacattttcagaaactggtcctgatccatgtccatagatgctagactaagaaaatctattctggccaggtgcggtggctcacgcctgtaagcccagcactttgggaggccgaagcagatagatcacgaggtcaagagatcaagaaattcaaaatctagtctaaggattgtggcccttgtcctgaggttctagtgtatctatgatgacaataatttttttttttaatgagacactttacagatcatgactactttcttgtttgtgtgtttgatttttgagacaggatctcactctgtcccccaggctggagtgcagtggcatgatatcagctcactgcaacctctgcctcccgaggtcaagctaacctcccgcctcagcctcctgagaagctgggcctaaaggcacgcgccaccatacttagctaatttctgtttggtttggttttttttgcggggggagagacaggatttcaccatgttggctaggatggtcttgaactcctgacctcaagtgatctgcccaccttggcctcccaaagtgctgggattacaggcataagccactgcatccggccgatgatgaccattttctaacttgatcttgatactaagccctaaggtagtataactctcattttacagaggaggaaataataattcagggtggttagggcaatgacctaaaggcaaagaatcaattagaagtatcccccagccttgagacaaaactctctctaagtccaatgtcctttcctgtggcctgccctccttgggagcacagagctttttatagtgaacttagtttgtctgagacaaaatactacaggaaaccatgtagaatgcctgtgcctggactctagggtcaccaactatcctggttttcctgagagtgtcccggttttagcactgggcatcccaaggcctgggaaacccctcagtcccaagcaagctgggatggctgaccactctgctggcaccattccatttcaccgctatgtatttatgaacccagaaggcaagaaaatggacatttgtgctgtgcctactccatgtctgtgccaggcactgggctagattctcttcatctagtgttgaatccttcagtttgaatactggttctgctacttattagccatgtggctttgggcaagtttcttagtctctctgtgcctcagtatcttagtctgttcaggctgctgtaacaaagtaccacagacaggtggcttgtaaacaacatttcttccccactattctggaggctggaaatccagatgagggtaccagaatggtcaggttctggtgcgggttttcttctggattgtagatttctcattatatccttacataaaaagagatgagatgatgagagctcactggggtccctttttttttttttttttttttttttgagacggagtctcgctctgtcgcccaggctggagtgcagkggcgcgatctcggctcactgcaagctccgcctcccgggttcacgccattctcctgcctcagcctcccaagtagctgggactacaggcgcccgccactacgcccggctaattttttgtatttttagtagtgacggggtttcaccgttttagccgggatggtctcgatctcctgacctcgtgatccacccgcctcggcctcccaaagtgtggggtcccttttataaagaaactgattccattcatgaggtctccaatgtcatggcctaatcacctcccaaaggtaccacctcctaacactgtcacagtggggatagtgctctgtgctctcaagtagggcagaccacaggaaaggacattggtcttagatagagggagttttgtttcaagaggatttcatataaattttgggattaacattcagttgattacacttaattaaattaacattcagttaattacacttaatttcctgacctgtaaaatggcaacaacaatgtaattcccaggttgttatgatgattaaatgaattattcctaaagcacttagaacaatgctagcaccacataataagtggggtgtgagtgtgtgtacatacatgtgtgcactttaatttaataaaatatttaccaaaaaaagctgcaaggtaaattgtggtcctatcttatataagaaaactacagagaggctgaggtcacccagctcaaaatggcagcatttggaatgtgtaatcatagcacacattactgattctaagatctgaatgtccttctttgtgtctctaggcctatgtgaacctccttttctggtaccagttcttttgtggattttcaggaacatccatgactgattactgggttttgatcttcttcaacctcctcttcacatctgcccctcctgtcatttatggtgttttggagaaagatgtgtctgcagagaccctcatgcaactgcctgaactttacaraagtggtcagaaatcagaggtaggtgttaaagcaagagtgcttggatggatgcatatccattgtcaaagccagtgtgttttcttagttagcaaaatattgcagtctactcagaactgtttgaaatatctgattgttttaaaagatctctacttatgtggcagatattcacttacttaactttgaggtaaatacagattaatctatgaagggccttatgtacttagaagaagaaatctaaagtttgaatcttacaaccaataatatctaacatttactaaaccccattgccatctattgtgctaactacttaacatcccccgtctgatttatcttcatgaaaacacgttgagacagaacctagtgttggtcccattctaagatgaagaatctgaacctcaaaggggttaagtaatttttcaagaaatcccaccactaaaaagtggtttggtatatgttagaaagaataggttatgtttactctgagtttaaattctggttctgtggtatgtgaccttggtaaattttttaacttgcctgtgctgcaggttctttatgggaatgaagtgaggattaaggaagataatacggtacaacttccagccatagcaagctctcaatgttgtcatttttaccctccagaattaaccagaaatttgaggaaatcccaaatttaaaataatgcatttattttcatcggtctaactaatctgacttgaaatgcctttctggaatggagagtcatttagtgtccttacactacytagaacaaccaacagagaaatcacagattcagctttsaggaaagaaggggtccttataatcctctaatatcatccaatccattcagaccaaggaactacatgggttttcctaaaggagtccagtctgacttaaagttcaagccaggatgcaagaacatgtggttgatgtcagagaagtttgtcccacgccccaggcataattgaaattccaaatccacttcggaaaggagggttgagggagattttcagtcaaagtttttatagcctgtgttttaaaagccmatttgtatggactaaagattgttatttgtccttatccttgggagacgtgagatcattgtttcctgttgttgaatcctctcaccaatccttgtacacgytgttctagtgagctggccagttatataaaacatgatcacagcaggcagattttcccagcatgtagctattgataaaaggtaactgatttcattgactttaccttctaaaatttgtcctttctttgaacttggcctccaacaaaattatgttttatgcttgggtcgttttcctgtgttcagtgtcatgaaatatactctccagagctacagaatctctctcctctaaagatgagtctggaagtctgcagtcagaagcttcccttccacgaagcctcacccccatctctcatcacccacaatcttcttttttggctttggcttcaygtccagactttcccctttcaggttccagtggaccccgtgagttaatccctccagcctctcatttatcttaatcatgatccttctctctttacttttgtaagtcctrttcctcatgtgactgtgggaaattgtatttctttccttttactctaggttctttgagcaacctctctctccccagatgcatgaagttatattttaacttatccctaagtggttctctcttgtccagtggcattttgcttgcccctttgtctctggcacattctcttccaccattggattgggcttctgctgagattttatggaagaaaggcaggcagaatatccttcatatccaatgaggaaataatagaagaagatacagagaaaagtggactggaaacaatgaatcttcattgttttgattttccagagaacgaagggataaaaaaggatagatgtaaaaattccaagtatattattctaaagaatggaagaatgtatatggagaatttgtatatttataaagatttgttctttaagagacagtgagacattttcaaggaagtttcagcctctgcatttggaagaaaacaagactgagaacatgttaggaaaagactagctcagggatgtgacacatgtttttccaattttgttcatggcagatatcactaataagtgatagcactctttcctgctggatctgaatgcagcctcagaatccttcacacagcctcagaatccaacttcagagttggctcttgtttgaaaagtcattttcaatcatttgactattgtctcttactctttctttttttctctaagatttgtgtaggaagcagtttagtacatgaaaacgtgtatgtgaatactttattaacccgataaatatttgttgggcacctggtatgtacaagacactgttttagtcgcttgaataaaagagtcaacattctattctatgagcttgcattccactgagagaactagagcatttattaaacagagagaattattcctgatggtgatgagatacttctcaggtttccatggtagtaagtgcctgagtgggcacagcttttagactggtttggtgtgcctgtatgaggaagtgatatttgagctaggatacaagtaatgaggaaatgctcatgtaggaggtccaggaaaagaattcctggcagagagactagcacaggtgaatccctgaggaaagaatggatttggcacatttgaggaaaagaatgaaaaaggtccatgttgcagaatcaaaacggcaagaagtaaccctggagaactattgagtgggcaaaccatgtaggaccttataggtcatgagaagaaacttagattgtgttggaaatgcagtgggaagtcattggagggagtggaaggagtcaatttgattaattagagagatggcatgacctggtttacattttttaagtccatttccaatttgccttaggaatactgcgctggcagcaagctgccttttttttctaaatgggaaatgggtttaaaaccatctggctgattttggaagattggattgagaataggggaggaagcaaagagggcagttagatggctatccagccattcatagagacaattgatggtgaattggaatgaagggagtaatttagagaaagagaaatggatagagttggagaagttttgmaacagtactttctgatcagtaggaaaggagaagttagtactaccggctgtatttcagctagatttaaaattyatcctgtaataaaggcaacatgagttgaataaatgttccttcaaggatttttttcatcawgtttacttgtgaacccatcacattcagttacccttatytttacctctgttgacaaataccacttgaagaaatggagctttctctcagagaaacaaatgtaagtactggcttgtgttgtttcttttcttggacccttgttaatcttactmcctccccgttatctgcttcatttctaggcatacttaccccataccttctggatcaccttattggatgctttttatcaaagcctggtctgcttctttgtgccttattttgtgagtctttgttcactcagtatatttgttattaatgaatcaatgatgcttctttgtactttgccaccaatttcagcataaaggagggcagattgctcatataatcaggttgattattaactgactaaattataatctccccaaaaatatatgttaggtaatggattaaatttagatagacatacatagtttgagtcctcttaggcctcttgttaactctgtactgcttaaaaatttttatcaatgacttgaacaaaattggatgtctggctatataattagattagtcaaaaatcagacaggctgggcacagtggctcacacctgtaatctcagcattttgggaggctgaggcagttggattgcttgagttgaggagtttgaaaccagcttgcacaacatagtgaggccaccatctctacaaaaaatttaaaaattagctgagtgtagtggtgtggacctgtggccccagctatttgggaggctgaggtaggaggattgcttgagcccaggaggtctaggctgcagtgaactgtgattgcaccactgcactccagcctagacaacagagtgagaccctgtcttaaaaaaatcagagaggcaatgccagaatatgaaagcttttattagtgagtgctgggctaattctactcgaatgatattcagagcattaaatttgagattccataagtaatgtctttaaaactataaaacctgttttacaggtaaataatggaagaaatgtaacaaagcaaaaaaagtataaactttaattttagaaaatttaggctaacacgatacacaaagaagcattgtatagctgctcatccacatatacccttctcctaaagaaaacacctgttttatcatgggtggtgttaatagaagcacagtattaagaatgaaaaagatgatcatttctaaattgacaatttttattctttattcaaataaaatcatttgaattagccttgctggagttttctggctatactgcacttcaggagaaatataaacaaggcaatctgaagtatattcagaatagaatgaagatgatggtgaaacatgagaaaattgtgtcattagaggaatagtataaggacttgaagacatataggaaaggagggtatattttcctaggaaagatagttataatagctgcctcaaagatttgtagctctattaaatagaacaaatttctctataccttaaaaagctagaagtgtgagtgaaaggttccaggaggatcaattatgaytcagaataaagaggaattccagttgaaaaaaactgaagattagatgccctgtctgggagagagtcagtctcttacttgtggaaatgttcaagtttatttcatatggccagttcacagggaccttgtagaagggattcaagccttggttgagctgtagataaagtgatgttacccacaccaagttgcacaactctccaggatcatctaatgtcctctctttgtagacctaccagggctcagatactgacatctttgcatttggaaaccccctgaacacagccgctctgttcatcrttctcctccatctggtcattgaaagcaagagtttggtgagtggttttcttgcctctgaagtagcctaaaaycttttatgcttggggatatgtcttctattagcagtgaccctgaagataagtggtaatgagaagagtaatgaatctatgggagaagggtgatcacagctactctgggtgatcattgaatgccattatgctgaggttgatgtgtagctggggatagtggaaaacacctgccttgctccctttggtagtatcagtggtggagggttcatggagatgtgagacagactggagggatatttaaccttcattcttcaagaccaagctgattacttttagtgaaaatgaaaaaaggtgttgtatcataatcctggtacagtgactttagggatgattttatgccttccttataatagaaaaaatcttttttggctctcctttgggtaaaacccttcagtggtttcccattgtacttggaataaaatatgaaagccctaagatggtgcagtgatgctgtacttctctcttcaacctcatttccacatattcgtgggctggaaccaccttatccctctttcagtttcttcagtacattgaactgattaccacatcaggatcttggcacttagcatatcttttaacggaggtaatttgcattcccccttgcatccctgcacttcacccagcgcaaatgttattttaaatttcatcaaaaatataatttcccccaacagcctttccctaaccatccatcctctaataccattctcttgctcttactcataactctaatcataatttataattatttatttaattatgtgattatctcagaccaggtgcagtgactcacacctgcaattccagagctttgggaggctgtggatcacatgaagctaagagttcaagaccagcctgggcaacatagtgagaccctgtctctaaaaaaaataacaaaactaactgtgtgtcatggcacctgccagcagtcttggccacttgggagactgaggaggaggctcacttgagcccaacagttggaggctgcagtaagctatgatcatgccactgcactccagcttgggaaacagagagaaaccttgtctctaaaaacaaaaaagtgtgattatcttattcatgtttatcttccgcattagcctatgctctctgcgagggtagggttcatgcctattttgttcaccactgtataccagtgttaaaggacaagactgacacacagcagrtgctcaaaaaatatttgaatggataaataaatgatgaaataaccagtttttgggttatgtttaccgtcctgataacatatgaattttaaataggaaatagctgaataaggttatagtttaaaatatatgaagttatattacaaaattatttataacaatttctaaagtagggctgattattttggacattatttgctttgcttacaatcatctataacaaaatattacaagctaaaatgtagtaaaaggttaatatctgcaaataccagatgggtagagtaaaggaaattctagaactgaaatatttgggattgtttttatacctattcaatttttaagcaattgcattggtacttttggtggccacctgagaaaatgccaaaggttctgacatttattagtgtgccagaggatttaacacataaagtgtatcagtttgggttcacggattatgagcaatatcatctgaataacctgaacaaatagaaaagttattaaaaaatataatgaagaaccatgatagaacaaaataaagaaaagcaaaaatatctgagaaaccagagtgactctggagatgcacagagcagaaactaatggtcaggcttgtcaggatggtcctctggtctgaactggctccatttattttctttctgctcttgccccattgtgctccaagtctactctcttgtgatggaatcctatttccctagcttaagtcacaggctttggctaggggaggaatattttgccgagactgcacacaatgctggagtgcagcattgtgaaagctagagtcaaagataaacagagactgctgtttaaaggatgcatcattagagaattgtttcttatgctggaggatgcatggctagagatcctggccctgcaggtctcttgttaataaaagccagccattctgaaagtataaaactctttcccttcatgctcttattcaccatctcattgccacctcccacttccctgttggtttttacccagtattctttgactttcacttctttgtatcaattaacttaaatgtataaactctatgaagtcactatctcacttgccaaaggcatgttttttttgttgttgttttttgtttgtttttgttgttgttgttgtttttgagacagagtcttgctctgtcacccaggctggagtgcagtggcactatctctgctcactgcaagctccgcctcccaggttcatgccattcttctgcctcagcctcccgagtagctgggactacaggcgcccaccaccacgccccgctaattttgtttttgtatttttagtagagacagggtttcaccatcttagccaggatggtctcgatctcctggtctcgtgatccacccacctcagcctcccaaagtgctgggattacaggcgtgagccactgtgcctggccaaagcatgttttaagagataaaaaattggagcaaaatggctcaaatagaaggaaagacatttgagaaagaaaaaaaaggaattattgttttagcagcatgaagatcttaatccaggagttagctaacatttttctagttgtttgtacattttatttaaaaataagcagtctgtgtgactcttgtgaaggtatctgccatggggaaatactttgcaagattaggagagaaaagaagaaaatctaatcttatttgaaaattatagccctagaaaataaaagagattaataaaagcagtgtttccctaaaaagcatgatatgtgccaccaatagtacacaccatgattttaggtagtactgtatactgcactaaataacactaaatactacataatgtgaaggtaattctgttttcatacttccgattatatcaaagaggtatctcatttgatgctattatgttttatcacagtaattcttgctaatttctctttataacaaagattaatcaaaccctagactcagctcttttataacagagaatattaatattatgaagttggtgccaaaaaaaaaacgcaattatttttgcaccaacctcatacatttaaagtaggcatatacttttcttcctttttgaatttaaatctttttttatttctaaaatttttgtgggtacatagtaggtgtatatatttattatrtacatgagatgttttgatacagggttgcaatgtgaaataagcacatcatggagaatggggtatccatcccttcaagcatttatcctttgagttacaaacaatccaaatagatcctttaagttattttaaaatatataattattattgactatagtcatcccattatgctatcaaatagtaggtcttagtcattctttctatttttcttttgtacccattaaccatccccacctcccctgatacctccactacccttcccaggctctgataaccatccttctactttctatgtccatgagttcaattgatttgatttttagatcccacaaataagtgagaacatgcagtatttgtctttctgtgcctgccttatttcatttaacataatgacctctagttccatccatgttgttgtaagtgatagaatctcattctttttttgtggccaaatagtactccatcrtgtagatataccacagttttttatccattcatctgttgatgaacacttaggtggcttccaaaccttggctattgtaaacagtgctgcagcaagcataggagtgcagatatctctttgatatactgatttcctttcttttgggtgtacaaccagcagtgggattgctggatcatacagtagcttaatttttagttttttgaggaacctccaaactgttctccatagtggctgtactaacttacattcccactaacaatgtacaagggttcccttttatccacatcctaaccaatgtttggcattgcctgtcttttggatacaagccattttaactggggtgagattgagatgatatctcattgtacttttctttctagataaagttacttaattagtgaaccgatgttaagaaaaataatattgcaagatatacatgaatatgaaagtagctaggctgtggtatgacacgcaaacatttatttcttgctcatataaagttggctgatattccagacagctctagaagcaaccatcctctcagagaacttcttggtcagtatggaaggaaaggagacagcatggaaaattgcagacaagctcttacatacttctaaccggaaagttttacataccccttgtactcacattttattagtcaaagcaagacatatggccatgcttaatttcaagggagtgtggaaatgtgatccacctgaatgcttactcagggaggagaatgacagtattcgtgatcaacagtactgtctaacacctatttgaatggcttaagtttgaggttcactgggaggaacctgtttccagttaacaaggaaacagaccaatgagtgactacatgaaaaaaattaaggagaaaatccagacacctcttggtgcatggatagtatagaataaactaatcaacagaattcccttttgacatttgatttaatttagttttacagaattcaaayggtgatgtaattcattcacaaaaaatactcccatctccttgatatcttatattttgtttattcaggtttgttacaccattcatccagtgcttagatgtgttgtctctttaatggagcagatttgtccgggtggcaatactgtatcagtgacagagcattcatttcctctgctcttcttgtcttacagacttggattcacttgctggtcatcattggtagcatcttgtcttattttttatttgccatagtttttggagccatgtgtgtaacttgcaacccaccatccaacccttactggattatgcaggagcacatgctggatccagtattctacttagtttgtatcctcacgacrtccattgctcttctgcccaggtatggtatttattttatcattgagagaataaatggaatcataggctaagaatccttcaagcaactacactactamgaatggttggcagsccaccctgtttagtagtgagaaagtcaatttgtgtcctagttaaaatattggtttttaactcttttatcagagaacraaagtggcttaagcaaaccgagagactgatttatctctcatgaaaaagtttatctggttgacagtttacagggatagggtagctttgcttcacagggttatctaaggacctagatccttttctctatctttttactttgctgtctcccaagggtcaggcccttgtttgggtccatttcgtgctgccacagtggaatttataaacagaaatttattggctcacagttttggaggctgaaaagtctaacgtcaagccaccagaagatttgacgatcccaattccaagatggcaccttgaacactgcaccttcagatggtggaagggcaaagaggcaaaaggggatcaaactcgccctcttataatggcattaatctcactcaggagggctctgccttatcacctcttaaaggtcctatctcttaatattgtaaaaacagccgctaaatttcaacatgagttttggrgggaataaacattccaaccatagcagccctcatctcatgacagaaggtgactactcagctgatcctcagccctgcttgcccctgtatacaggaatgggaaagttgagggcaagcagctttgtttttatatttttgtttgtttgtttgtttttcatgtagtggcatgaacctacatatgtacattgtaactgagtggctaaaatcttggagtttctaaaaggaagaaagggaggctgggtgttgagggacaagtagcagtctctactacaatctgtaagcactgaacacttttcaactttcctcccttatctgagttcagttactcccccagttctagtttaatctgatttatagtattgtatgggatggaaatgactaagaagaatacatgggtttttaatatatagattcttggaactcagaactcatcatctctgcagtttcacaaaatctgtttagttgaaaatattataacaaatagttgttctgcttttttaaacataaatgagastcataatggtaagttcatgttattctataacagcgtcaacaaactgtggcaaacaggccaaatttggcctactgtctgattttgtaaataaagctttgttagaatatagccatackcacttatatatgatctatggctgcttatgcaatacaacagcagaactgaatagttccaacaaagtttgtctggctcccagtgcctaaaatattactatccagccctttacagaaaaggtttgcccgctcygatctgtagctgtatcatacggcacagtggacacaatcctttgttgctgatgaatgtctcttccagaaatgcattaaaaaacccatctgagttactcaatggtacttatatataacaatatcactgtgaaacgaagatacttctatagtgctcactgctattgccagcttccagattaaaaactgacaagatgaacttacagaatttctgaaaaaacaattacttaaaggttttagctttaaaaattctgggcctttaacagtatagttctaatattatcgtggtatgctaaaaaatgactccctaaaagatttccatgtcctaatccctgtaacctgtaaattttatcttatgtggcaagaaaagaactttgcatgagtgattacattatggatcttgagacaaagagattagttatccaggtggatcctaaatgtaaccacaagtgtccttataagaaagaggcagagggagatttgacacagaagaggagaaggtactatgactatgggatcatggattccttagccacaagccaagaaatgtcagaagccaccagaagctggaagaggcaaggaatagattctctactagagggtccagagggagcatgccctttccaataccttgattttggcccagtgaagctaatttcataattttttgccttgaaaacattgagagaataatttttgtaattctaagctaccaagtttgtaataacgtggtatagcagtcataggaaactaatacagatttgggtactcagaataggtttctgctataacaaatgcctaaaactgtggaagtggctttgaaactggataatgggcagaggcaggatgaattttggcacataatagaaaaattctcctagacttccttacacaggctcttggtagaaatatggacatttaagttgtaaccagtgatcttgatagctacatttacttattagttccaatattttattttaggttttctacatatacagtaatgccattagcaaataatgaccagtgtgtttctttctttccaatacataggcacttaatttttctcattgacctggctagggaagcttgtcttgtttctgatcccagaaggaaaggtttccatatttctctgttaattatgatgttttatatagaattttatgactataccattaaccagattaaagaagttccattctattccttattttcacatttaaaacatatataaatttgtgtatccattgagataagattttctttgtcacactgttagtgtagtaaattacattaattgcttttataatatgaaaacaatcttgcattcctgaaaaattaagttactgttggtgaggtttcagaagaaaatgaagaagtcagagaaagcctgtatcatcagatgcagagaatacatatatcatcatacacagaaagttgctagaaatatgaattttcaagtacactgatgaggactyggaagaaaatgaggaacatgcttgggaatttgagggaagtggatctttcaaatactggcagaaaaattagctaaattgtgttctacagtaatatggaaagcagaatttgtaaggaatgaacttggatatttggcagaggaggtttctaagcaaagtgtcaaagttgtgtcctgatttactgcttatagtaaaatgtgagaggaaagagactgaagggaaaactgctaagccacaaggaacttggtttaggaaattctcagtctatccagattgcaaaagttgctaaaattaggagattgactgttagtagtatgctctggagagaagtctgagagcatagctggacaacctttctgctagtgctgaagagattagttatgtgattcctagatctcctcaaccattgcagtagtaaccaggaaaagaaatgaggttatacaggaaagatctgtggtggcccctcctatttagtggcataaatccaagtgacatacataggagagtcacaagacttttgagaatgttataccagaagaaacactgccagcttagcctacaaagggacacrtttgtggtactttgttacaatagccataggaaactggtacaaatagcatttttaacacctactatgtgtcaacactctgcctgctttgtatgtattgtctcatttaacctaacattaagcctatgtagcawctatttatatctctacttttatagatgctatttagttttgctttttaataaacacttatatggcaattactattttctaattgctttacaaatattaatttatttaatattgttttatctccattttgtattagagttcggttaccctccccctttatttcaggagccaagtggccaccagacccttttacttttttaattcgttagtatttgggggggggggttcngtaatgcatttgagatgaatttaattctaatgatgttccttgtcacctaggtttgtatacagagttcttcagggatccctgtttccatctccaattctgagagctaagcactttgacagactaactccagaggagaggactaaagctctcaagaagtggagaggggctggaaagatgaatcaagtgacatcaaagtatgctaaccaatcagctggcaagtcaggaagaagacccatgcctggcccttctgctgtatttgcaatgaagtcagcaasttcctgtgstattgagcaaggaaacttatctctgtgtgaaactgctttagatcaaggctactctgaaactaaggcctttgagatggctggaccctccaaaggtaaagaaagctagataccctccttggagttgcaagtattctttcaaggttggaagagggattttgaagaggtatctctccaagcaagaatgacttgtttttccataagggacatgagcattttactaggcttggaagagctgacatratgagcattattgtatgtttgtatatacatttgtgatagagggctagagtttgacctagagagagtttaaggaagtgaaatatttaattcagaaccaaatgcttttgtaaaactttttggattttgtaaaagcattttcattctcttagaaattcaagtattttcaaggggagtcatttgagatatatttattttactaggagatcttatattctagggaaatgctttaaatggtcaggctccartcggaatttttttaagaaaaaagtagtttttaatacattggttaggactcagaggaaatacggaaaaaacattgtagatggttaatttacagataaaatcccaagagccttttaaacaacaaggtacctaaaatagggtataattatactgcttaaaatacagttagtgcctattaatagctttttatttcctatgggragatgcttttggtcttctggctgaagatgtaggcatacctctcactcatttcaatgttttcctgaggtggagccttcattggaaaggggaaagagggattctagggtttcatcagggaccaggaatgcattcctctgtcaggttccaatcaagagaagaccttttatgagatctgcctctgtatagatgttgtcagttaggaaactgaagccataggtcaggcagacrtcagctcagcctgtgrcccattgggtgatttcctgtattttaaaactgacagtagcctgatcaaagtgatacaatcaatttcaaaacaatcttccagagaccacttgaaggttcatagtttttacaataccctgagacttttcaggtgttggagcctctaaaatatgagatataaacagaaactaatacaagttgttctctggaggtttctatgaggttcttagaaaaatttggttttaaaatcatttgaggacaggaatgtctatagcaagtttactcctattgcgaatcatgtatgctggctttagttgtaacaaacgattttattctaagtaaggccaggtgctactataaaatcatatattcctgttgaagttcttttgaagtcctatctctatttattatatttgaaagttgtcagccaccagtcatccagaatttccttcctgaatctccatgctcatatgcaatgtctacatcaaggtcttcttaatgactattattctcagggtttagttttctaccttctgcctactattttggtctgacatttttgtagccttctgttattaytggaaatagtctcttacataagctgatttcgagaactttcaaaatctcacatagctaatggaagttgctttctgctttcttatgactgtttttataaataaactgtttcataaataatgtatactggaaaattgtcatcactcttgtaaacatttgccaaatccaactgtaattagtaccagaacttagaaggaaagtcacaaagcatgccttttaccagaatattgctttgccttttcttatatggaaaatcactgatgtcatatcatttattatcctcacagcagctggcattcattccctgaaatcgtcgtctcctgataaacaataatttagagatatgttcacttgtaaataaaaaggttagaatctaaggacaaagaatgatccaaaaatactaaggaaaaagaacaattttcaattttcagaaatgaattatctgtacatatgaatagaggaaaatactgagtgctaatgttacagggccacaatctcatatccacaattccaaaatctccaaacctctgaaaactgaaatatttttcataaattaggcgtaaattctatgccctgaacaaatgtaaagctatttatgtactttgcttaatgtaatcattcatatactttgctacaaaaatattaatatatttcattactgaatgctaaactgtatttctttttaaaatttggaaaatttttaattctgaaacacaatctagaccttaggctaaagaggttgggatctgtatgaagcctttaaagggtcacatttacaagtcaataactcttttacataaagttacccaagttgatgtgatctggtgttcagtgtatttcaccaaatttgggggggaccaagtattatatcattgctctcagtagataagaacattgattaatatatacattttgggatataatcttattacaaaagatgtataaaataattgtattgggttcccaaaatgtactctggatgttaaagatctgtgtgcccttacgaggactaaagttctcactggacacttaatgggcaatttgagactattagcaacctctaatttcagaccagtcaaggagccattgatcctctaaaataaaagagcatgtatctgtgagagtgagatataagggaggtgaattgtgattggtaagcagggtgccagcatgctgttatagagacagaaacaatttcttaggacttgccacccatatccatccaaaaaaaaaaaaaaggtgattagaccattaccattttatttgtattaagaattatttaaaataagtataatatatatatttcactgagcctaagttgagcaggctaaaagttgatacattgagtatgtagctacaactgtaacaaaactgacatatgttcttgaactttcatacaatcgtgaccacaattcagttgctggatttcacactctccttaggtttatacaaactgaaggacaggagatgaatagtatagaaattgctacaactttttgaatttcaactatgtttacacacagaaaagatacaaaaatacatgtataaaattgcaggtagtatctatttggaatgctgaggcagtccaggttgctggtggaggttagtagggaatcctagttgtttaaaaggcaaaatggatgcctgactaattaaattaagtatatatgaagatttgtgttttaaagttttttagtggggaaaaatactttttaccactaattgcttcagaaattgagttgcgtaaagtggcctagagctaaaaatcatttctaaaattttaattaccaatgagaagaaaccagatattaaacatcttttgaggaaaattacaaaatgttttactccatgcaaagtcttactgtgctctaaaatatgctctttatgactttgttggtatggatgaacgcaagaaaactgaaaaataaatttaattaaacgagggatgcaaattaattttctttttaaaaaattgcatctctcatctaaattctcttttgcaaagtttaatatccagttctttgccacataagtaaaacaaaatattgcccataaatatagatgtagttgttgcagtctcaatcagccaactcatatatcctgaacaaacccagctatgaggacagttctatagagactcttctataaaattatgatcttgatatacatccagaatggggggtccaataatgtcaagtgttaatattgatatctaaagaactttgcattcaatatgtcttgctacctaaatggatgacactggtcttttattgctgtcttttatcagttctcagaattatgcaaacattagaagggggtaatagtaaatactttaaacatgtaaattatcttggcttttaataaatcaaatgacgagttactgggttcagcacaccaacatggcacatgtatacatatgtaactaacctgcacgttgtgctcgtgtaccctaaaattcgaagtgtaataaaaaagaattgtggggtataaaaaaagaaaaagaaaagcaagtctccaatgttaacactgaaatttaccactatgcactgagcttgagaaacaaaaactggtagagataattaatcagcctaaatatctatgtctttttttgtgataggataaaagagaccattccataacctgttactgtagcacctgattttaaatctcgccagagtcgataattttgtgctgcagtcatggttaggcctggcaaaaggacaaagtctgctttgtttgcttttgtaaagtctttcattgaacttgaaataagagaaaaatgaaggtgaaaaaataaattgaaaaaaattagtccaaaacaaacatgcaaatttgcagtgcacgattgagcatttctgtccatgaaaagtgcttctgtacagctctctgcaggcagctcttcacagtcaagaaggccattttcttttagtgtagctggcaaaagtctctgatcatccttataattagtttaggagaaaggtctggatgtaaatctgtcttttaatccattcgacgaaatatgacacattactataaacgccaggccccaggactttggaaaagcagacggagccccatgaagttaatccaaataatgtccaccgtcctccaggcttctcacaaacaagaggcccaccgctgtcaccctgcaataagtaacgatgggagttaggaactggcatttcagggcagtaatgtgtgtccatgctatcctgaggatactataaagctaaacccagattaaccaacttggaaagtttcaacaaagctttccttgtcagcctgtggaggagttgtgctttccactgtaaaaacagaactttcaaataaacatcttaaactctgatcattaaaagggtggagtggcttgggaagaaattatatttttcccccaggaaattacctttttcaggcattttctgcacttataaaaatatgtcataaagtttttaaaaagtatcagaactaattacctcaaaattgacctcattctaatttaagcttgacttatgactgtggaaagtacccaaaatggaataaagatcccccccacacacagtactgcaaacatattctaaaatatctattttcaagattcttgctttgtgaatgaatacattaagcataacacaatttggggtcccttactacacttcttaatagttcttaggactttttaatttggcatagttgaatacaaaataagaccacttaaaattataatgaatcattaatagcctgtattttatttcatatatatagggattttcattcatgatatttaaggattccagttgaactatattcagtttttcccccaaatatagttaatgataaaatgctatggcattagagatagcaatacttgctacatctgaaaacaaaggtgtattctgcactgcctcaaaaaagaagagctgatatcatggaaaataaaagagtaaatacgtgaattcattgtggaaggttacaaatactccttgacctacaagactttcaaaattagaagcatatctatggtcttcctacttggtattgttgaagaacataggactaatgtttcctgatcctcttctaaacattttccacatattagctcatttaatctttacaaaatacctaagagtttatattatttattatatctgttttggagatgatgaaacagaagcacaggttaaataacttattcattggcagaggctagatttgaatccaggcagtctggtaacaggattccaactctataactactaggctaccctgcttcttaggaatattagggaatattattgctatgaaagagaaattaggcccggcgtgctagctcacacctgtaatcccagcactttgggaggccgaggcaggcagatgacttgaggtcaggagttccagaccaacttgatcaacatggtgaaaccctgtctctactcaaaatacaaaaattagccaggtgtggttgtggaaacctgtaatcccagctacgctggaggctgaggcaggagaatcccttgaacccaggagttggaggttgcagtgagctgagatcacaccactgcactccagcctgggagacagagtgaaactccatctcaaaaaaaaaaaaaaaagaagaagaaagagattaaaattttgattgtgctgtatgcttttgtgtaagtgatgatctttaaatttgtaactttccaataccctaagccaaaatcataagcatagaacttgcaaggagctgaatttttctgcctaagagcctaattgaatttttttaaagcaaaatttctttgttacatgtatataatgcttagacgaaaaagaaaaatttcctggaaacatttcacaaattattttcacaaatttgttttcacacatttcatatgcatagggtatttcattcttgatctctccttatataaaataaataagatgctcagctattgaagtggaactattatgtcagagggtgattaaaatggaatgtgtttagaatgtcagcacattttcacttccagatcagacatttagtaaaataattatttagcatctactctttgcaaagttctgtgctagtgtataaacaaacgaataaggcactgtttttgtcccagaacagccaaaagtcagcttgggtaacaaggataaccacatgaaagcaaaatctaatggctagaaagaggaggtcaaaggaatgagtgatgacttccaggtggagaggaataaaaaatgccttcctgagatgtgggttttgagttaggcttagtgagtcaggtaggcaccccattaagtgcaaaatgaaaggtgaaaagcaagcaattaaaaatgaaagggagactacagctaaaggcacaactgatctggtctgttcttttggtcctctttgtaatattgggcttgaaaccaacatttatatttggcttcagtattcagtattcaggtttatagattgtcacggagtaactcacgcttcattatgtcctgttgatacaattaaggaaaataatatctgtcatataatagaggtctaagtagaaaaatttgctcctgatatagtaaaaagtaggttttgtttggttttctacctgaagttgtgttagagaatatctggtatgcatttagtatacccagtactaaatgaacttccactgaactcagtatacaccactgaactcccactactaaagaagtcggcaagacctggttcctattaggcatcatgataagaacatgcccatgcctgtgtctgtgggccttcagctctctgtcaaggaatcatctcccttcccctcctttagcaactgccaagagatgatcttgaacatgtgccaagaggtgctagtttttggtaaacctccaaatgacattggagagaggaagaaatgtagttatattaatcattgctgccagactgactggtttcatgtcctcagtctaccaccttcatgctggctgatttggggcaaattacttaacctcctgtattcttgatctgtttagggaaaataaagacactgccatatgggttgattgtgataattaaatgagttattagaaagcgttttgcagagagcccgaaacataataagcactaaattgatagctgttaatattggtgtaattactattcatt

SEQ ID NO: 94723 - DNA, 12755 bp, Homo sapiens
cgcagcccgggacaagagcaagctgatccagctgggaatcacccacgttgtgaatgccgctgcaggcaagttccaggtggacacaggtgccaaattctaccgtggaatgtccctggagtactatggcatcgaggcggacgacaaccccttcttcgacctcagtgtctactttctgcctgttgctcgatacatccgagctgccctcagtgttccccaaggtgcacttctggatcaggcatggtggagggtggagggtgtgctttaggactctccattattccagtagcactggtgggtgggagtccagagagacaaaccctttcagtaaccctcccactccatagggaaaatagctactaccattcagtgagtgtccccttcagggacaccctggaggctagcaattgcagacataactaagatgcagtgtggtcatcagcatcaccacatccctccataagaggccaggcactggacagaaggtataggacccagtgaagctcttgagcgggttcctctaagatgaggccttggcatagagctgcaggggcagtcgagagggcagaactcgggggaaagggaggtagatggacaccccctataatctgatgcaaacccagtgacctcaggaattcagtaaacccccttcccctggcccagagttgcaaaggatgcctgaggaagcacctggactggaagaaggaaatcccggctgctaacctaaaccctgcctctaacttgctatgtgactttgagccagcctcctctctttgggcttcagttgccccatttgacagagtagacagtgtcagtattccaggatactgtagaggatggccatgggtgtctcttcttcccaaaggggtgggtggttcaagggcaggtagctgatgctaagttggttctccctacaggccgcgtgctggtacactgtgccatgggggtaagccgctctgccacacttgtcctggccttcctcatgatctgtgagaacatgacgctggtagaggccatccagacggtgcaggcccaccgcaatatctgccctaactcaggcttcctccggcagctccaggttctggacaaccgactggggcgggagacggggcggttctgatctggcaggcagccaggatccctgacccttggcccaaccccaccagcctggccctgggaacagcaggctctgctgtttctagtgaccctgagatgtaaacagcaagtgggggctgaggcagaggcagggatagctgggtggtgacctcttagcgggtggatttccctgacccaattcagagattctttatgcaaaagtgagttcagtccatctctataataaaatattcatcgtcataaagacaggtgatcttttggtggtctgtggggcaaggacttactctcgggatggtcacaaggttccagatggcttgccaactctgattcagtgggatggcagcctcggggaggagtacaggtgggaataattcgtgatatctgccttgggtgcaggaggaaggtttgggggtacaagtgtgaggattagataacctcgtcctcatcttgtcctcctcatcttgtcctcctcataccctcacccaatagttaggttgtctgataaagacccaagttcaatgcatcaccattatctccatgcccatcctacccaaggctaaatatcaaaattcactgtccactagtagcatctcttgaaaccagtcagtcttttcactagcactctgctttcaaacggactgcttaaaattagactcctaacaaattaaagcattaaacaagaggatgatggggttgggaaggagacataccagaaatactaggcaaaggacagttatatgatggaacaaaatagctctgagtttcttagttcttatcttggcacaacataaaataaaacaataaagaaaggccccctcccaggttcctcacctgtaaaatacatcataaaaacccaaggtatttatggggtttaaatgggcagctttcctctacctctctggctgctgttagtgaggtcttgcctcctctgtttgtgtgtgtgtgtgtttgggttttctggttgttttgagacagggtctcactctgtggtccaggctggagtgcagtggtgcagtcagctcactgcagtcttgatccccacaccccacctcgagcaatcctttcatctcagcctcccaagtagctgggaccacaggcgtgagccaccacacccagttaattttaaattttttttgtagagatgaggtctcactatgttgtccaggctgctcttgaactcctggactcaagtgattctcctgcttcaggcttccaaagtgctgggattacaggtgtgagccactgtgcctggccccttgcctcctttggctggcccttcaatatcaaggtttctcagagttccatcctctgcctcctctctcctgcagtgtttctgctctctcagttctctgcaacacttgctcccaatcccacattgctgttggctgcctcaggtgctctctgggtcttttacagaggatatacatatgtcttaggtggaggatggtgggagggctggtgctgccgtgtctagcttagtcacagggcccagccccctcctggcaggtgcaaacacccctgggctccccaccctaggaatggaagactgttctcaattcatcctggggttgatggagtctatgattctctggagcagacaaacccagttccagctcagtagccccacctgcccattcccaattcccttggatccctcttccacctgacaactcaatgcttgttgcggtttcttgctcatgcaccatcagtgggacccaagatagtggctccagaagccagtcatccccatctgagtatgggcagcctgcccctgttggctggggtggatgcactgaggctgcgacagagccacactctgggcctggggcttgggttccagcaggtcaccttcttgggtctctgtggattgggtgcagaatctgaggctgcagggggagattgaaggaagccatgaggaggcaggtggaggggaagccaaacattccccaagtactgaggaaatcgaggccgagctccaggctggtacctcctctgggatgccttcctgcctgccacactcacccagggcagcctgtaataacatatctccctcttctatagagcagccttgtgaaagaagtggtgtattgtgaggagcaccactttggagccagactctttgggtgcaaatcctacttctgccccttgtcagatgtatgatctcaatctctccatacctcagtttccctatccataacacaggattaatgacagccaccacataggattgctgtaaggattaagtggggcatatagaaagtgctttgcacaatatgtggtgagttcccagaaatggtagctgtggccaggtgcagtgcttcatgtctgtaatcccagcactttgggaggccaaggcaggaggatcgcctgagcccaagagttcgagaccagcttgggcaacatggcaagaccccatgtcatttataaaaataataaaatacataattaaatgatagctgtgatcaatcatcatcacagcacatagtactggggctccagtcttggactgaaagctggcagcattctcagtgcattgaacgaatggatgaatgagtaaaaattagctgacttaaaggcaacatggtatcctggattggatcctgggttttttttgtttgctttttgttttgagatggagtcttgctctgttgcccagactggagtacagtggcacaatctcggctcactgctcactgcaaactccgcctcccaggttcaagtgattctcctgcctcagccttctgagtagctgggattacaggtacctgccatcatgcctggctattttttgtatttttagtaggaacagggtttcactatgttggccaggctggtcttgaactcctgacctcaggtgatccgcccacctcggcctcccaacgtgctgggattccaggtgtgagccactgcgcctggcatattatttatttattttttttttagtagagacagggtttcaccatgttggtcaggctggtctccaacttctgacctcaaatgatctgcctgcctcagcctcccaaagtgctgagattacgggagtgagccaccccacctggacttggattggatcctggaacagaaaaaggacataagtggaaaaactggtgaaatctgaataaagtttgtggtttagttaatagtgttatagcaatgttaatttatttgataaaggtagcaaggttatgtaagaagctaacatcagagaaagctgagtggatatacaagaaatgtctctgctatctttgtaagtttgctgtaaatctaaaattatttcaaaaataaaaaaattagctgacaattaccaactgctttgcatatgccgggcactgtgccaagttctttagatacaaatttttttttttcaaatttcatccataatgttttatgtcttttgaaaacacatgaatcggagcccaggagctataggctacagtgagccaaactgtgattgcaccactgcagtccagcctgggcgacagagtgggaccctgtctctaaaaaggaaaaaaaaatcaagtatcaaatacagcaaaatgttaagatttgaccatatttatggagttgtgggaatacaggtgtttattatatgattttttatatttaaaaaaatttcatcactttaaaaattaaaaataaataaatctactaacttctaaattaggaacatcctactctgtatttaggtttggaaaccatcaagtcaaatggattttaggaagtattctgggctgggcgcagtggctcacgcctgtaatcccagcactttgggaggctgaggcaggcagatcacttgaggtcaagagttggagaccagcctggccaacacggtgaaaccctatctctactaaaaatacaagaattagcgtggtgtggtggtgcatatctgtagttccagctacttgggaggctgagacacaagaatcgcttgaacctgggaggaagaggctgcagtgagccaagattgcaccactgtactccagcctgggtgatagagcgagactctgtctccaaaaactaaataaataaaaataaaactttaaagaggctatattacaaataatcttgcttaagaaaaaaggtaatgatgactcagttggtagtatttagataaagtaaccgtgttgaagagaagctaagccagtaagtcatactctccatcatttctttcactcctcaatcctgtagggtgggtcgtgtgaacaccattttatgggtgagaacacaggcccagggagattaggccagaacagcagctagtattgattgagaactttattatctacctgtgccttagtcagtcaggctaggccaatgactctgacagccccaaaacctgagtgacctaaactcagcaacactttattgattgattgatatttttattttttagatagcgactcactctgttgcccaggctggagtccagtggtacaatcacagctcactgcagcctcgattttctgggctcaaggggtcctcccacctcagcctcccaagtagttgggaccacaggcacatgccaccacgcccagctgactttttgtagagacggggtctccctatgttaccactctgttcccaaactcctggactcaagcgatcctcctgccttggcctcccaaagtgctgggatgacaggcatgagccaccacacctggccaggccatgctttattttttattcaaacacaggtagatggagggccaggagagtaagcatggaggaatggaggccaggtctactactgcccctcaagttccatgggccagaaccagtcacatggccacacctaactgcaggggaagccaggaaatagtctagggtggtgcccaagaagaagaggaaactgcagatattgatgatcatgagctttctacagcgggcattaaaaaaaacaaaaacaggctttgcagacgccacagccactggcaggagccctgtactatcagccatggttaaccccaccatgttctttgacatcgccgcgagcccttagactgtgtctccttcgagctgtttgcagacaaagtttcaaagrcagcagaaaactttcgtgctctgagcactggagagaaaggatttggttgtaagggttcctgctttcacagaattattccagggtttatgtgtcagggtggtgacttcacatgccataatggcactggtggcaagtccatctactgggagaaatttgatgatgagaacttcatcctaaagcatacaggtcctggcatcttatccatggcaaatgctggacccaacacaaatggttcccagtttttcatctgyactgccaagactaagtggttggatggcaagcatgtggcctttggcaaggtgaaagaaggcatgaatattgtggaggccatggagggtccaggaatggcaagaccagcaagaagatcaccattgctgactgtggacaactctaataagtttgacttgtgttttatcttaacctccagaccattccttctgtaactcaggagagcatccttccacccaatttgctcgcagtatcctagaatctttgtgctctcactgcagttccctttgggtgccatgttttccttgttcccttccatgcccagctggattgcagagttaagtttatgattatgaaataaaaactaaatgccaaacaaacaaacaaaatatatacatacacatacacacatgtataatttatatgtataatttttacatttgtattaatttagaaattatatatatgtatatacaattaaactctcataaaccctaagaggtagataatgttgttattcccattttacagataagaaaactgaggcttaaagagcttaagtaaagtttctcaggttgcttagctagcagggtagaatcatactaccaactcagtcagtgaacctgtgttcttaaacacttcgtgagcctccattctggattggccttagtgacttgctggccaggagaatgcagcagaagcagcattctggggcttccgaggctgtcataagacactttgcatcttctacctgggtctcttggaatgtgctctctgggaatcctgagccaccctgtagaagtcggcctgtgccccactctgccatgctggactggtcatgggtaggccaactggttgacagcctcactgagcccagacactagacatttgtgtgaccctttcttgtttactccataccagcatatctgccagcgaaataccacagagtgacctctgtcaatgccacatggaacagcaaaattgtttactgaaccctcctgaattactgacctaaaatgagatatcagaaaatgctcttgtttggagtcactaagttttggggtagtttgttacacatcaatgggtaagcagcacaggggcagagccaggtctgaccagcagccctggcttgtagccacttcattagcctccagaggagtgtgtgagtgaggaagggacagggcggctacatccatccccccggtgctgagtgcatggagatgagaggccctgtgtctacaggggaatgaagacggcaatagagctccactggagaccaggaaagatgttaggggcccaagggggatattggtggcaaaggccttgagatggggagggtggagaggctaccagaaagagaacctttccccactcctcatccacatccccagctctttcctaagctcccgccatcctaccttcctcccaggacaataaactccagctgagaggcccgagacctccttcctgccctcggcaaggcctcctgggggttctgctggcctctagctcagagccagtccttgatgactgcctcctctgctttctgccctggggtggggagggcagttgcagtgtggactccgtaaccagggaggccttgggggaaacttggttggggaaaactcaaggggaactggcctaccccatgacatcctccccaggtactaccctccctgccaagcaggaggaaccaccaccattattctcctttgcctcagatcactctgcttttctcagctcattcccccaggtgtctgcattcatctcctcatccgtgcttcttgatccgtatgatgtcaggtcagcctggtctctctccttgggagctgctagcatttcccctcctctgagattttctgcgctccggctgctacttcagagccttccatcagcccattcttcccccacccccaccctcccgctccctcctcagaaccctttccctttcacacctgtgcaggtgtttgggctttgcctcctggaccctctgagcctgtgatggggctcctgggacccatgactatgaccccgtcagactaggcttgtgggctccagcttagtgatagtgattgctaggaccatcctgacttggatagtgattgtgagggagggcccaggatcaggggcacactttaaaaggagtgctggagaaggcatcacttcatttgagtgatgaacttgcaggcagcagtgctaagggggaagcttgggagtggggtgaagaggctcttctggttcctttgcagccatgccacatgaatatgaatgagcactctgtccagcctgtgcaaggcacccatcgtgccagcacccctttctgagggattcctggcctcacaaactctttacagggtggatctgctgtcctagccagagacggctgcattaggatgagccctgttaaaaaaaaaaaaattggtgatgcttgttaaagcacagaaaggaagacttcaggaccaccgagatgggtatggggaccacaacagtgggattttgcagtgggaagaagagattgggttcaactctgaatacggcatggacaagtgggactttatagacaaggagaggggtagagttagtggaaggaaaattaccaagaggaaatatcagggataagagggattttggctaaactagcctaataggatttttgctgaaaacaggccaggatggctcgatatcacctgaagaagggtggaggaggagaaacctgatcagatatgcaagggagcgggggcagggaggagttcctgataaactgacttagcagggttgttgctaaaactcaattttaccaggaagtgcacaggtgggccgagaagaaggttcaggagcctgactgaagtttggtcaagccaagaatctttgtctggagctggatagcgacttctacttgcctcccaatatttattctcccctttactttggcaaagagcctcgagtgttatctgggtggccatgaacccagctaaagtagaacatctcccagcctccttgcaggtaagtgtgaccaaatgactacattctggcagatgaaacgtaagtggaattcttgtgtggaacttgtgaaaagtctctttgaaagggaaagactaggccgaggcgggtagatcacctgaggtcaggagttcaagaccagcctggcgaacatgatgaaaccctgtctccaccaaaaacacaaaaattagccggccatggtggtgggcacctgtagtcccagctactagggaggctgaggcagaagaatcacttgaatcctggagggggaggttgcagtgagctgagatggtgccactgcactccagcctgggcgacagagggagactccatctcaaaaaaaaagaaaaaaatcacctccgtggtgctgcctggagtgtgaatgtgagcgtggggctccctgcttgtcctgaaccgcctctgcagtccaggacgagcgagagagaaatgattatcttgagagagaaataagcaaagtttataatttctgagagagaaatgattatcttgtttaagccactatttttgaagtctccgttacttgccccaaacctggtcttaactgttctgtctcctgacccacaggtagccagaggcctgtgaggccctttcatgtaagagctgccattgacaggacggggaattgcccacccagtgaggcgctttctgggagagtttgaatgggagacagagtcagaggtggcaggttgggttggaaggtgcctggagagagagatcaggaagcaggagccagaaggcagcagaagtcaccaagaaccagaggcaggcagctgcagccacaggaacctcagaggcaaagcagaggagagtctccgtaaccagagcactgggaggcagagcagtctgcacttgagaacccatgcggagccggccagggagccatggccatgccgggaggcactcccattgcccagcagagtccttgctcttaagtgtgttactcatgaacctctgaggtcacctgagtgggggtccaccttgtggcatctgaaagaaactcatcattcacttcttgaaccttgataggaccatgggcaccacctgaagagagggagcacctttgggaggatggcgggtcgatggatccaggactgtcccagaaatgggcaccacacagaggtatgtggccgatctcactcactctccatccagcgctgtccctcttgagaagcagccacatgtctccagcaaggagatcgtaacacaccccgccacccacgcaccgccaccaccaagctgcgccgctgcctggggcaggaactgaaaggtagaaagaaccgggccttggacacgggtggactcgggttttcgctgcgactcctcctgcgatcaggagctacgaccagctgtgtgaacctgagcagatattgaactcctctgagcctcaggttcctcaagtgtcaaagtgggaaggattaacagccttgcgcagctctgctgggagggtggaaataacaaagcagcccagtgcctggcacatagtaggcgctcagtacaagcttgagtatctctccttctgctgagacaatcaagagcacagaaggaagacctgtatctccatccttcctgagtgggcggtgggagggctggtaacacagaccccaagagagacgctgtcttttcctgcagcttctcagaacagcagtggggggaggtgcgtgagtgaggcaggaggacataacagggccatttgagtctaaaagaccctcatctggctttacttcacattctttaaatatatgtatataatttacaaacttttgccaagcagtttcacagagataacaggctctgcattctattatagatttcgtaactatggttgtcaacttccattaggatattaggctgtcatgacaagcacagccctcctacgtaacactcagattctccagctactgcagtatttgcttaatgaaaagattcttgcaggctctccagaatccctactgatctttattctgatccttaatttagagaaaaggagagaaaagtaaaatgccttacatgaaacctcctcactttttcaacaaagacgccggtgtggtctggccaaagtatatgcatgttcatacatgcgcacacacacacacacgcatgcatacacacctgaagcaggcttatgagaaaaatctggaatgtcttggaatttttttttcaattacagctcaataaaaatgtcctcataaaatcctaggtaagcaattgctttgccgacaggatggggctacccacatcccagggaagcctgcctggtgtgattgggggaggaagggcagaaaaccagagttgattcctccatcctccccccaactccacccccctcacacacaacagacacaatgggctcctctaaggaacagaatagcccatgctaggggggaaggtagggagaaacctaccttctttctgaagcctgtgtaagtctgtccagacaagaggccagaaggaggtaagccctgtattaagcataatattttgaaaatactgaatggctgtacttttcattcctctcgccgacaattaggttgtctagaagtagggttgccagataaaatacaggacacccggttaaatttgagtttcagataagcaacagataactttttaacataaatacgtcccaaagaagcatgggacaaacttaatctaaaaatttatttgtaggccggtgcagtggctcatgcctctaatcccagcactttgggaggccaaggcaggaagatcacttgagactaggagttcaagaccagcatgggcaacaaaatgagacccccatctctacaaaaaataaagaaaaaaagtagccaggtgtggtggtgcatgcctgtagtcccagctactcaggaggctgaggtggaaggattgcttgagcctgggaggtcaaggctgcagtcagctgtgatcgtgccattgcattccagcctaggtgacagagcaagaccctatctcaaaaaacaaaacacaataacccatttatttgtaaatctttcaaccctacctggaagtcattttgtcattattgtcccagaaaaatgggaaaggggggccacatccagtaggaggaggccaagaggagaggatattctggtaagaaaggaaaagaaagaggatgcttgaagaagagggaggtgaggaggggcagcaacagaggtctatggagggtgacctcccttctctaagacagtgtcccagatgtaggtgggggtgccatatagaacgaggaagacactgaaagagggggactttgctctttactcaggcttctggaagatcattttgcaccaacgtaaacgtgtaacagccagactcaaggggcccatagcatcaaggccttcttgccaccttgctt

SEQ ID NO: 94724 - DNA, 38859 bp, Homo sapiens
cccagtcattaatcatccttccgcccccataaacattatcactattctcacttctatcaccatagattagtttgggattcatactatatgtacttttctttcattcaacattgtttatgagattcacccatgactttactcacaacagtagtctgttattttttattactgtagaatagtccattgtaaaaatatacatcccagccaggtgcagtggctcaggtctataattccagcactgccttggaggccaaggcaggaggatcacttgaactcaggagttcaagaccagtctgggcaacatagtgaaaccccccatctcaatatttacttaataaataaacgtatatcccattactttttcaaatctatttcactgttggacatttcagctgtttccagattggggcttttttgaaaaattgcatgtctctcaatggacatatgtatgcatttctgttgaatacatacccagaagtggaaggcagggtcatagggcatgcatatatccaagcactgttctaagcactttacatatattaacatatttagtcccaatcacaatcctataaggtaggtgctattattaaacccaatgtacagatgaggaaactgaggcatagagaagtctacgctcctgaaccaataaggtctctgcgagggcagggaccacatctgccctgtatggtaaagtattcccagtgtctaccacagtgccttagtaatatacttagatgtacattattcctatttgttgagcttctgctcaacaaatacattttgaataaagtattagcaaatagcaagaattccttttccccttataaccttttatctcaagtgaactgaaaagtgtatttttctatgtctggatataaatgcaagtcagataaaactcttgtgcggttaacccttagcagtttctcctttcaggttaaactgctaagggttaaccgcacaagagtatcattctgaacccactgaatttgaacattagaccttacaatatataagtctaggccaacagatgaggaaacagactcagaagttagaagacttgcccaagattaaactgatgttactggaaaacctggggctagatttcagtttgtatgttaaggagctcttcccaatattgaccagaatgaccaagcagtggtacttggagacttttgggggcaggtaaattctgcttcagactaatgcaaaaagctaagttctaaaaaaaaaagttataaatggaaggattgaaaacacttattttaaaggaagaatcactgaattataaaataactaaaatcaaagactggaacaatttgcaaggacacttaaaataagtcactccctcaaaccaaaatttacttgactcagataaaggttatagattatgggagtataaaagttaaacactataggaatgttacatatttgatcattttcagtcaaatatgaaaatcaaaattaagtaagatattccctgccttaatttggcagcccaaagtaagttctctgacaatcaaatcctgtgttctccacaaaactaaatgaagattaactgggaactagatccatataagtctgactgagtgcatctctcattctcacaagtgcctttccagtggtaatgttctgtactctgtttgcagaaccagtgtctaaatctcttaagaaaagtgctcctgagatcattacaaatcagtttcctcaaagcgtaataacagaaccaaaagattctacagaatgtttctgcagacagaaaacccaacttcatcaggtaaatcttataaatttttagaagtatgaaaatgtttgtcattgtaaggttcaattcctaaccaggagaagtgataattcattgaatggaagggcatggttatctcctaatcaaggaaaggctaattagctgattcatggcataaatctacagacatttactaattccttttatggaatcttcaaatatgtccaggccattctagtctccataaaatgtgactgtgttttaaagatgaaaatgtttattctaagaaggggtgtctggtttgttcagaactctgcaaactactgaaatgatgttttcaggaccaaaacagcatttggtgattatataaatcaggcatgaacatacccacacacatgcatgcacagtttacagctaagaggacatgtgaaaattcccctacagaaagcagagctacggaataaatctgaagacagccagaactactaaaaacggggagtacatctggatgaacccatctgggttaaatatccagtgcatgactggcttaactaattgatactctatttatttttatatgaaatggctaatataccttccaggtattctgttaaccccaggactaaatgtttcagattagattatacccaagacaaaaaactggaccaaatacaaaacaaaagtgatagaaatctcaccttctagattccatcttcttaaagataaggttggccaggcatggtggctcacgcctgtaatctcagcactttgggagaccgaagagggtggatcacttgaggccaggagttcaagaccagcctggtcaacatggtgaaaccccgtctctgctaaaaatacaaaaattacctgagtgtggtggcgggcgcctgtaatcccagctactcgggagacaggtacgagaatcacttgaacttgggaaacggaggttgcaatgagcccagatcataccactccactccagcctaggtgacagagtgagaccctgtctcaaaaaaaaaaaaaaaaaagggaggccaaggcgggcagatcacgaggtcaggagatcgagaccatcctggctaacacagtgaaaccccgtttctactaaaaatacaaaaaattagccgggcgtggtggggggcgcctgtagtcccagctactcgggaggctgaggcaggagaatggcgtgaacccgggaggcggagcttgcagtgaggggagactgcgccactgaactccaccccagcctgggagacagcgagactctgtctcaaaaaaaaaaaaaaatcaagaagataatatataagaaataaattccttcatcaaaaaggaaaaaaacacaatcaaacctttttgcagttgttttaaaactaaccagtgagtgaatgagggtgagaaagtgaaaacagagctttctgcaacagaccaccacttctcagagtacgatatatatatacatatatatatacacacacgtattttatatatatatatataaaactaaactaaaagaaaaagttcttagttttattctggcccttatctatcagtttcgagcagcagataattgtatttccaagacataagggagtgtcattgttcttccaagcagaatcagtcctcccaaaggatgagcactttagctcatgtaaaattttgaattgattatgggtgagaaccagccctctttgtgcaccttaatgattctatgcctacacaagagaaatgttaaattgtttttcagtaatacatttgttcctcaaaaccacataatcacatcattattgcccttatctggtattatttaatcttacaattctttcacagaaaagcaactatagaaaacagatatatgtaaccaggaatcaaatggtattcattaaaaaaaaaaaaaaagaaaaaaaaaacctataaccatgaataccaagtattttcctaaactgggtactaaaactccaaccagtgctaacatgtaagttaaaaaaaaaaaaaagcctctttttcttcaggcacacatttaaagggaaggagaaagggggatgaaaatttcttgaataactttggcaaaaaaagtaaatatagtgaagtacagttcatacatattttctacagaccaccaggcaaccctaaagacctctagattctccctcacccccatgacagagtatccaaaataacaactgtttttttttttttgagacggagtctcgctctgtcgcccaggctggagtgcagtggcgtgatctctgctctctggaacctaagcctcccgggttcaagcgattctcctgcctcagcctccggagtagctaggactacaggagcgcatcaccacacccagctaattgtatttttagcagagatggggtttcaccatgttggccaggatggtctcgatctcttaacctcgtgatccgcccgcctcggcctcccaaagtgctgggattacaggcgtgagccaccgcgcctggccatagtttctaagaatgttacaaactaatgttgctcacaactaccacataatcaagagtttactttctccttggattacgtaactaattttctcaataaactttttttaaaaaaaacaagaaatctattatggtcaacccacaattatccaagattggagctacgcaagttaaaaatattctttttgatgcttcccacattctcagctctttagtaaacaaggaacacacaaaatgtgaaactgaaattgaagtacctgggacaatgaaaacagcaaaaaatacttctaatttaagtttggtggaggaaaagctaatcttttggaatgcgtttatacgtgttgcacccattttgctgttacgtgttattgccaagttccttaactgtagtgtaagttgttaccactgtattgccttatggaaactgtaatactttcagtaagaatatcaaacccaggtttgtttttcttatcctagtgtaataatttatatcaacttccagttaagtcaggtagtaagaaaaggaaagatcaccgaagcaaagtaattttttttaactcgaaaggatctcccaatttttcaaaatcaagtgtatggatcttggcatagagacactactcccctgtcccccttttgaagaagggagttaatttttgtcatgttattaccaacgttttcattcattaggcaagacgtctaccaatgaatcttttccagatgcactgttccctatggttggcttatttccatttaatttatgtgagatctactaccagtagtcattctcaacatcaactagtcatctttccctgggtctgaagtctagcatcctcaagttcccatagcgataactactttcaaacccataatctgctcaatagctctgcccttgcaaacaaaagcttgtggtggttggaggccccgcgcgaaaacctttaggtgttgaaggacctggactggccgccacgccacactagcctattacaggagcagccacaggctccgggagactagaacccgcctgcagtcggggaggagccctgacccagctagaccaagcaaaccggcggtttacaagctggccagcctctggatgggtgcacacaccggggggcggggagggagagagcccctaaaaggcataagtggctgggagggtgggcaggacaggctaaagttcatggaagcgaggtgcccctcgtgcacgcctaggcaacccggtcgacgccacaggcaggtactggcttaggtcggagaggtcggtcctcccgggccctcgggcgctcatgagaacgccgactgcgggaagcggctccgagagatggagacgcacgcccccgccacccccaccctgttgctcaccggtgctgcagccccacgagtcccagagtgatcacatgcggtacatccagctgcgtgggccactctcctgaggcgatgcacccgaacacgccacattcctctcggatccccaactcctccagctccatgtcgccgccgaaagcacgtggaaggacctgccgctgcggccaaggtgtaagcaccaaccagctgccagctcggcccgtcgagctcagaagctcgcgctcgcgacaggctcttccttcccgagggtggccccagctactgcggcggcgcgcgctgtccctaggtggcgtggccagctcagccctgctcctccccctccgagtccaccaacgagcgagggcggaggggcggtcccgcggctgaggggcggggtcacggatgctgtagggtggagctagccttcccctaagagctgcctggaaagctgtatttgctgcacgtggaaatctccgttattttccagcacccaacagtagcgtaatgggagtaacggacttaacctcatttctctttcagagcatttagccttcatatgcccttccctgcatgcttcccccaggccgtcaagacttggtacgctccaacttctgagtcgctcccgcagccgagaaggggccggggtatgcgagcttccgcagagtggggaggggccgccagtgcgcgccacttttcgcctgtccgggcactgcgccagcgcggggcggcccggaggcggggtcgcgtctctgcgcctgcgcggcgggaagccagtggggcgttgtttcgtccgatatccgcgtttcagtctccgcccatacccctccgggttaggcggctgtagcggagctcgaaaagagtggcgcagggtcgcgcggccccgcctccttccccgcccagcgaagctctctgaccacccctcttttctagagttctgcctcgcttcccggcgcggtcgcagccctcagcccacttaggataatggcgacagctgagggtgagtaacagggatccgggcccttcacggtctccctgacccccaggccgtgagctcgcggccacgtgcgagccgcgaaactctgtcccgcctccctgcagcagcgcctctaggcagccgcgcgggcgcacacgtggcccaggcgctcccgggcctccccgaactttactgcctcggggatggggagaaggagcaaagtagaggagaacgagaaatggccaaggggtggaaaggtgcctggaagtattatttataatcaatagctattgcaaaatacaagcaaatcagtcttgattcgtcaaaacctgagtcttgctttgcccgttaggttaatgacctttctaagaaggttaataattgaaacttttgaaagacctgtctagaggccgggcctggtggctcacgcctgtaatcccagcactttgggaggccaaggcgggcggatcacctgaggtcagtagtacgagaccagcctggccaacatggcgaaaccccgtctcttactaaaaatacaaaaaattagctggacgtggtggcgcgcgcctgtaatccccagctactcaggaggctgaggtaggagaatcgcttgaacccggaggcggaggttgcagtgagccgagatcgcgccattgcactccagcctgggcgacaaagcgagactccgtctcaaaaaagaaaaagaaaaacctgtctagggggcgtgtgtgtaagtagtctttgatgccatggtgtgtgtgtgtgtgtgcacgcgcgcgtgaagtagtctttgatgccacgatagcttggggtgtgtgtacgtgcgtgtgcgtgtttaagtagtctttgatgtcatgggtgtgtatgtgtgtgcgcgcgcgtgttgaagtagtctgattccatgatggctggggaggggggctgtttttaggtagtctttgatgccatgatggtgtgtgtgtgtgtgtgtgtgtgtgtgtgtgtgtgtgtgtgtgtttcgttccagtagtctttgatgccacgatggctttgaagaactccaaaacctttaggcaaaaaagttgcactatcaggaaagattgttcttgctatttatgctggaaaaaaacaaatgctggttttttccacacacccagttgctatatgtatagtgaggcaaattgcttttgtggctgctgggtacattcttttccacatagaaagtaactgaattcagattttaaaaagctgtagactcaggccgggcgctgtggctcacgcctgtaatccccagcactttgggagtcccaggcgggcggatcacgaggtcaggagatcgagatcatcctgaccaacatggtgaaaccccggctctactaaaaatgcaaaaatttgctggacgtggtggcgtatgcctgtaatcctagctactcgggaacctgaggcaggagaatcacttgaaccggggagtcagaggctgcagtgagccgggatcgcgccactgcactccagcctggcgacagagagagactctgtctcaaaaaaaaaaaaaaaaaaaaaaaaaagctgtagactcagcaaaaaagattcagatgatattgagtatcaactccctagaatcaaggcaaggaccagaatttttcttgcaatcatggtacctgtacctctaaaatggcaaatctctaaaatctttgctcttccacttctttccatttgtgtaccgttggcaggttgatttttcttaaatgtcacttttatggtctctaaaaggcaaaagtggcaacaaaggcaaaaatggcatctctagagatgttaaatccagtctgtccagtctgaaatcccttttcattcaaatcctgaatactgctatcccttctacctcttcagccctaactttgatttttctctcctgtgaatccttagctatgttccagtcaggttaattcaccaaagtttgtttttcattatatacattttatttatattatttttcccagaacattgctggctaatggaaatataatgtaaatttgtcttctataagccacattttaaaaagtaaaataataaaaaaaactggtgcaatgtgtttatatatatatatatatawatatatatatatataaraggttttttttgttgttgttttttgtttgttttgctttgtttttgaaatggagtctcgctctgtgtggcccaggctggagtgcagtggcaagatctcagctcactgcaccctccactttccaggttcaagtgattctcctgcctcagccccccaagtagctgggattacaggcacactccaccacacccggctaatttttttttgtattttttagtagagtcagggttttgccatgttggccaagctggtctcaaactcctgacctcaagtgatctgcctgtctcagcctcccaaagtgctgggattacaggcgtgagcccattttaatatattttatttaaccctatatacacaaaatacatttcaacatggagtcaagatgaaaaattctttagatattttacaattttttatatcgaatgcagtatatattttaacaaatgacatttcaacttgtaatagccacatttctagtggctgccttattggacagcagagtcctagaattttcttatcctttgtgtaaattctgtgctttcccagactcttaaatttcaattccatgaatcattttcagtcctcatcaatctttccagaattcatctacaaatttgtagcaaccattttggyacttgcagggtatgtcacgtatggttgtttcttatgttgtttctacccattaattcaaattccttccctctttaatgactaagtaatacagattcaactaaattaaggggaggggcattagatacaaactttgcccgggcttactgcatattaatatatataaatgttaatttctttatctgatctgggcactgttttttttgtttttgttttttcttgagacggagtctccctctcttgcccaggctggagtgcagtggcgccatctcagctcactgcaacctccgcctttcaggttcaagcgattttcctgcctcagcctcccaagtagcaaggattacaggcgtgcaccaacacatccggctaatttttgtaattttagtagagacaggattttaccatgttggtcagcctggtcttgaactcctaacctcaagtgatccgcccgcctcggcctcccaaagtgctgggattacaggcatgagccactgttcccrgcccactgttctttacccttccctctcttttatcctccatgatgaattctcaaagctactatcttaaatatcttgcatctttgcccactactctttccttagaccaagacatttctttttcttttcctttttttttattgagacagggtctcactctrtcacccaggcttgagtgaaatagtgcaaatcttggcccactgcggcctcgacctccccaagtagctgagactacaggcatgcaccaccatgctgggctaatttttgtttttttggtagagatgggattttgccctgttgcccaggctggtcttgaactcctgagctaaagcaatctgccctccttgtcttcctaaagtgctgagattacagatgtgagccactgcacctggccagacgtttcttgttcaagttactgcaacagcatcctaactggtcttccaagctctagtttttgttcactcaccccttcctcccttcattgtccatacagaagccgtaatgatctttccaaatagcgttttgctttagcacttaaaagccttatagctcttcttgggttaaagtctaaactcaatcagcatggcttgtgaaacaagaaggatgtgtagcaaaatggaagggaagttttccaggcctaggaaagaagagattgtcagaagctaggggaagattgtataagaattaaagatgttggagttctagataggaaatagacaaataagagtttggagcagtaagccagggctgtatcttaaagggacttttaawccatgttaatgagtctagacattacattagggagggtagagattcatcctctaaattaggtgccctacagtggcaactgttaactaaattacaactactttgtttaatggttacctccactagctggtgatgtggcccctgtccaactcttaagtcttgtctcctgccattctttagctgcagcccccaccccttcccctgcccaacagcaatgtacatatacccagagctccagctccaaccagactgaagttctgcaatccactttgaccaccttgtatttattcatcaacactacctacccctttctctcctttggstaaatttygatgattcttcagatttcaacctgtcactttcttgtagacttctttttctaatgtctagactagtcccatagtctgtatttattgcattctattattatgatgtcttatttaatatcagctcccctcagactcaggtctcttgagagcaggaattattatttactggtacatcccttggcacatggatacaccgggaaaatgttgatactgagagtgttgtggaagtatgagggttgatttctctctttcgaaattttaagttcctaaacatctgttatctttactctttctctaaatcatccttttgtgtacttcttaggttttgtgaccagcatcaaaattggattcctttgtgctcacttcctcacaatttcttacaactgttagtgaagagaaaggattaatgggggcagggacaggattaagaaatagagagggatgcttccaaatgtgctaacttcaatgggatggcatgcctcctcttgaatattaacttgaaatcaagaaactcatctggctgaatgttcccattttgcctacaaaaaagcaaatatcagcaaaaatcgcatattttttcctgcaagatagtttagatactatactgtgagtgtgtctgtgaaaatactagtatagttacattactttaagtgggtcttaattaattttaattctagttcagttctgctatgagaggcaggttaatagtggaaagagcacaggatttgatgtcagaggagttaggattttatctacctcttatatttcctaactgcatgaccctcaacccttttgatttctgctttactaatttctacaattatttatgtaattaaaattcttcacaaratcatgtgaatcaaatgtgatggtatgagaaatacattgtagagtatatggttttatacagatgatttaatttttattaatattacttaatcactgtatatttacagattaattgttctaggtgatttagtcttcagcattcaggaagtttctgaattttggtctatttccattttatttccacagtactgaacattggtaaaaaattatatgagggtaaaacaaaagaagtctacgaattgttagacagtccaggaaaagtcctcctgcagtccaaggaccagattacagcaggaaatgcagctagaaaaaaccacctggaaggaaaagctgcaatctcaaataaaatcaccagttgtatttttcagttattacaggaagcaggtaagcagctccctcaaagtctcttctctcaccttctctggtaagcatgtcgatgtctttcatgtgaagttggcattaatatgaacaacttgtttgcagatgtctcaaaagctaagtgaatttaaatcaaaccaagaacccttaaacttcactataacaccttatttggtttgggattattagtatcattgaattaaaaggaatcttaacaagtttgctgtaatctttatctggcacatgcactctctgtgcagcttacctctccaaggccatcttcactttaaggaatttaactatgaaggaaacccattttaatgttaagcagttctaacatgaagaactgaaatttactccctgtaattctatacaaatggtctttgttctgcctctgggagataatacagaatttcaaattcctcttccacttgaaagccctgaaaagtagttgaagacagcaaccaaaccttctcctcctgccattccccaagtgagatatttgaactaaaaccccagagcgccctcctgttcaaaaactgaatgaaggctctattttcaatagagaaatagattcaaaagaccaaatgaagatcagaacattgtgtggtgggtatttgaagcaaagggaaggaaattaggataaaggggttttctgcagggattcagtcagttgctggttggtctgtagtatatgaaatttcagctaggaaaagatttgaactcttgccacacagtgtaaatagcctcattgctttggatcattcaacctacgaaaccttacctatgaaataaaagctttttctttatcattcttgccaattctaattttataatttaataactttccttacttttaattccaatattcccagttgccctttcatttcttagagtttctggtagcactaatctttcttaaattcaacaggggatttaatgcttttgttttcagttaagttagatgtacgtgccttccacaaaataacaaggtaatgtaatttaaatacattgtcagtgcattcttggcgtagttttgtctcttccaaagtatcctatttcacaattttgattaatgtgaaaaagatttaattgcaaacctggattgtcatctacatcataaattcctctatgctgtgaaagtgagtgtattgctgtaaatttaaaggatcttccagagttcctaagtcacagaatctaagatttttatttcaaggtttcttgattggtagcttcccaatgactgaggtaatttytaaagagagcatcaaattaattttgggttccttttgcaataccgataagtgttccatctatttatttattttatttttttatttattttaagtcagaatcttgctttgttgcccaggctggagtgcagtggcacaatctcggattactgcaacctccatctcctgggttcaagcgattctcatgcctcagcctccccagtagctgggattacagttataggtgcacgccaccatacccggctaatttttgtatttttagtagagacgaggttttgccatattggccaggctggtttcgaactgctggccttaagtgatccacccgcattggcctcccaaagtgctgggattacaggcgtaagccaccacacccggcctgttccatcsatttttttttttcttcccaagttttaactctccccattcacttaaacattttttaaagtgcttaactctttaaaatgttagcagtcagaagattactttctgtgtacccttggtagtttcacatagctacaggattatattaagtaatggaagataaagcctgactttttatttgcttatttagwgtattttctgagtgtatttacactcatcccattatccatttccagaactttataacaagtaaattagagtgactcagttgtgttatgtttgtccaggactttctgctttaattctgaagagtcctgtgatcaggggaacagggaaggatggttacctaaatgaaatactccaataattatctttaaactactttatttggcacttaacatagctaaaacttaactggttcacaggaaatgttgaaagatattttccagattttatgtctagtactatgaaactaagtaaacctgaattttttaaaatttctaaacagactagttttagggtacatattaggaattccattaaaccttatgtaatttttacttgcttagtcaaataaatgccttatctagttggccatcagtggtctatttaaaactgttttctttacaaccwgggttgtgttccaaattaaggtagaaagtagagaggaaagagcatyggaatgagaatcagaaaatcaggattctacttttctcattgtcactcaggaacaaactgtaaaggactatataaataagaagtaatctttttccgtggaaatagtataactgtgttataactgtgttatacaatttgtggatttggttttattacttaaaaattaaaatctggccttcttagtgatgatgaaatcccaatttcctcacagaaactcactataattacattaagtgtaatamtagtatatgaagaacggtactacagttgctaaaccacagatgggcatctggaccaatctaaaagagggatggccacggggacatatgtattagctagaattactattctagctaatatatgttcattgtaatccagagtgtgtcagtgacataaacattttttagtaacctgaatgagagttttgagctttgtagacaactaagataaacaatgggaatttttttctcaccatgcacagtcatggaatttgctttcatatttagcagtattagaagccatcattatgtcatctaaactgagtctgttttagaaacttttagggattttttgtgcagagatgattacygtagcttcattatgtgcttttggttctccttgggattggcggggggatctctctaagacgaagttatctttatattaaaaacaataaaattggatactactgtgtccagcttggtagacaaatgagcaaatatgtgactaatgattaacagatctaagagagaagagctcttgaaaccaaggatgtagttaccaccccaagttgagaattgattgaagtcacctgtctatccatgagcctgatcattcattaaaagttaaacaacagattgcatctaatttttttttaaaggttaaaatgacagttttacttcccctcttttcattttttccttagggtttctgttcatgcaacataccacaattctttctttttttcatttgagtcttacgagtcagattcaaagagagggcagaggaaatagtgtagggtttggacagtgcgtttcaagtccaggctccattaccaaatggctacatgacctagtgtgtgaaattacttctttgagcctctgtttttttcactgtaaaatgtataaataataatacctacttcaaggccaggcgcggtggctcacacctgtaatcccagcaccttgggagactaaggtgggcagatcacgagatcaggagttcctgaccaacatgatgaaaccctgtctctactaaaaatacaaaaattagccaggcgtggtggtgcacacctgtaatcccagctactcaggaggctgaggcaggagaatctcttgaacccaggcggcggaggttgcagtgagccaagatcacgccactgcactccagcctgtgtgacactttgtctcaaaaaaaaaccaaaaaaacaaaaaaacctacctcaaaattttatgcacagttaaatgagacaacatatataagacacttagcacagtggaggatttccataaatagaagctcccttcatgtacagatacacatataacagcaaagatccccaattctttcctgataataaaagttagactagaggattaggttgggattggaaatagtaatgcaggctgaaaataagcattatctcaaacccatgtaggtttccaggagatattttaaatcatgttaatgctgtagcattactttgtactgtgatgtaataacacttccaggagaggcaatacagcaaagtggttaagtgggcggctcctagagacagggtaggttggaaatcctgctatacctaatactagctgacattactactgtgtcttagtgtccttacctgttttkttgatcttaatagtatcttatcaaatgttatgaggattaaacaaaaaagatgtatttaaaatggttggaacaatatctgccataaaataggctcctgatattttttaaaagaaaattgtgataaatacataaaatttaccagtttgaccatttttaagtgtccaattcagtggcattatgtgcattcacaatgttgtacaytcatcccattatccatttccagaactttttcatcatcccaaacaaactgtgtagcattaaacaataactattcctcccactcctcagcccttggtaacttccattctcttttctgtctgaatttgcctattctagttacctcatataagtcaaatcgtaagtatttgttcttttgcattttgtgtttttcatttagcctagtgtttttaagcttcatccatattatatagcatggatgtatcaggaatttcgttcctttttatggctgaacaatacattgtatgtatagtcatgtgctgcttactgtttgagtcaacaactgaccgcatctacattaaataaagagaaaaattacacttatttttgatagaggttctttgttgcttgtaaagggtagagttttattgtgcctcagatctacctttttacatatcatttcaataccttttttaactttggttatcaatatgtaggtattaaaactgccttcaccagaaaatgtggggagacagctttcattgcaccgcagtgtgaaatgattccaattgaatgggtttgcagaagaatagcaactggttcttttctcaaaagaaatcctggtgtcaaggaaggatataagttttacccacctaaagtggagttgtttttcaaggtaattatcttatgcctctgttttatgtcttactgtaacacggcaataaatttataattagaaactctaaaggtttaaatattcaagcaaagtttttgatattttgatattgcaaatgtcattccaaaatttgtcttatctagttgccaatgtcaataatgtacacttccattaacaatgataaatcaaattttaaaaagaaagcatctgaaaatcttacctttgaaccaagatgactaacaggaagaagagaaaagtaacatttagttaatttttttwaaatttagttgaaatctttttatattctaatacaggaaaactatactaacaatgtctcttgtaagtgaaratatataaataaaggttgtaagaatcagtggttatgaattttgtaggctttactgcttttaaccatcttgatttatgctgttaagcatagatctgcttgggaagcaatatcagtcttgctttttaatcaatgagttatgtaacttgtgtgtattatgattatatagatcaagaatttataaagatattgtcatgtaaagttgggacactgctgagaataaaatgaaattatttcatttttttcacttacctctttgtctgaggtctcttgaattatcaaataatgtccctaaaaaattatagtgctgtataaattctaataaaaagtgaggttgggaggttatgagaacggtggttttggaaagatttgattgattaaaatgtgctttggccttcctgtcatgtctgatgactgttattaaggaaaaacaaaaatcacaaacttaaattctgtttaaattggtttatagaggttaaattctttgaaatactttgtgacctagaataagttactcacctaaatactttgaattttaaagtgctattgagagtaaacaaattaagagtaatagttttttctgcttgcaggagctaactaggaaaaaaaagaggagtaataattgctttgaattaaggagtatcgtaaacaaaaaatttctttagatgtctcattttgttgcccaggctgctcttgaactcctaggctcaagcgatcctcctgcttcagcctcctaaattactgggactacagtgtgagccactgcacctggatcaaaatttcttttcttttttttttttttttttgagatggagtctccctctgttgcttaggctagagtgcagtggcgctctctcagctcactgcaacctccacctccygggtttaaatgattctcctgcctcagcctcccaagtagctgggattacaggtgcacaccaccacacccagctaattttttgtaattttagtagacagggtttcackgttggccaggctggtctcgaactcctgatcttgtgatccgcccacctcagccccctaaagtgctgggattacaggcatgagccaccatgcccggctgtggctaaaaatttctaaggagttcatgctcaaggtgaaaaggatgttggtttttctgaaaagtttaaaaattttagattgaagttaattgtactactatactttattcacaggatgatgccaataatgacccacagtggtctgaggaacagctgattgctgcaaaattttgctttgctggacttcttataggccagactgaagtggatatcatgagtcatgctacacaggctatatttgaaatactggagaaatcctggttgccccagaattgtacactggttgatatgaaggtacagataaaacaagtacagataaaacaacaggatttgaaagtaaaggttatagttgagagatgctttcataaaatagtttttgaaaactttgttgacatgctgtttccagattgaatttggtgttgatgtaaccaccaamgaaattgttcttgctgatgttattgacaatgattcctggagactctggccatcaggagatcgaagccaacagaaagacaaacaggtagataatgcttcaggtttttttatcctttttgagatcaagctgagatagasgagaaaggagagatgaggggaaaaagcaaattattgttcctaatgataygaacctgttttgtggattgctgtttatttttaaagataaatgtctctggtatcctaatagaagaataataggaataatactttacatttataaagcaaatttctcatctgttatcttaataacattgtcacaacagtaacagcaagtattatctttgtttggctaaatgaaaactaagggtcttaagaggatgggtatcttcacaattactagagtcagggacagatctgggactctattccaagtctcctgcatgttaccaggccacatttctgctcctatataaaacaacagacacttctcaaaagaagacatttatgcagccaacaaacatgaaaaaaagctcatcatcactgatcattagagaaatgcaaacctaaaccacaatgagataccatctcacaccagtcagaatggctgttttaaaaaagtcaggaaacaacagatgctggagaggctatgaagaaataggaacgcttttacactgttggtgggaatgcaaattagttcagccattgtggaagacagtgtggtgattcctcaaggatctagaaccagaaataccatttgacccagcaatcccattactgggtatatacccaaaggaatataaatcattctactgtaaagacacgtgcacaggagcagcactatttacaatagcaaagacatggaaccaacccaaatgcccatcagtgttagactggataaagaaaatgtgatatacacacaccatggaatactatgcagccataaaaaagaatgagattggccaggcgcggtggctcacacctataatcccagcactttgggaggccaaggcaggtggatgacaaggtcaggagttcaagaccaggccaagatagtgaaaccttgtctcaaaaaaaaaaaaaaaaaaaaattagcyaggcatggtggtgggcacctgtaatcccagcttctcggaaggctgaggcagagaattgtttgaacccgggaggtggaggttgcagtgagccgagattgtgccactgcactccaacctggttgacagagcgagactctgtctccaaaaaaaaaaaaagaaagaaaaagaatgagatcatgtcctttgcagggaaatggattcagctagaagccatcatcctcagcaaactaacacaggaacggaaaaccaaacaccacatgttctcactcataagtgggagttgaacactgaaaacacatggacacagggaggggaacaacacacaccggggcctgttgcagggtggggagcaaggggagggagagcattaggagaaatacctaatgcatatggggcttaaaacctagatgacaggttgatgggtgcagcaaactaccatggcacatgtatacctatgtaacaaacctgcacattctgcacatgtatttaaaataaaaaataacagaaaacaaaattagagcaagaccctttctatacttaatatataaaaattctcaaggcagttaattgtagttgctagtacagaaaacacttaaccttaagtgaaaataaaagtatactttactatggaactttgttagtttaattcaggaagtgaaaagatgcattttcagaagtatcccttgctatacaaactcttcataatccctccccaaaactcagaaaccaaatagtttcaggtagcaagagatacttgttttctaaactttctatcttattttctagtcttatcgggacctcaaagaagtaactcctgaagggctccaaatggtaaagaaaaactttgagtgggttgcagagagagtagaggtaaaccttctatagtaaaactgtatgtattatgtgtttttcttctaagaaaatcttgtttcaaaagaaaaaaaaatgggagagtatagtgcttttcttttcagtgactttgttttttgttgttgttttttttgagacggagtcttgctctgtcgcccaggctggagtgcagtggcgccatctcagctcactgcaagctccgcctcccgggttcacgccattctcctagctcagcctcccgagtagctgggactacaggcgctggccaccacgcccagctaattttttgtatttttagtagagacggggtttcaccgtgttagccaggatggtcttgatctcctgacctcgtgatccccctgcctcggcctcccaaagtgccgggattacaggcgtgagccaccacgcccagctcttcagtgactttgaaagtgaggaacacttttaggaaatgtatcagctgggctatccttactaggatactggaactccgtgctgttaagctggccaatacatacctcccagatcctgttggggaaacctggaatctgtctcctccctaccccgtaggagaaaccttatatttcctactcacctgcactgctagtcagagttccattagcatgggatggatggaactctgtgtgactttaaatattcctttaagttttatggtattactataattctgggagttgaatggggtttgtgattatgcaagggtcataatcacatttgagaacattattcttataggaatatatattttgagttacaagcaattaacttacaaagacttagaacatgacttctgatttggctaatcataccttaaagcttccattaaacaaagtgcactaaaggtcttaggatgaaatattttgtattataatttcctgaaaattaaaagattttgagtatctttactgtttattttaaataatttgtctgataaaaattgaattctttaggtcttgatgaagaccactttcctttatatattgagatttttaaaaataaatcctgtctttttgttgtttgtctctgtcttaaatttgatctgttaagaaagaaaatattgggcccagatataattttactacaaactctagctcatttattcatttttgtttttatgttcttttcatatccacgtattttttcttcagttgcttttgaaatcagaaagtcagtgcagggttgtagtgttgatgggctctacttctgatcttggtcactgtgaaaaaatcaagaaggcctgtggaaattttggcattccatgtgaacttcgagtaacatctgcgcataaaggaccagatgaaactctgaggattaaagctgagtatgaaggtaaaccacaagtaatatggacatttcaggtatttctgattttgctaaaagtaattacacactttagactaataatgctgaaaaaagagctttgtcagttttctaagggaaaaacacatgatatactaggctttctttttttttgagatggagtctcactctgtcgcccaggctggagtacagtggcgccatctcagctcactgcaagctccacctcccgggttcacaccattctcctgcctcagcctcccaagtagctgggactacaggcgcccaccaccatgcccggctaattttttgtatttttaatagagacggggtttcactgtgttagccaggatggtcttgacctgatctcatgatccgcctgccttggcctcccaaagtgctgggattacaggcatgagccaccacgcctggccgctaggctttcttaatactcacctccaaagagcttaaggtattctagaagcttagaaaagaaaggagcagggagaaataattaaaaatgcaagtatgaaaagaaaacaaagactagaatgatgagaacctctggcatccttacctggtaagaagcccctggagcattgcttctaatatactccaatagaaaataggcccccacagttacaggaggcgggaggttaaaatagccggttctcccgggaatctttagttgccaccctttcctgggaggcagtcagataggaaattaaagaacagtttcagaatatagtacataaaaaataatggtatagcagtgatctaaaataatggagccctgggtttacaaccaaatgtttctcaactggaaaaaaatgttgattatttcgtgtacaggttgttgctatggaagtgtagttactaattttgggggagtgggaggttgggggaactcagactcctttgatagctaatgaattctagaactcttttcagaaaattgcaaatacatacaattttggattctaggttaacaaatctctgctttaggaaacaggaggataatttataaatttatcaaagaatgaattgcttaagagattatgttaaaaaatgtatcaaagggccttaaaatttgggggacactatattaattaaactttccttcaactcttgtttgaagacgtgtccctaaacccctagtttatattaactggttctccctgcaccagttgagggaccacccagtcaagaaagacacctgttcagatggtgtcattcttcactttggccagcctatacagcaatagaagaggcctatgagctattccctcactgacaccctgctatcccctttataatgtagatctcaaaaacaaccaaaccgattccagctactttattacttgacttatagtaagtggcagagtaaccttatgttttgaatatatgtgtaataatagtatcttttatgttttttcagagaagactattcaaggacctcaagtaattaaaacatataggccttaaaccaaaaaaaaaaaaaaaccctgtctttaaatctgttttgaatgtttagcataattatactcttgtcatttccctaggggatggcattcctactgtatttgtggcagtggcaggcagaagtaatggtttgggaccagtgatgtctgggaacactgcatatccagttatcagctgtcctcccctcacaccagactggggagttcaggatgtgtggtcttctcttcgactacccagtggtaagatacattgaatttttaaaaactgttcattacaagcatttaacagatgcacaacagtagacagaatagcataataaaatctcatgtacccatgacctagcttcagcaattaacatcttgttgtgtctacagccatctcctgctggattattttaaagcagatcttagacgttatagtaatttatacttaagtatatgtttaagtaatacaggctctagtttttaaatcataatcatgatattgttatagaacaaaaggagcccactatctgatgcattagaaaccagtactatctaagccaccaggtttttgagaaagaaaggcttcctctttcaagttgaccaacaaggagacatgagtccagctcaaatctgtgctggctttaaggcagcaattttattagaaaaggtttaggggatagattctgggattagtaggtgattggtggaaggaaaggggaggtctagaaagtccttgggcatgtgcagttatctcttcatgttatttcatggatcacgtgtgtaaatttgggggagttagaatgaattgtggtggaaattgggcctgtgacatcagtaagctggttctgtgcagactctagttggccatattgtttaatctaccattctgcaaactcaggaatttctgttagttgttggtatcttttaactcttggggacacagtttcaataccatattcacacctaagaaagactagtggtagtttcttaaggtataatttttagttggggtccaagttttctaattgtctcatctgtttgttcagatccaccacagtccttatattgcatttagttgataatctcttgattttttaaatatataacaattcatcctccctttttccctttcattttttcaatagaattttctatattttggatttggcttcttacatttctaggtggtggtaaacatgctcttccattccctatattttctataaactgatggtgagatctgtaataaaatcaagtttagatatttttttcccaagaattcatggtattgatttttttttttaaagtaaatgtgatcatgttacttctgtagagagaatacaattttattcttaaatattggggataaggctgggtgcagtggctcatgcctgtcatcccagcactttgggaggctgaagtgggcagatctctggaggtcaggagttcaagacctgcctggccaatatggtgaaaccccatctctactaaaaatacaaaaattacctaggcatggtggtgagcatctgtaatcccagctactcagaggctgaggtaggagaatcgcttgaacctgggaggcagaggtgagtcaagattgtaccaatggattccaaactgggcaacagagtgagactcggtctcaaaataaaaaattggggataaaagataataacataaggaagtccccttttggctgatggaactggatcacgtaacagtgttgtggttcgttcatcatagtccaagatatgatctgatattctgcagtttatgagggtcaatattgtttcagtaggagatttgctttattactaaaatccctaacttttctcatatctgtatatatccagtcttgatatgtgtcaagtatattaagtctttgagccctccaacctggtccagtggactggcttctctctaggcatcctgtactgctgttgtcttaggatccccctttaccataattttggagactcattttgcctttctctaggcttggatctcccatgttttccccttacttggtttatttttattttgttggagtacattcttgaacttgggggcaaaagaatacaaaaggtaaattttgataccttgtgtatctaaaatgtgtatattgaagccctatacttgatagtttagaaatagaatcctatgctgaaaatcattttgctttggaattttgggagcattattactccactgtctcctagcatccacagttgaggactccattgcttttccaccagtctgattctaggtttcttatgaattttgtttctctctggaatctttcaggatcttttgtctgttttcattgttcttaaattttacacagatgtgatgtgctgagtctgttttcattatggactttcggtgagctcttttaatctgaaattctgatttcttagtccccattttccttgaattatttaattttcatacccctccatattctctcttctcatttttgaatttgaataaatttgggcttcccttgatttctattctacttgtttgtcttgttggtatactttctggaatatttcctaaattttacattccaacccttctattgagtttttcttttttttcttgagacggagtcgggctctcttgcccaggctggagtgcaatggcgcaatctcagcttactgcagcctccgcctcccaggttcaagcggttctcgtgcctcaacctcctgagtacctgggattataggtatgcaccaccacgcctggctaatttttgtatttttagtggagatgtggtttcaccatgttggccaggctggtctcgaactcttgacctcaggtgatctgcctgccctggcctcccaaagtgctgaggttatgggcgtcagccactgtgcccggccttcattttggatacaggtgttttttgtttgttttgacacagggtcttgctctgttgcccaggtgggagcacagtggcatgatcatatctcactggacccttgaactccccgggctcatgtgatccgcccacctcaaactcccaagtagctatgactacaggcccacaccatcacacctggttaatttttttactttttgtagagatgggcactccgtatgttgtccaggcttgtcctgaactcctggactcaagcaatcttcccacctcagcctcccaaagtgttgggattgggtaggaaccactgcctctggggtttttttttttttttttacacaatgtttttatatttcttttggtttttgttttctgggtttttgttgttgttgttgtttgtgtttgtatgtttttaaatttccaaaagctcttttttgttctctggagatgattatagtctgttgcatatagttactttcttcagctgtctggtaatccttggctgtttgcgcttttaagagtggaatactataaaaaacaattggaaacttcaagtgggtggtccgtgtcaaaattgggcttcactgtggggtgtatctggtagggattgttcttcaaacaacccctcacattagtgtctaggtattttcttaagtgttgaccagaattactcagagaacaaaagttgtctgtgcctggcgtcccctagttcaaagacgccaagactgaagtctgttttaccttcagaaaaattaaaggcctggcttggtggctcatgcctataatcccaacactttgggaggcagagattggtggattgcctgagctcagcctaggcaacctggcgaaaccccrtctctaccataaatacaaaaattagctaggcatggtggcacacgcctgtggtcccagctacttgggaagccaaggtgggatgatcactggagcctgggaagttgaggcagcagtgagccgtgattgcaccactgcactccggatgacagagcgagaccgtgtctcagaaaaaaataatgtttaaaaagaaaaaaattgctacagtgctttaaagaggcagttactcaggtagatggagtggggaaggagatttgaggacctagcttcttcttagacttcgagtcagtcatcttcttcttagtccctattcccttccaaaggtatctggtgccactaatttagtcagtcaccctttgggggagttctgtaatgtcagtcatgttgcttctcatctttccctgctttcagtttagaattaagtttttttttttttttttttttaaatggagtttcgctcctgttgcccaggctagaatgcaatggcgcaacctccgcctcccaggttcaagcgattctcctgcctcagcctcccaagtagctgaratcacaggcatgcaccaccatgccagctaattttgattaagttttcttggtctgctaacttagctaccactgtgtttgcctttcagttgccaaaatgttactgctgttatctggccttgtgtgttcatgcctatttcctttactgtttttataggctctgagaattaaattttgtgcctaagctatctttaacaagatgtgattatacaaatgtctcaagctaaaaatcagcggctacaaataaagctgtaaccaaatttatgccagaggaattgtatagatacccatggagcttacaaaaggggagcatgataagcaaaaaattggcagtttttatagtagtgttgtttcaggagtgacaaataatctggaagacttgtacataatgatcactagaattggggataatcttttgaggagtagttttacagtaacctgtgtaaaatcctgaagaccgcccatatttctcatctctgatgtcatgctcactagataacttttttttttttttctgcaatttaagctattcttttaccagaaagggagtcctgggcaggaggcacaggttatttcaaatattagagtggagcactctacctagcgtgctaacaatagtggttgacattcttggagcacatactgtgtaccaggcaatgctctaagcactttatctatgttattaactcattgaagtgtcacatcaggtagctactagttaaaattcccttctcacagaagaggagaataaattaacgtgaagtaacttgaccaataccacatattaaggggtggagctccataaaataacgtattaatacaaattagtaaattggccttgtgatttgtatttgactctgttcttgtggataatgggagtcaaagagcctgatgaattccaagaatatcgggaaaatcgagcttttggaactatagcaaacactagacataatagtacccctgattctagcaaacactagacataatagtaccacctcaagacactctgcctgagcagacatgtggcccctaggatgttacttttttattctgctgtcttggatcttattaatatttatttataacttgacatttcctaaaattattctacggatttgacttttactgctcaaaaatattaaaatagttcaaatgcagayagaaagattagctagaaaactgtcaaaacaacatagctcaagtttgtctaagaacaggtacttttgtactcttaccttgacccttattttgcttcagttgttcttcgccagggattgaaagggatagtgtatgtgaacagaagtttcaaaaagataagtttctttgtaagtgagttctataagaagggtgatagatgatatatataaaatatctcttcatggcaggtaatactgactgcttttcctcttgtaatcactttaccactccggtattaaagacagttgtacagattctactttagattagaataatgcagtagctttttattttctgtggcaggactgctctgagtataaaattttttgtaaggttgtattttcattactaattgagctcaattttctgtcttttccttgctgaaccaataggtcttggctgttcaaccgtactttctccagaaggatcagctcaatttgctgctcagatatttgggttaagcaaccatttggtatggagcaaactgcgagcaagcattttgaacacatggatttccttgaagcaggctgacaagaaaatcagagaatgtaatttataagaaagaatgccattgaattttttaggggaaaaactacaaatttctaatttagctgaaggaaaatcaagcaagatgaaaaggtaattttaaattagagaacacaaataaaatgtattagtgaataaatgcttctctagatccatattaataaacatgagcatctaacccctcctttcttaggctagacaccaagatatttcagccagcctttatcattcctcttactttatcctttttccttaagtattggtggtcactactattgagtttcttccttaacactgattaaatgatcttaactccctcagctaaaactggcattactgactcccagctatatttctccagacttgcatttttttttttttttttgagacagggtctcactgtcgcccaggctggagtgcagtggcgtgatctcagttcactgctgctttccctcctgggctcaagcagttctcccacctcagcctctcgactaacagggactataatcttgcagcaccatgccgagctaattttattttttgtagagatgagctctcactatgtcacccaggttcgtctcaaactcctgaaccctagtaattctcctatctcagcctcccaaagtgctagggttacagacatgagccactgtgcctgtctagacttgtactttcaactgtccatttctccctgtctgtcccatgggcactcatraaaaaacagaatgctcccaactttattcatcttccaagcctgtagctcttggtatactcactgttgcaagtcagaagcttgatttcatcattgatgtttttctcacgtttcacatctcactcatcaccaagtcatgttggtgttaatttctgattaacccttgaatttaccgtcttctcatcctctgtacaaaagcctcaagtgagggtcaaattcaacattatcctgatctagacagcccccattctcaatccacccttttccaagttgattgcccaaggacttctaacaataaactctcttttgcaccacagacttctttgaaaatatacatgctgttgaccctctctgtagaaaaccgcacacataaaacttaccaacagatttcattggttcttgggttctcccgaagcctatccatggtttatagattaagaattgatgaggtagctgggcacagtggctcacacctacgatcacagcacttcgggaggctgaagcaagcagatcacttgaggtcaggagtttgagaccagcctggccaacatggtgaaaccctgtctctactaaaaatacaaaaagtagccagycgtgatgacaggcacctgtartcccagctactcgggaggctgaggcatgagaattgcttgarcccgggaggcggaggttgcagtgagcctrgatcatgccactgcactccaacctgggcagcagagcaagactctgtctcaaaaggggaaaaaaaaaattgctgatgtgacccatgaagggaactcattttcctcgtaattttggactgccacacattggtacctttagttctctgaaggcccacgtttttatcattaagacctatttgttagctagtagagctttatgttcgctgtccatgaaaccttctgtaaccacagtgactacaagtagttctttctctattgaattattaggtccagaatagaagatgtcattgtacactttatttccctcacactgtgttaygctctgatgtgctatgcttagctatctgtcagagattagtaaattataaaactcatgtgtactacttaagtttatatcttatgctagtttataagaacaattaaaaggacttagaagattaactttggtttcatggtctctgaagtcactgactgctatttcagcttgtttacccttacctagcattaagactccatctacttctgtgcagtatatgaaaatttttaaactttcatttagactggtggataggactgaccattacaaattgtcgttatcaattttttttcctttttttttttaagagccaagttctcactgtctcccaggctggagtgcagtggcatgattatggctccctgcagccttgaactcctggactcaagctgcagcctctcgagtagctgggtgcatgtgctaccacacccaattatgaatttcatcattagtttcttagtagagtccacatgtcctcagtagtaagttcatcagtgctaaatatttgaaggtatttctactgttttgtaaaagtaacttaagcctacctggtctgctatcttttgagtatttatactttctacgggcttgtaggtaaacataaaaagagaaaaaatatcccaataatacagtttttaaccttttatgataaagacatgcttagaattgctgttaagctttctgagatttaaccactgaaactaagtaaaagacaaagcacttaggtaaagcttcattcagtatccattcacccaatactggtttgattctagggcctaggaaaataggactgagcaaagcccttgtccagatggaacttatgttttagaggggaaaacaaaccataaaaaggtaaacagtataaaatcaggaaaggataaatgtatatgaagaatcaaaatgaggacggtgatggggataagaggggaaggtttttgaggagagcagagcaatgatgtaaaagcaagacacacagatagggaaatagctttccatactaagggaatgggaaataaagctgagttttgccttgaggacctccaaacatgagaattgctagagctctgtgaacaaggatgagagtggaagacaatataagcaaaggctacatcacttagggcctataggccacactgaagtgtgacaggaaaaactcagtttgagcagaggcttgacatacttaacatatttaaaggttctctggctgttgtgtggacaagaggagaagcagagattagttaagaggctattgtagcccaggtgagggatgatgtatgatcttcaacatgtctaatttttttgtgcctcaatttcatgaaatgaaaatgcgactaataccacctcataaagttgtgagaattacatgagtcaatatatgtaaggcccatcatggcacacaaatgtgttatgtaatatccatttggcagactgaagaacaacagtatgaatggaattcattcaccatgagaattacctggaattctctgggcatggtagctcatgcctgtaatcccagcactttgggtggccgaggcaggtggatcacctgagatcaggagttcgagaccagcctgaccaacatggagaaacccagtctctaataaaaatacaaaactagccgggcatggtggcacattcctgtaatcccagcgactcaggaggctgaggcaggagaatcgcttgaacctgggaagcggaggttgtggtgagccgaggttgcgccattgtactccagcctgggcaacaagagcaaaactctgtttcaaaaaaaaagaaagaaagaaaattacctggaattcaatattgccatcggctgatttaatttctaatatgaagaaaggggcagtgtgatgtgccacggagcatccacaacctgccatttcagcccagccaaccttagaaagccattgaaaagagttgtttttaatggtgtttttacatccagcttcccacacctcaaatacttggggtggaattgttaatctcacattgcagtacaatgaaaatagtggaatggaaatcaagttataaaatggagctaaatatttcttctgcttgcctctgagttgataagataccataagatactgtacatgaggctgggcgcggtggctcacgtcttatttcttctgcttgcctctgagttgacaagataccataagatactgtacatgaggctgggtgcagtggctcacgcctgtaatcccagcactttgggagggtgaggtgggcagatcacctgaggtcgggagttcaagaccagcctgactgacatggagaaaccccctctttactaaaaatacaaaattagccaggcatggtggtgcatgcctataattccaactactcgggaggctgaggcaggagaatcgcttgaacctggaaggcagaggttgtggtgagctgagatcgaaccattgcactccagcctgggcaacaagagcgaaaatctgtcgccaaaaaaaaaaaaaaaaagatactgtacatggaagcttctcaggctaaatccattaatataaaaatacattgtggatactgatgagatggctaattctgtcaacttgactaggctacgggatgccttgatagctggtcaaacaacatttctaggtacatctgtgatggtgtttctggaagagactagcacttgaatcagtagacttgagtaaagaagactgccttcacccatgtgggtgagcgtcatctaatccattgagggcctgaatagaacaaaaaaggggaagaagggtgaactgctgggacatccatttcgtgcccccagatgttggtgctcctggtcctcaggccttcagactaggacttaacgttattgcctcccctgattctcaagccctcgggtttggaactacactggctttcctgggccttcagcctgcagaaggcagactgtgggacttcacctccattttgcagagccaatttctcataatctgtacatatcctattggttctgtattttttagagaacaaatacagcctattatgtatatataagaccctgggaatgcaaagatgaacaaaattaaccttctgctctcaatgaatcttggaagtctccagaggcagacaatttcaaaacaccgtatatagtcttaatatggaattaacaatagggtattgtgaatacacaaaagtaggaaggactctgatctctagaaaacaattgtatactgtgaatgaaaaagactaattctccacagtctatactcaatctctcttacctttccataattttcttcagcaaacttattaccaccaaacatagtacatgtttatttattacccatctctcccaactagaaaataaatgtattacactgggctgtcttctttgttgtcagctgtatcacagcaactggtgtaatacacggcactggcatatacaagacaaacacttgtcagatgaataaaaatgcaaattccaggaggtagggggacacataactacatggaagttagaggtgaatagcatgcaagggggctaggaaataagtatagagacctatgtgagttggggaggtggcaagcagaggccagatcacaaaagctcttactgctcttctttggagttcggattttatcgtgagggtaggaaagtggcatcagatacatgctttaagagatcagtctggtttttttcccaccatgtgaaaacagaagatgccatctatgaatcagagtggcccctcaccagacaatctttccatccttcacaatgtgagatgtaaatttgttatttaaaaaaaaaaaaacaaaacaccactatggtttggaagattcctgtttcaaaaatggcaggttaagccccatatttataggctgtttgccacaaaactccattaaaatgacataagaaatagaaacaagtccacagcagcagaattctgagcatttctaaaagctacaaagtatataggattagaatgatatagaaacgaaaattgccaattcttatataaagtcaatgttctaaaaagtactactaggacagtggctcttaacttttgggaggggatggtggatataaacacctttggagaatacagtggaatctacattttctcagaataacaaaatacaacaaaattttgggtatacccaattttctcacacaacattttgggtataccatgtcatctggagcccccaccccctgaaatctaaacataactggcttgaaacctgtgacaattctagtcagtaaaagtctaaagctcttctcatgatttttactaattcacaagaattacaccctccagcacctagagttcaagccacctttcatgctctttgcattgtatatactggaaggaccagacaaaaatatggcagggcaccatatgccatatcaggagctgggcagtttctgccctcaaggaactcaagattaggcaaggaatgtgaaacaaaaaatgccaactatgtgccaggcagtatgctagatcctagggatactgcagtgagcaaggtaaatatggttccttggcctcagaactatagtccatacagagtgagataacccttaattatcagtgctcagaagtggagtcctatagggagtctcccaacctttttggcaccagggaccggtttcagggaagacaatctttccacaggagttggacagctggtttcagtatgattcaagctcattacatttcccattagattctcttaaggagtgagcaacctagatccttcacattcccagttcacaatagggtttgagctgtgagaagctaatatcacagctgatctgacaggagctcaggcggtactgctcactggcccaccgatcacctactgctgtgccgcccggttcctaacaggctgcagaccagtacaagggttggggacccctgttctaagaggatgcaaccagaaggctgcccagtctgcaagatcaaatgtttcctcaaagtaactttcaacgtataaccagaaagactgaaagacaaaaagtagttagcaaggccgggcacggtggcttacgcctgtaatccctgtactttgggaggctgagagagggcggatcacttgaggtcaggagtttgagaccagcttggccaacacagtgaaaccccatctctactaaaaattcaaaaattaaccgggcgtggtggctcatgctacttgggaggctgaggcaaaagaatcgctttaacccaggaggtggagattgcagtgaggttcatcctgggtcacagagctagactacgtctcaaaaaaaaaaaaaaaaaaaaaaaaaaaaagctaggttcctgagggacacaggaagtagtagaagttgtaaaggtcatgacgagatatgagtctgaagagcaggccattcaatgaaatacaacattcacatcaagtgaatcactcacatcgtcttggtgtggtggctcatgcctgtaatcccagcacttggggaggctgtggtgggaggattgcttgagcccaggagttccagaccagcttgggcaacacggcaagatccccgtctcaaaaaaaaaaaaaaatcactcacatcaagtgtacccaacagatatccattcccttcgtacatctgaacacatcttgatattaacggtcgcaagcaaaccctaatattttatatctctagaacaaatatagtatccccatttcacaatcgggaaaacagactcccagaagctaagtaacttgtttattgtcagacatctagtgagtcgcagagccagggaactgaccacgggcattttcaccccattacccttccagcttattgccgactgctcccgaagggagcgaaaaggacaggcaaagggtttcaccaaaccctttgtaatgggagattcttgccttcttacctttcctcacgtttgcttctctgccagaatgtcttcccgcactttccccagaacccaagttctcctaatcatctttcaagatccctttccctcaaccacagatgagccgtgcctatttctccttcaaatgactccctatggcttctagttggtagtcttttatttaccacctcatagtccttttatttatatcccataaatgatcgtccggccccgcaccgtgggaccaggacgctgcctcgaccatggcggtctcctggaaacaggctgctttgagccgaaactggtgaccgtttcccaaccccgtccaggagtccgacgcctcttttctccaggccaacttcaagtgaggtgtatcaactctatccgcacaaatttcttgccacgagagcagaagattatgatctctgatgctgccttagggctgaagacactcccaactcggcgacgcttagcaatcatcgacttcctcctcctcttggctgcctcggagatcctgttccggggcagaggtctccccgccccgcccctcgtctcctccaagatggcgagcggcggcagcggkggggtgtcagtacctgcgctgtggagtgaagtgaaccggtatggccagaacggcgacttcacscgcgctctcaagaccgtcaataagagtaagtgtcggggtgggcactggggcgggcccaggccggctggaggatgcggcctgtttccggcgcgcgagaccacctcgcgcgggaggcacgggaaggggagacccccgaaacccccccgtctattgtccgcccggctcgggccctagcgcccggaagacgcaggtctcactcctcggcttcaccaggccagcctggggtccctggttgcttacagccacgtgtacttctctttttaccctccgcgggaagcgagggaaggttttaaagagaccgcagctcccggagtccatttcaaactgttttcttatttgactcctttgctgctttatttcacaaatattccaaagtgcctccttttcttcttcgtcttgagcgcagtgatcaggactctattgctgagggagcttgttctctttggccgctaaagggggaggaacctgcttgggacacgtagtttagaggctggtgctaaccaggtggaagctgtacgggttctacggggcgagaggaaagggctggatctggatgtcaggcctgtcattcccatagatgagatctcttcagtgttattaagttaggaaatatgtgtgtggaagcaccaacacttgaaataatgtcggaagaaaagtttggcctgtttttttgccctgtaagggatgatttcggtttttaccgcctttggtgtgaggtttaattcatcatattcttttgttccttactacatacctggaatatggccatgctgcttaatgttctcggtggtgcgcagttcttctctactgaagatacagcctgtgcatgttagatttggaaatgtaattaccaaggcagggcttagctgttcagagtagcagtaacctaaaaggtgtgtcagtaacatgcaa

SEQ ID NO: 94725 - DNA, 15769 bp, Homo sapiens
  misc_feature (1)...(15769): n = A,T,C or G
aagtgccccacctcctaattcaatcactgggggtttgggcttcaacatgtgaatttcagagggacacaaacagtcagtccacaataacacctgtgtgtggtgcccaggctgggataatctgaaagctagatagactcagttgggaatatctgtaggagttccttcatatggtctctccatgtggcttagacctttcttgtcaggagagctgttctgagaaggaatatactaatatggagtgtctcaagggtgaatattttgagagaacaggtggaagctgcatggtttttatggcttggccttagaagtcacataacattacagcagtcatactctgtttattgttgtagttacaagtctggccagattcaagggggcagcgacacaaaccccacctctcaattaagagaagtgtcaaagaatttataggcacttaaaaaaaactgccacacccaatgatgtaagctttttaggtatccttgagcatggattttatatgcagaaaagactgtttagaggtatgctataaataatcaatagcctcatttttaaattttcaaatttaaaagttgatttttcttaggcttttaagtttggcttgcaagttttattattttatttataattccaggagtttttaacaattaattttaagagccctaaataattttttttacatagctgcccctaaaatgtttattttataaatttaccttttacactttattttcattcaacttactcattttacagtgcaaaaacaattgtactttatccattcttccttggtccattgattgattgattgattgattgattgattgatttcttcattcaacttttttctttttttgtgatttttccataagttattggggtacaggtagtgtttggttacatgagtaagttcttcagtggtgatttgtgagattttggtgcacccatcacccaagcagtctacacagcaccatatttgtagtcttttgtccctcacccccctcccactcttcccccccaagtcctcaaagtccattgtatcattcttatgcctttgcgtcctcatagcttagctcccacatatcagtgaaaacatacagtgtttggtttttcattcttgagttactttacttagaataattgtctccaatttcatccaggtcactgcaaatgctattaattcattcctttttatggctgagtagtattccatcctatacatttaccacagtttctttatccacttgttgattgatgggcatttgtgttggttccatgattttgcaattctgaattgtgctgctataaacatgcatgtgcaagtatctttttcaaataagggcttcttttcctctgggtggatacccagcagtgggattgctggatcaaatggtagttctacttttagttctttaaggaatctccacactgttttccacagtggctgtactagtttacattcccaccagcagtgtagaagtgttccctgatcaccgcatccacaccaacatctactgttttcggattttttgattacggccattcttgcaggagtaagctggtattgcattgtagttttgatttgcatttccttgatcattagtgatgttgagcattttttcatatgtttgttggccatttgtatatcttcttttgagaattgtctgttcatgtccttagcccaacttttaatgggattgtttgttttcttcttactgatttgagtttgttgtagattctgcatattagtcctttgtcagatgtatggattgtgaagattttctcccactctgtgggttgtctgtttactctgctgactgttcttttgctgtgcaaaagctctttagtttaattaagtctcagctatttatctttgtttttattgcatttgcttttgagttcttgatcatgaaatccctgcctaagtcaatgtctagaagggtttttccagtgtcatcttccagaattttttttttttttttgagacggaggttcattcttgttgcccaggctggagtgcaatggtgcgatcttgnnnnnnnnnnnnnnnnnnnnnnnnnnnnnnnnnnnnnnnnnnnnnnnnnnnnnnnnnnnnnnnnnnnnnnnnnnnnnnnnnnnnnnnnnnnnnnnnnnnnnnnnnnnnnnnnnnnnnnnnnnnnnnnnnnnnnnnnnnnnnnnnnnnnnnnnnnnnnnnnnnnnnnnnnnnnnnnnnnnnnnnnnnnnnnnnnnnnnnnnnnnnnnnnnnnnnnnnnnnnnnnnnnnnnnnnnnnnnnnnnnnnnnnnnnnnnnnnnnnnnnnnnnnnnnnnnnnnnnnnnnnnnnnnnnnnnnnnnnnnnnnnnnnnnnnnnnnnnnnnnnnnnnnnnnnnnnnnnnnnnnnnnnnnnnnnnnnnnnnnnnnnnnnnnnnnnnnnnnnnnnnnnnnnnnnnnnnnnnnnnnnnnnnnnnnnnnnnnnnnnnnnnnnnnnnnnnnnnnnnnnnnnnnnnnnnnnnnnnnnnnnnnnnnnnnnnnnnnnnnnnnnnnnnnnnnnnnnnnnnnnnnnnnnnnnnnnnnnnnnnnnnnnnnnnnnnnnnnnnnnnnnnnnnnnnnnnnnnnnnnnnnnnnnnnnnnnnnnnnnnnnnnnnnnnnnnnnnnnnnnnnnnnnnnnnnnnnnnnnnnnnnnnnnnnnnnnnnnnnnnnnnnnnnnnnnnnnnnnnnnnnnnnnnnnnnnnnnnnnnnnnnnnnnnnnnnnnnnnnnnnnnnnnnnnnnnnnnnnnnnnnnnnnnnnnnnnnnnnnnnnnnnnnnnnnnnnnnnnnnnnnnnnnnnnnnnnnnnnnnnnnnnnnnnnnnnnnnnnnnnnnnnnnnnnnnnnnnnnnnnnnnnnnnnnnnnnnnnnnnnnnnnnnnnnnnnnnnnnnnnnnnnnnnnnnnnnnnnnnnnnnnnnnnnnnnnnnnnnnnnnnnnnnnnnnnnnnnnnnnnnnnnnnnnnnnnnnnnnnnnnnnnnnnnnnnnnnnnnnnnnnnnnnnnnnnnnnnnnnnnnnnnnnnnnnnnnnnnnnnnnnnnnnnnnnnnnnnnnnnnnnnnnnnnnnnnnnnnnnnnnnnnnnnnnnnnnnnnnnnnnnnnnnnnnnnnnnnnnnnnnnnnnnnnnnnnnnnnnnnnnnnnnnnnnnnnnnnnnnnnnnnnnnnnnnnnnnnnnnnnnnnnnnnnnnnnnnnnnnnnnnnnnnnnnnnnnnnnnnnnnnnnnnnnnnnnnnnnnnnnnnnnnnnnnnnnnnnnnnnnnnnnnnnnnnnnnnnnnnattgtaaaaatggtggagttcttgatttgtttctctgcttggtcactgttggtgcatagaagagctactgatttgtatacattaatcttgtatccagaaactttgccaaattcttttagtagttctagaagctttctggaggagtctttagggttttcaaggtaaatgatcatgtcatgcaaacagtaacagtttgacttcctctttactgatttggataccctttatttctttctcttgtctgattgctttggctaggacttccagtactatgttgaagaggagtggtgagagtgggcatccttgtattgtttcagttctcagagaactttcaacttttccccattcagtattatgttggctgtgagtttgtcatagagggctcttattacattgttatgtcccttgtattttgctgagagtttgctggattttggagagttttggagagttagatgctttttctgcatctattgagatgatcatgtgatttttgtttttaattctgtttatgtggtgtatcacatttattgacttgcatgtgttaaaccattcctgcatccctggtgtgaaacctaggtattaagttcaaaattatgcatggctaaaaggttcattcaatgtgcaagataagcaaatggattgtaaggtaatgaagtacaaaaagttcattcacatagtttcaaatggtactttttgcagctaccatttaagaaactagcacttttcaagttgtagtatcgaggaagaatatccacagttatctgaaaaggctcttgggctcaatccatcctcctgcttcagcctcacaaactgctgatgtcacaggcatgatccaccacacccagccttatggttctttctaagttgaaaattacattaaggaaaggaactgtatcttattattccttgttgggtcttacatactataattgactaagaaatatttgtttaataaattgaataagtacatgattattttaagtctttttagatcataagccttaattgaaagcaatggttgtcatatatttctttcattttcccagaggctgagaggacagacagctttattcacgctttaaaatgcttaaaatgtttaattagtactttgttgtgtcgtacaaagaggtaggatcttcagtttgaatgttacctctacatcttactgtgtaaacttaaataaattaatgaatctcacaataccttggtttctgtcttagagaattagaaataaaaatgatacccgaggtgatgaataaatgattcaatatgttatggtttgatttgtgtccccatccaaatctcatgtagaattataattcccagtgttggaggaggggtctggtgggaggtaattggatcatgagagtggatatcccccttgctgttcttgtgatagtgagtgagttctcaggagatttggttgttaaaagtgtgtagcaccttcccctttgctctgtctcctgttcccaccatgtaagatgtgcttcccctttgcccttccaccatgattgtaaatttcctgaggcctccccagccatgccacctgtacaccctgcagaaccatgagccaacaagacctcactttacaaattaccccatctcaggtaggtctttatagcaatgcaaggatagactaatacacaaaacatgtgaaacactgtcagtgttagtatcatcatcataatcttcatcatcaattaaatagcacaaaaaggaatttgattaatacacaaaacatgtaaaatttgactaatacacaagactaatacacaaaacatgtgaaacactgtcagtgttagtatcatcatcatcataataatcatcatcaattaaacagcacaggaaggaattttaacccacagttaaagccccattttatttcgttattgattatattttccttcaaagttttgtggtaagctttgattttgaatacaagtaatttaaatagaagaccatgtaatttggacaaatttccacaattcagatagtgaagaataacttgggagtctagtggggagacgtatggttctgcttttcttcttattggctttggcttctttttcttatctattccaattagaagagagacacttaaattcactttaagcatggtgatttgtgataatatgagccccaattcccaaagggcaaaaataattatgaacaaagctaagtcaccctttatagcagggatccccaacccctaggctgtggaccaataccggtccgtggcctgttaggaatcaggcagcacagcaggaggtgagcaggagggtgagtgaccattactacctgagttccacctcccgtcagatcagcagtggcattagattctcataggagcgtgaaccctattgttaactgtgcatgcaaaggatctaggttgtgctctccttatgagaatttaatgcctgattatccaagttggaacagtttcatccctaaaccatccttttcccaacactgcccatggaaaaattgtcttctgtgaaactggtccctggtgtccaaaaggttggggaccgctgctttatagcattcttttttggtggggctgagcctggcctcttggctgagtttatcattaccatttatctctgaatcagttatttgctattgcctcaatgtctttagtttaacagttaagttcttgaaaagctacgttggggagccacaactttgcgcgagtgtcttggttgagcgcagcgcccattcattgcccgcgagcgtccatccatctgtccggctggcggtccagcgaaaggggctccaggctggacgcagccgccacccgggggaccgaggccaggagaggggccgagagcgcggctgacccttgcgggccggggcaggggacggtggccgcggccatgcagtcctgtgccagggcgttggggctgctcctgggccgcggggtcgggggcggccgccgcctggctgggggatcggggctgtgctgggcgccgtggggccgggacagcagcagtggcggcggggacagcgccgcggctggggcctcgcgcctcctggagcgccttctgcccagacacgacgacttcgctcggaggcacatcggccctggggacaaagaccagagagagatgctgcagatcttggggctggcgagcattgatgaattgatcgagaagacggtccctgccaacatccatttgaaaagacccttgaaaatggaagaccctgtttgtgaaaatgaaatccttgcaactctgcatgccatttcaagcaaaaaccagatctggagatcctatattggcatgggctattgtaactgctcagtgccacagacgattttgcggaacttactggagaactcaggatggatcacccagtatactccataccagcctgaggtgtctcaggggaggctggagagtttactcaactaccagaccatggtgtgtgacatcacaggcctggacatggccagtgcatccctgctggatgagggactgcggctgcagaggcgctgcagctgtgctacagacacaagaggaggaaatttttygttgacccccrttgccacccacagacaatagctgttgtccagactcgagccaaatatactggagtcctcattgagctgaagttaccctgtgaaatggacttcagtggaaaagatgtcagcggagtgttgttccagtacccagacacggaggggaaggtggaagactttacggaactcgtggagagagctcatcagagtgggagcctggcctgctgtgtgtgctactgaccttttagctttgtgcatcttgaggccaccgggagaatttggggtagacatcgccttgggcagctcccagagatttggagtgccactgggctatgggggaccccacgcagcattttttgccgtccgagaaagcttggtgagaatgatgcctggaagaatggtgggggcaacaagagacgccactgggaaagaagtgtattgtcttgctcttcaaaccagggagcaacacactgagagagacatggctaccagcaacatctgtacagctcaggccctcttggcgaatatggcagccatgtttgcaatctaccatggttcccatgggctggagcatattgctaggagagtacataatgccactttgattttgccagaaggtctcaagcgagcagggcatcaactccagcatgacgtgttctttgataccttgaagattcagtgtggctgctcagtgaaggaggtcttgggcagggccgctcagcggcagatcaattttcggctttttgaggatggcacacttggtatttctcttgatgaaacagtcaatgaaaaagatctggacgatttgttgcggatctttgtttgtgagtcatctgcagaactggttgctgaaagcatgggagaggagtgcagaggtattccagggtctgtgttcaagagsaccagcccgttcctcacccatcaagtgttcaacagctaccactctgaaacaaatattgtccggtatatgaagaaactggaaaataaagacatttcccttgttcacagcatgattccactgggatcctgcaccatgaaactgaacakttcgtctgaactcgcacctatcacatggaaagaatttgcaaacatccacccctttgtgcctctggaccaagctcaaggatatcagcagcttttctgagagcttgagaaggatttgtgtgaactcacaggttatgaccaggtctgtttccagccaaacaggggagcccagggagaatatgctggactggccactatccgagcctacttaaaccagaaaggagaggggcacagaacggtttgcctcattctgaaatcaacacatgggaccaacccaacaagtgcccacatggcaggcatgaagattcagcctgtggaggtggataaatgtgggaatatcaatgcagttcacctcaaggccatggtggataagcacaaggagaacctagcagccatcatgattacatacccatccaccaatggggtgtttgaagagaacatcagtgacgtgtgtgacctcatccmtcaacatggaggataggtctayctagacggggcaaatatgaaygctcaggtgggaatcwgtcgccctggagactttgggtctgatgtctcgcacctaaatcttcacaagaccttctgcattccccacagaggaggtggtcctggcatggggcccattggmgtaagaaataccttgccccgtttttgcccaatcatcccatcatttcactaaagcggaatgaggatgcctgtcctgtgggaaccgtcagtgcggccccatggggctccagttccatcttgcccatttcctgggcttatatcaagatgatgggaggcaagggccttaaacaagccacggaaactgcgatattaaatgccaactacatggccaagcgattagaaaaacactacagaattcttttcaggggtgcaagaggttatgtgggtcatgaatttattttggacacgagacccttcaaaaagtctgcaaatattgaggcagtggatgtggccaagagactccaggattatggatttcacgcccctatcatgccctggcctgtggcagggaccctcatggttgagcccactgagtcggaggacaaggcagagctggacagattctgtgatgccatgatcagcattcggcaggaarttgctgacattgaggagggccgcatcgaccccagggtcaatccgctgaagatgtctccacactccctgacctgcgttatatcttcccactgggaccggccttatattccagagaggtggcagcattcccactccccttcrtgaaaccagagaacaaattctggccagtgattgcccggattgatgacatatatggagatcagcacctggtttgtacctgcccacccatggaagtttatgagttgccattttctgaacaaaagagggcctcttcttagtcctctctccctaagtttaaaggactgatttggtgcctctccccagagcatttgataagcaagaaagatttcatctcccaccccagcctcaagtaggagttttatatactgtgtatatctctgtaatctctgtcgaggtaaatgtaaatacagtacctggagggagtcgaagctgatggttggaagacagatttgctttggtattctgcttacatgtgtgccagttgcctggattgggagccattttgtgttttgcatagaaagttttaggaactttaacttttaatgtggcaagtttgcagactttatagaagctatccaggagacttaatagacatttttttgttccaaaagagtccatgtggactgtgccatctgtgggaaatcccaggacaaatgtttacattttgtataccctgaagaactctttttcctctaatatgcctaatctgtaatcacatttctgagtgttytcctctttttctgtgtgaggttttttttatctgcatttattagtattctaataaaagcattttgattggaaaacaaaacacaacaacaaaaaaaagaaaagctacatcggaatccatgtaatcttgtttgagaaagatagaaattgatcctttcagctgtgattataggttactgcaagattcccaccctttctgctggagtgttgagaagtctggcccagaggtcaaatcatactttgtaatcttgaactaaatagtgtttattacttgatgcttataagtactgttttatttttctcccctagatgcaaaccaagatttcactttctaccctgagtgcgattgcaactccaagaattatagagcttgcccacccaaggatcaagttagagggtctgtgctatgaaagacaaagaagtgaactgcccatccgtcctgtaagccatcrctaccttggtatccttcagctcactttttggctgctcttaggatgctattttgcctctacagggcatagcccaaagtcactggaaaagagaatctgggaagagtggtctgtggcaggaagagagactagctagatgatagggagagagggaaaagagtagaacaccaaaagcatgggctttggagttcagttttggagctggattcaaattgcagcctcgtcactacaagctctatgatgttgggacaaacttcctgagctttattcattcaacaaatatttggatgcctactgtgagccaggcagtgatcccagtgaacaacttggagctctatgctaatcaggggagacaaacaataaattagtcaatagataatgtcagatcatgctaaatgctatcaggaaaataacatagaaaatgaatgactgtggggcagggtggtaagatactttgcctatggtagtcagtgaaggcctctctaaggaaggaatatttgagctgaaacctgactggtaagaaggagtcaaccaagtgaagatctagaagaatattccagtaaagggaagagtacatgccaaagtactaaagttgggatgcacttgaaattgggtggagcaaggtgagctagagaattctggagatagccgccctcaccgagtggtctgctgtgttgagcaataacaggtaagtcatggcactcagcacagagcctggaacctttgatggcttccctccctcttcatccttgacattccccaccatcaattgcagtgccaacttggtgccctattccaattgggttttcaaaaaatatctaatgatcatgttgccaaaagaggtggggccagtttcaccctgtttcaaggaaactgaggatttaatatggaattctattaggaaagaaaaccattctgggaatcagaaactcttggacgagtgtcttaagtttactaaagtgacttgtgactgtcaggcaaatgactttattctcagttttttggtatgtaaaaatggaagtaatggagatctttccttaattgctaggattgtttgggtttattttattttttaaggtctttagaaaaaaggaataccactgcagaaaatcatagtcttagaacccgaaacaaatctgcaccagtgcaatgcagaacactttcaagactactgagagtggtgttagctgtcctccctaattcttttgtttgttttttttgtgatggtggtgttttttttttagacagtgtcttgctctgtcacccaggctggagtgcagcagcacgatcatggctcactgcagcctcaaccttctgggcttaagtgatcctcccacctcagccacctgagcagctgggactacaggcatgtgccaccacccccaagttttaaaaatttttttgtagagacaggggtctcactatattgcccaggctggtctggaacccctgagctcaagtgatccttgtgcctcaacctcccaaagagctaggattataggtgtgagccatcatggctagccccactctaattcttttgagtgagcatttaaaagagagtagtagatgtcatcctaggtattttaccaataaagcaacataacagaaaggcaatctggtagatgtggtttttaaagtaagaccaaaaggagtcagtcagtatatgtttattcagcaccaactatgtgccagagccaattttagcttttagcaaacaagtaattccccttgagcagcttatattctaatggggagaaatacagtcaataaacaaagtgataaatgagctaatgtgggtgttgacatgtgctatgaagaagattaagtaagtcctgcagaagagggtaattaggctgacttgtcttgcctggccagggaagatctccttgaagaatgtgatgtatgagtctagagacttgagtgagggagaggcagccaagccaaggctaagggaagtttttttttcaaggagaactagcaagtgcaaaggtcctgagagggaaggacctggtccagggagtctgtgtggctggaatcacagggatcaaggagaggaggggaggaagatgaggtcagaggggtggggcagaaggcagatcatgtagggccttgtaggccacagaaggagcctaagtgatagggtttggctctgtgtccccactcaaatctcaccttgaattgtaataatcccacatgtcaagggaaggaccaggtggaaataattgactcatgggggtggtttcccccatgctgttctcctgatagttagtgagttctcatgagatctgatggttttataaggggcttcccccttcgctgggctcttacggtctcttgcccccgaccatgtaagatgtgcctttgctcctcctttgccttccgccatgatggtgaggcctccccagccactccccaatggaactgtgattccattaaacctctttttcttaataaattaccccatctcagatatttcttcatagcagtgtgaaaacagaatacactaagtgtgtgtatatatgtatatatacacaataatatgtaataattattattattttgaaacaggatctcactctctcacccaggctggagagcagtggtgctatcacagcttattgtagcctcaacctccctgggctcaagtgatcctcccacttcagcctcctgagcagctgtgaccacagacatgcaccaccatgcccagctaattttttttgctcaaaattattattttttactttattttttaatttttttcactttaagttccaggatacatgtgcggaatgtgcagatttgttacataggtatacatgtgccatggtggtttgctgcacctatcaacctgtcacctaggttttaaaccccacatgcattagctatttgtcctaatgctctccctccccttacacaccccctgccgctgacaggccctggtgtgtgttgttcccctctctgtgtccatgcattctcattgttcaactccttcttatgagtgagaacatgaagtgtttggttttctgttcctgtgttagtttgctgaggatgatggcttccagctccatccatatccttgcaaaagatatgatctcattcttttttatggctgcatagtattccatggtgtgtatgtaccacattttctttatccagtctatcattgatgagcatttggattggttccaggtatttgctattgtgaatagtgctgcagacacttctcaaaagaagacatttatgtggccaacaaacatatgaaaataaaactcaacatcactgatcattagagagatgcaaatcaaaaccacaatgagataccatctcacaccattcagaaaggtgattattaaaaagtcaggaaacaacagatgctggcaaggctgtggagaaataggaatgcttttacactgttggtgggaatgtaaaccagctaatttttgtttttctttgctttcttttttttttttttttttgtagagatgaggttttgccattttgtccaggctagtcttgaactcctgggctcaaatgatctgctcacctcagcctcccaaagtgctgggactgattacaggcacaagccattgtgcttggctgagcctaagtattatttttagcaaaatgggaaacaataggatgggtttatttatttatttatttgagacagagtctcactctgttgccaggctggagtgctgtagtgtgatcttggctcactgcaacctccgactccctggttcaggcgattcttctgcctcagcctcctgagtagctgggattacaggcacgggccaccaagcccagctaatttttgtatttttagtacagacggggtttcaccgtgttagtcaggctggtctcagactcctgacttcatgatccacccgccttggcctcccaaagtgataggattacaggtagcaaccaacgcatccagcccagcatgggtttaaagcctggtagcgatatgatctgatttgggctttagaaagtacttagctcatgaagctgttgtgatgattaagtgggaatgatttaggtaaagcttagaacactgtctggctcacagaacacactcattatatgttcattctctccctcagtaactgtcatggaaggctgcattgtacaggagcaaggatggaagcagagagaccagttacgagtctgttgcagtaatccagaaaagaaatgattgtgacttaagtagggatatagctatagacatagagaaatgtaaaatttgggatatatttttgtgtctctttgtttccactataggtacctcctgctgccatgatagctaaacctagcccccgaacaatagctctagcgaagtccaagtctgttcatcaagattatctacctgaccgtgatgcccattggccagtatcttatgctactactcattccaaagcatcacctaggattcaggaactagctaatccaaataagaggtatgtcaatttcaggctaaagtgggacaggaaaggctggggttctggggagagggagaaagttgacctaataaggcaaatgaaaagagttgtagaaatatgaaaagaacttccaaaacatcttacttaacgaattacatttattgtgatacatctatggtcttcttaccctaaatataaggctactgttaaaaggttagtggactaggtattgcaacttagatctaggatggggcaggtggatcacacctgtaatcctagtgctttgggagaccaaggtgggaggatagcttgaggctaggagttggagaccaccctggggaacatagtgagaccctgtctctacaaaaaattctttaaaaatattggccaggcacggtggctcatactagtaatcccaacactttgggaggcagaggtgggaagatcgcttgagcccaggagtttgacatcagcctaggcaacaaagtgagacccccatctcttcaaaaaaataccaaaaattagccaggtgtggtggcatgtgcctgtagttctagcaacttgggaggctgaggcaggaagtcattgcttgagcccaggagtttgaagttacagtgagctatgatctgcactccagcccaggcagcagagtaagaccttggctctaagaaagagaaaggaaaaaggaaaaagaaacttaagatctaggagacagtctgataagtatgtgtatggaattatttatctaacatatattattaagtgaaacaggttctagaacacagcatgtaatatgttgcaatttgtgtaagaaaaaaagacatgggccatatatttgtttgcatatgcctgtagtatctcagaagggtatacaagaagctagtaacaatggttgcctttgggggcctagggaattgggataggaggaagacttatttttcaataaataggcttttgtatttttccaatgttttgcatcatgtacgtgtatggcctaattcaaatagataagaatatataattaacaaagaaaaacattgcctctcatttctgtttattttttggaggcctcttaacttgcccgagcctcaattaattttgttaccttgacggataacatctgatccctcttttaaagcatcaatagcaaaacctaggagaggcagaaaaagttgtggaagtcttgagctcaggg

SEQ ID NO: 94726 - DNA, 54244 bp, Homo sapiens
gaagactaaatcacctagaacaattaatctgtaaatatacagtgattaagtaatattaataaaaattaaatcatctgtataaaaccatatactctacaatgtatttctcataccatcacatttgattcacatgattttgtgaagaattttaattacataaataattgtagaaattagtaaagcagaaatcaaaagggttgagggtcatgcagttaggaaatataagaggtagataaaatcctaactcctctgacatcaaatcctgtgctctttccactattaacctgcctctcatagcagaactgaactagaattaaaattaattaagacccacttaaagtaatgtaactatactagtattttcacagacacactcacagtatagtatctaaactatcttgcaggaaaaaatatgcgatttttgctgatatttgcttttttgtaggcaaaatgggaacattcagccagatgagtttcttgatttcaagttaatattcaagaggaggcatgccatcccattgaagttagcacatttggaagcatccctctctatttcttaatcctgtccctgcccccattaatcctttctcttcactaacagttgtaagaaattgtgaggaagtgagcacaaaggaatccaattttgatgctggtcacaaaacctaagaagtacacaaaaggatgatttagagaaagagtaaagataacagatgtttaggaacttaaaatttcgaaagagagaaatcaaccctcatacttccacaacactctcagtatcaacattttcccggtgtatccatgtgccaagggatgtaccagtaaataataattcctgctctcaagagacctgagtctgaggggagctgatattaaataagacatcataataatagaatgcaataaatacagactatgggactagtctagacattagaaaaagaagtctacaagaaagtgacaggttgaaatctgaagaatcatcgaaatttagccaaaggagagaaaggggtaggtagtgttgatgaataaatacaaggtggtcaaagtggattgcagaacttcagtctggttggagctggagctctgggtatatgtacattgctgttgggcaggggaaggggtgggggctgcagctaaagaatggcaggagacaagacttaagagttggacaggggccacatcaccagctagtggaggtaaccattaaacaaagtagttgtaatttagttaacagttgccactgtagggcacctaatttagaggatgaatctctaccctccctaatgtaatgtctagactcattaacatggtttaaaagtccctttaagatacagccctggcttactgctccaaactcttatttgtctatttcctatctagaactccaacatctttaattcttatacaatcttcccctagcttctgacaatctcttctttcctaggcctggaaaacttcccttccattttgctacacatccttcttgtttcacaagccatgctgattgagtttagactttaacccaagaagagctataaggcttttaagtgctaaagcaaaacgctatttggaaagatcattacggcttctgtatggacaatgaagggaggaaggggtgagtgaacaaaaactagagcttggaagaccagttaggatgctgttgcagtaacttgaacaagaaacgtctggccaggtgcagtggctcacatctgtaatctcagcactttaggaagacaaggagggcagattgctttagctcaggagttcaagaccagcctgggcaacagggcaaaatcccatctctaccaaaaaaacaaaaattagcccagcatggtggtgcatgcctgtagtctcagctacttggggaggtcgaggccgcagtgggccaagatttgcactatttcactcaagcctgggtgatagagtgagaccctgtctcaataaaaaaaaaggaaaagaaaaagaaatgtcttggtctaaggaaagagtagtgggcaaagatgcaagatatttaagatagtagctttgagaattcatcatggaggataaaagagagggaagggtaaagaacagtgggccgggaacagtggctcatgcctgtaatcccagcactttgggaggccgaggcgggcggatcacttgaggttaggagttcaagaccaggctgaccaacatggtaaaatcctgtctctactaaaattacaaaaattagccggatgtgttggtgcacgcctgtaatccttgctacttgggaggctgaggcaggaaaatcgcttgaacctgaaaggcggaggttgcagtgagctgagatggcgccactgcactccagcctgggcaagagagggagactccgtctcaagaaaaaacaaaaacaaaaaaaacagtgcccagatcagataaagaaattaacatttatatatattaatatgcagtaagcccgggcaaagtttgtatctaatgcccctccccttaatttagttgaatctgtattacttagtcattaaagagggaaggaatttgaattaatgggtagaaacaacataagaaacaaccatacgtgacataccctgcaagtaccaaaatggttgctacaaatttgtagatgaattctggaaagattgatgaggactgaaaatgattcatggaattgaaatttaagagtctgggaaagcacagaatttacacaaaggataagaaaattctaggactctgctgtccaataaggcagccactagaaatgtggctattacaagttgaaatgtcatttgttaaaatatatactgcattcgatataaaaaattgtaaaatatctaaagaatttttcatcttgactccatgttgaaatgtattttgtgtatatagggttaaataaaatatattaaaatgggctcacgcctgtaatcccagcactttgggaggctgagacaggcagatcacttgaggtcaggagtttgagaccagcttggccaacatggcaaaaccctgactctactaaaaaatacaaaaaaaaattagccgggtgtggtggagtgtgcctgtaatcccagctacttggggggctgaggcaggagaatcacttgaacctggaaagtggagggtgcagtgagctgagatcttgccactgcactccagcctgggccacacagagcgagactccatttcaaaaacaaagcaaaacaaacaaaaaacaacaacaaaaaaaaccttttatatatatatatatatatatatatatatatataaacacattgcaccagttttttttattattttactttttaaaatgtggcttatagaagacaaatttacattatatttccattagccagcaatgttctgggaaaaataatataaataaaatgtatataatgaaaaacaaactttggtgaattaacctgactggaacatagctaaggattcacaggagagaaaaatcaaagttagggctgaagaggtagaagggatagcagtattcaggatttgaatgaaaagggatttcagactggacagactggatttaacatctctagagatgccatttttgcctttgttgccacttttgccttttagagaccataaaagtgacatttaagaaaaatcaacctgccaacggtacacaaatggaaagaagtggaagagcaaagattttagagatttgccattttagaggtacaggtaccatgattgcaagaaaaattctggtccttgccttgattctagggagttgatactcaatatcatctgaatcttttttgctgagtctacagcttttttttttttttttttttttttttgagacagagtctctctctgtcgccaggctggagtgcagtggcgcgatcccggctcactgcagcctctgactccccggttcaagtgattctcctgcctcaggttcccgagtagctaggattacaggcatacgccaccacgtccagcaaatttttgcatttttagtagagccggggtttcaccatgttggtcaggatgatctcgatctcctgacctcgtgatccgcccgcctgggactcccaaagtgctggggattacaggcgtgagccacagcgcccggcctgagtctacagctttttaaaatctgaattcagttactttctatgtggaaaagaatgtacccagcagccacaaaagcaatttgcctcactatacatatagcaactgggtgtgtggaaaaaaccagcatttgtttttttccagcataaatagcaagaacaatctttcctgatagtgcaacttttttgcctaaaggttttggagttcttcaaagccatcgtggcatcaaagactactggaacgaaacacacacacacacacacacacacacacacacacacacacacaccatcatggcatcaaagactacctaaaaacagcccccctccccagccatcatggaatcagactacttcaacacgcgcgcgcacacacatacacacccatgacatcaaagactacttaaacacgcacacgcacgtacacacaccccaagctatcgtggcatcaaagactacttcacgcgcgcgtgcacacacacacacacaccatggcatcaaagactacttacacacacgccccctagacaggtttttctttttcttttttgagacggagtctcgctttgtcgcccaggctggagtgcaatggcgcgatctcggctcactgcaacctccgcctccgggttcaagcgattctcctacctcagcctcctgagtagctggggattacaggcgcgcgccaccacgtccagctaattttttgtatttttagtaagagacggggtttcgccatgttggccaggctggtctcgtactactgacctcaggtgatccgcccgccttggcctcccaaagtgctgggattacaggcgtgagccaccaggcccggcctctagacaggtctttcaaaagtttcaattattaaccttcttagaaaggtcattaacctaacgggcaaagcaagactcaggttttgacgaatcaagactgatttgcttgtattttgcaatagctattgattataaataatacttccaggcacctttccaccccttggccatttctcgttctcctctactttgctccttctccccatccccgaggcagtaaagttcggggaggcccgggagcgcctgggccacgtgtgcgcccgcgcggctgcctagaggcgctgctgcagggaggcgggacagagtttcgcggctcgcacgtggccgcgagctcacggcctgggggtcagggagaccgtgaagggcccggatccctgttactcaccctcagctgtcgccattatcctaagtgggctgagggctgcgaccgcgccgggaagcgaggcagaactctagaaaagaggggtggtcagagagcttcgctgggcggggaaggaggcggggccgcgcgaccctgcgccactcttttcgagctccgctacagccgcctaacccggaggggtatgggcggagactgaaacgcggatatcggacgaaacaacgccccactggcttcccgccgcgcaggcgcagagacgcgaccccgcctccgggccgccccgcgctggcgcagtgcccggacaggcgaaaagtggcgcgcactggcggcccctccccactctgcggaagctcgcataccccggccccttctcggctgcgggagcgactcagaagttggagcgtaccaagtcttgacggcctgggggaagcatgcagggaagggcatatgaaggctaaatgctctgaaagagaaatgaggttaagtccgttactcccattacgctactgttgggtgctggaaaataacggagatttccacgtgcagcaaatacagctttccaggcagctcttaggggaaggctagctccaccctacagcatccgtgaccccgcccctcagccgcgggaccgcccctccgccctcgctcgttggtggactcggagggggaggagcagggctgagctggccacgccacctagggacagcgcgcgccgccgcagtagctggggccrccctcgggaaggaagagyctgtcgcgagcgcsagcttctgagctcgacgggccgagctggcagctggttggtgcttacaccttggcygcagcggcaggtccttccacgtgctttcggcggcgacatggagctggaggagttggggatccgagaggaatgtggcgtgttcgggtgcatcgcctcaggagagtggcccacgcagctggatgtaccgcatgtgatcactctgggactcgtggggctgcagcaccggtgagcaacagggtgggggtggcgggggcgtgcgtctccatctctcggagccgcttcccgcagtcggcgttctcatgagcgcccgagggcccgggaggaccgacctctccgacctaagccagtacctgcctgtggcgtcgaccgggttgcctaggcgtgcacgaggggcacctcgcttccatgaactttagcctgtcctgcccaccctcccagccacttatgccttttaggggctctctccctccccgccccccggtgtgtgcacccatccagaggctggccagcttgtaaaccgccggtttgcttggtctagctgggtcagggctcctccccgactgcaggcgggttctagtctcccggagcctgtggctgctcctgtaataggctagtgtggcgtggcggccagtccaggtccttcaacacctaaaggttttcgcgcggggcctccaaccaccacaagcttttgtttgcaagggcagagctattgagcagattatgggtttgaaagtagttatcgctatgggaacttgaggatgctagacttcagacccagggaaagatgactagttgatgttgagaatgactrctggtagtagatctcacataaattaaatggaaataagccaaccatagggaacagtgcatctggaaaagattcattggtagacgtcttgcctaatgaatgaaaacgttggtaataacatgacaaaaattaactcccttcttcaaaagggggacaggggagtagtgtctctatgccaagatccatacacttgattttgaaaaattgggagatcctttcgagttaaaaaaaattactttgcttcggtgatctttccttttcttactacctgacttaactggaagttgatataaattattacactaggataagaaaaacaaacctgggtttgatattcttactgaaagtattacagtttccataaggcaatacagtrgtaacaacttacactacagttaaggaacttggcaataacacgtaacagcaaaatgggtgcaacaygtataaacgcattccaaaagattagcttttcctccaccaaacttaaattagaagtattttttgctgttttcattgtcccaggtacttcaatttcagtttcacattttgtgtgttccttgtttactaaagagctgagaatgtgggaagcatcaaaaagaatatttttaacttgcgtagctccaatcttggataattgtgggttgaccataatagatttcttgttttttttaaaaaaagtttattgagaaaattagttacgtaatccaaggagaaagtaaactcttgattatgtggtagttgtgagcaacattagtttgtaacattcttagaaactatggccaggcgcggtggctcacgcctgtaatcccagcactttgggaggccgaggcgggcggatcacgaggttaagagatcgagaccatcctggccaacatggtgaaaccccatctctgctaaaaatacaattagctgggtgtggtgatgcgctcctgtagtcctagctactccggaggctgaggcaggagaatcgcttgaacccgggaggcttaggttccagagagcagagatcacgccactgcactccagcctgggcgacagagcgagactccgtctcaaaaaaaaaaaaacagttgttattttggatactctgtcatgggggtgagggagaatctagaggtctttagggttgcctggtggtctgtagaaaatatgtatgaactgtacttcactatatttactttttttgccaaagttattcaagaaattttcatccccctttctccttccctttaaatgtgtgcctgaaraaaaagaggcttttttttttttttaacttacatgttagcactggttggagttttagtacccagtttaggaaaatacttggtattcatggttataggttttttttttctttttttttttttttaatgaataccatttgattcctggttacatatatctgttttctatagttgcttttctgkgaaagaattgtaagattaaataataccagataagggcaataatgatgtgattatgtggttttgaggaacaaatgtattactgaaaaacaatttaacatttctcttgtgtaggcatagaatcattaaggtgcacaaagagggctggttctcacccataatcaattcaaaattttacatgagctaaagtgctcatcctttgggaggactgattctgcttggaagaacaatgacactcccttatgtcttggaaatacaattatctgctgctcgaaactgatagataagggccagaataaaactaagaactttttcttttagtttagttttatatatatatatataaaatacgtgtgtgkatrtatatatgtatatatatatcgtactctgagaagtggtggtctgttgcagaaagctctgttttcactttctcaccctcattcactcactggttagttttaaaacaactgcaaaaaggtttgattgtgtttttttcctttttgatgaaggaatttatttcttatatattatcttcttgatttttttttttttttgagacagagtctcgctgtctcccaggctggggtggagttcagtggcgcagtctcccctcactgcaagctccgcctcccgggttcacgccattctcctgcctcagcctcccgagtagctgggactacaggcgccccccaccacgcccggctaattttttgtatttttagtagaaacggggtttcactgtgttagccaggatggtctcgatctcctgacctcgtgatctgcccgccttggcctcccttttttttttttttttttgagacagggtctcactctgtcacctaggctggagtggagtggtatgatctgggctcattgcaacctccgtttcccaagttcaagtgattctcgtacctgtctcccragtagctgggattacaggcgcccgccaccacactcaggtaatttttgtatttttagcagagacggggtttcaccatgttgaccaggctggtcttgaactcctggcctcaagtgatccaccctcttcggtctcccaaagtgctgagattacaggcgtgagccaccatgcctggccaaccttatctttaagaagatggaatctagaaggtgagatttctatcacttttgttttgtatttggtccagttttttgtcttgggtataatctaatctgaaacatttagtcctggggttaacagaatacctggaaggtatattagccatttcatataaaaataaatagagtatcaattagttaagccagtcatgcactggatatttaacccagatgggttcatccagatgtactccccgtttttagtagttctggctgtcttcagatttattccgtagctctgctttctgtaggggaattttcacatgtcctcttagctgtaaactgtgcatgcatgtgtgtgggtatgttcatgcctgatttatataatcaccaaatgctgttttggtcctgaaaacatcatttcagtagtttgcagagttctgaacaaaccagacaccccttcttagaataaacattttcatctttaaaacacagtcacattttatggagactagaatggcctggacatatttgaagattccataaaaggaattagtaaatgtctgtagatttatgccatgaatcagctaattagcctttccttgattaggagataaccatgcccttccattcaatgaattatcacttctcctggttaggaattgaaccttacaatgacaaacattttcatacttctaaaaatttataagatttacctgatgaagttgggttttctgtctgcagaaacattctgtagaatcttttggttctgttattacgctttgaggaaactgatttgtaatgatctcaggagcacttttcttaagagatttagacactggttctgcaaacagagtacagaacattaccactggaaaggcacttgtgagaatgagagatgcactcagtcagacttatatggatctagttcccagttaatcttcatttagttttgtggagaacacaggatttgattgtcagagaacttactttgggctgccaaattaaggcagggaatatcttacttaattttgattttcatatttgactgaaaatgatcaaatatgtaacattcctatagtgtttaacttttatrctcccataatctataacctttatctgagtcaagtaaattttggtttgagggagtgacttattttaagtgtccttgcaaattgttccagtctttgattttagttattttataattcagtgattcttcctttaaaataagtgttttcaatccttccatttataacttttttttttagaacttagctttttgcattagtctgaagcagaatttacctgcccccaaaagtctccaagtaccactgcttggtcattctggtcaatattgggaagagctccttaacatacaaactgaaatctagccccaggttttccagtaacatcagtttaatcttgggcaagtcttctaacttctgagtctgtttcctcatctgttggcctagacttatatattgtaaggtctaatgttcaaattcagtgggttcagaatgatactcttgtgcggttaacccttagcagtttaacctgaaaggagaaactgctaagggttaaccgcacaagagttttatctgacttgcatttatatccagacatagaaaaatacacttttcagttcacttgagataaaaggttataaggggaaaaggaattcttgctatttgctaatactttattcaaaatgtatttgttgagcagaagctcaacaaataggaataatgtacatctaagtatattactaaggcactgtggtagacactgggaatactttaccatacagggcagatgtggtccctgccctcgcagagaccttattggttcaggagcgtagacttctctatgcctcagtttcctcatctgtacattgggtttaataatagcacctaccttataggattgtgattgggactaaatatgttaatatatgtaaagtgcttagaacagtgcttggatatatgcatgccctatgaccctgccttccacttctgggtatgtattcaacagaaatgcatacatatgtccattgagagacatgcaatttttcaaaaaagccccaatctggaaacagctgaaatgtccaacagtgaaatagatttkaaaaagtaatgggatatacgtttatttattaagtaaatattgagatggggggtttcactatgttgcccagactggtcttgaactcctgagttcaagtgatcctcctgccttggcctccaaggcagtgctggaattatagacctgagccactgcacctggctgggatgtatatttttacaatggactattctacagtaataaaaaataacagactactgttgtgagtaaagtcatgggtgaatctcataaacaatgttgaatgaaagaaaagtacatatagtatgaatcccaaactaatctatggtgatagaagtgagaatagtgataatgtttatgggggcggaaggatgattaatgactgggaggcttttagggtgctagtaagttttatgtcctgaatggtggatttggtgtgtctactttgtaaaattttgttttactcttcaattttttgtgttaactaaaaaacaatctcataaattataaatctataaggcattaaagctggattattttagagatccagagagatgcagtgatttgctctgtgtttaggaattagggtcaaagagagactggagctcaggttttcttattagtcttatgtgcattttctttcttctacatgctatattgcattatattatcttttctgatgtctgtgatgggtcattttggaattacagctcccattattaggttggcttctgagtttgactttcagacttattaaaatgttatattgattattgactacctttgaagaactgtggatttttttctttttacatctgataacaataattgcaacaatcactgtraagtacaatttaaaggaccatgataaccaaacagttacctaactccgggcaagttttcatttactttcagtgttactctcactcttttttctttcttcttcttttaaaatataaactctagctcctgcaggaactttcactcagtgagctatgaaataaattatttctcagcattctctgctctaatacagttcataaacaatatatttagtctaatttatcaaggacaggaataaatatctctgttatcaggaaaaagcaacaagttgtttccactgtgtggaagaacttgttatttctctggctcttaccatcttcatgtgcttttctcttgaagctcaaagttccttggcttttgttgtgaccttcaaataattcttaaataaaaacacaggaaaagaatcattatgtgacatcatttgaaacacattaatggttttcaagcattcaggtatactaaaataagaaaacttaagcagatggacaaataaagaatgagttaagaattaggaatattttggtacaaggtttagaaaaaagttgaaactcttggcttaaattaggtacctatttttaatgatttttaagggtcatttgagcatacaatagtgtaaggatttcatttttaaagagtttttctcttgctaaatgaaaatgcaaagaggaatgtctagaattttttttgttaatgtcaattccaaagttaccatgtctccatttggcagttmtgagagttggttttcttaggatgcagtcaacttcttcataaaatctcatttttcttggagggttgccattttttctttgtaaaatgctatattcatattttacatttttatatttcrtatgacattgtttccggtctctgtctatcccaaactgcattaattaatcttctggcaatttcctcaaatattttcttgtttcttgtggccccttcaagcattcgcttaattttttcatcagaccatatcaatgctctgacctcactgtcacaccagtattttccggcctctgtgttactcactgttataatctgtaaatgacttttagcatcttctaaaggattacctacaaatcaacatgatttataattattcaaacatagataaatcttgtatttgattatcattcacttaaagcaactgtgatggcataaagtaccaagaatacaataataacttcaatatgagtcaaaagaaattttgtgtccatattcaaacagtatattctaaaaattataagacagactgttctcattattagtgagaaaatttagctgcttttcatcataggtgatcttcactggatatttgtgaatatggaaagtcccagtgtttactaaatttcttttagtgagaagtgggcatagacattttccttctttctctactgtattctctaccaactcaggtataaggaagcattttaggtaatacacaatagagatcttctctgttagacttcatatatcaaaatgacatttaaaatttaccaatttagaccctgcagtggacccagtattattttggggtgatgatgtgcagcagggggtgacagggggaaggcatactccacaatgctttctaacagtgagttcctctcatcttaaattctcctaggttttaattctgaataatttttcagccttatgaatttttttttttttttttttaagagacagggtctcactatgttgccgaggctggcgtggacctcctgagctcaagcgatcctcctgcctcagcctcccaagtagctggcactacaggtgcctaccaccatgcctagtgcctcatggaaatttgaaaatgtgtttaaatcactcttgttggatataatttttaaaagatggtgatagaaatgtaaaatggtgaagtcatggtggaaaacaggtagttcctcagaaactttcagcatatgccatatgaccaagcaattccactcctacatataaacccagaagaactgaaaacatgttcacataaaaacatatacatgctgtggaaaaacagtactgcaggtcctaaaaaaattaaacacaaattaccatatgatcaacaatttcgcttctgggtatatacccaaaagaattgaaagcagggactcaagcagatatttatacatccacattcatagcagagttattgataatagccgaaaggcagaaacaacccagataaccatcgatggatgaataaacaaaatggtgtatccatacaatggaatattaaaatgaaggaaattctgataaatgctacaacatggaggagccctaaagataytataagtgaaataagccaggcacaaatggacgaatattgtatgattccacttatatgaggtacctagaatagtcaaattcacaaagatggaaaggagaatagtggtcaccacaggctaaggcgagttgggatggaggagttattgtttaatggctacagaagtttcagtttggaatgatgaaaaagctctggagatggagagtggtgatgtttgcacaacaacgtgaacgtacttatgggtataatggtaaatattttatgtatattttaccaaaatgggaaaaaaattgtaccagaatgttcatagcaacagtattcataggagccagaaaatggcagtgacccaaatgtctgtcagttgataagtgggaaaacaaaatatggtatatctgtaaattggaatattattcagccataaaaaggaatgaaatactgatatatgctacaacgtggatgaaccgtgaaacaaaagaagccagacacaaaaatgtatattggagggtaccactcatgtccagaataggcaaattcttagaaacagaaagttggttagtggttgtcaggggttacagaggtgtggtcaagcagttaaactactgatggatatggggtttctttcttttttttttttgagacagagtcttgctcagtcgcccaggctggagtgcagtggtgtgaccacggctcactgcaacctccgcctcctgggttcaagtgattctcctgcctcagcctcccgagtagctgagaccacaggtgcgcggccaccacgcccagctaatttttgtatttttagtagagatggggtttcaccatgttggccaggatggtcttgatctcttgacctcgtgttctgcctgccttggcctcccacagtgttgggattacaggcrttagccaccgtgcctggcagatacgggatttctttgtggggtgatcaaaatgttctaaaatgggatactggtgattattrtataactgtggatatactaaaaaccacagttatacgctttagttgggtgaatttgattgtatgtaaatcacatctcagaaaagttgctgaggtttgagaatagaaaagtaaagacaagtcaagtgtagaggttaatgcagtgatgtctgtgggaagttataaaggaactaaggaaacatgaactgcattgtacggagcttccaaatcttcctctaagccagagtttttatgatgtgattgattaagtcattggctgcaagatggaactcaacctccagccccactctccttcatggaggtcacactggcacaaagctccaaccctcatcacatggtcggtctttttcggtgactaccccctatcctgaagctatctgggaacccacctagagtagcctcattaacacaacaaagatgcctctgtctctggaagttccaaaggttgttgatgctttgtgccaggaacaggagaccaaaactagatatattctttattatgccacagcttcttaaaagtttattaaaatattaccaacagtacaaattagaaaaatcatgacttcataataaacaagttgcctgtatttaagattagcagcatacctatgtctgagctttcttttttcacatttgtaagtcttcggttttctgaagttttagtaataagttcttctctatctggatgtactattggattaaaatgaaaagttctcagtattgtgtttcatatgactaaagtgcattaatttatgtaataattttactgctaagattatacaaattataatgcatgtaaaatatacaaaagtgtttaaatattccaggtttaaggaaaattacttccaatttctttcttttggaagagataaatgaattagaagaaaacataattcttagcgtaccctttgagatggtaacagtagattccttaatgccccctgctggccatctcattgtgaactttttgaattttggaaatatgttttgctacaaccaaaagaaaaatgggcatttctagggttattcttagatgaacattgaggtatttcacttgtgatttttaggctgaagatcagcgtgacctcctctaataggatatattttactaccatgaaacttctatgcttatttaagtatgcttgactccacccctctgacctaaaataggtttaactgtgactgtcctataccagaaagcagtggcttgcgggaatacatagataataaggcatwccagctcatataaatggcagctgatattggagcggaattaagtcaattttgtttctcctactcagaagagacaggtaggtgataagattgtcaaacacaaattttctcttttggcagagtcctttctcctttgataacttcttgattccttttatcctctctcgcttatgcttcagaccagggagaaaaataaaatatgttttagatccaaagatctagtttattcaattttcatgggccacttctttttacttaacataataggaatagcctgagcagtctatgattcttctccgtgattgatttccttcatattccattagtcattaatttttaagtgataatctatcggcattagcaaatttttcttccctgaatggaatcaaattgaaacttctgtgtgaatcagtcctctgctggtctgagcatgataacctagctacggtttccagtgctggctatgcttgagaaccgtctaaaaatacgggtgcctgaactgactccaacctgctagatcaaaaycttcagaagttccaaattgggaaccactctagatactcagaatccaaggggtctacagctgtagctggattttcatttgaagtaaagaaaagcttatggcttatagcatacatttaagataggaaagagaatacttttgggggactggttttttggccagatatcaaagttaacaatatggagctattattaataatagcaactccaatttcaaaaattcatcagtgaaatacaaaaaataaaaatgaagtgacctctgtttttacatgtaaatacccatcactttgttgttgttttaaagaaagactatttcatgtgaatttttttccctgaagataaataatycatatttttatacctcaatactacgttctattacattcttcctaagagcggagtggcaatttgtgaatcagtaggtatatattgcaggtgtacctaaaatccttgcctgtttaagtttttttcttacgtatttagctgctgagatccttgtgggtttatatctttgctttgaattttcatgtgacagtttaaaataatataatctctaggatgactatgcatttgtcctgtttcacattttctaaatatattccaaatatttcatatttggcatgcaaacatgccaaacaaaaaaaaaaacttgtacttttgacttaatctttttcttctacatgtaaaaaattatcttgaggttgtacttaagtaagttttccagaggactaacaagctaaaatcttctgaatactaaagctcttaactttttagatggaaatcttttttccttattaaacaatgcagtaatctgattttcttattttttaaaattttattttttatttttagagatgggttcttgctgtgttgcccaggctggattcaaactcctgggcttaagtcatgcttcaatcttagcatcccaagaagctgggattataggcatgtgccaactgcacctggcataatttgatttttaactcttaatgacaaaggccatagctgtgatgcctatggaaacctaagaatctgtcctgtctgataaaccagagaaataagtttgccaggagtataggaaatttgattaactagtttgttaaattaacattgagctttacactttgtgaagttatatgaagctttggactgacagactaggtacaaggtctttttaacagatatacttcagcttgggggcttggtgatctcctcctccccagttttggtttgtgtagaagaggcaaactatcaggtagcaagcacaaaatctcacctccaaacccttagtgccctataccagagggtaatgattctcaaacttgcttgcatcattataacctggaagacttgttaaaacagattgctaggccccaacaccagagtttctgattctggatggggcccaagaatttgcattttgagtaagttctcagttaatgctgatgctgctacacttggagaaaaacagcgatggggaacattgcttccattaattatttccacctttcatttatgtgttttgagttatgatccaacagtacttcatataatgttataacataatttcttaggtatggtagcgtctattaatatatagatataaaatctaaaacccattatgagggcaccactctcatgacctcatctaaagctagttatcattcaaaggccctgtctccaaatacatcacattgggggttaaggcttcaatatatgaatattggtgggaggaacacagttcaggccatagcagtgtcttataatagcattttatgtatatactttgtcacacacacacacacacacacacacacacgtacaaaaaaaaaaaaccagaatattattttatgtgtgtcaagaccttgttttttatctgtatctcctatgtcttctgacttattactgactgaatcatcttcagctacatctccagcaatgactgtatgaacataaggggatatatattggctttttaaatttacttcaggatcgtgttttatttatttagattatttatttgtttttgaggcagagtctcactctgttgctcaggctgtggttcagtggtacgattttggcttactgcaacctctgcctcccaggttccaaggattctcattcctcagcctcccgagtagctgggattacaggcatgtgccaccacacctagctaattttttgtgtattttttagtagagatggggtttcaccatgttggccaggctggtctcaaactcctgcctcaagtgatccacccaccttggcttcccaaagtgctgggattagaggcatgagccacaacgcctggcccagaattgtgttttaaactctaatgcagtattttcctttttaaagggaccctaatattaaatatgattagttagattccctacccttaagcatctttttgtcactatagatattgggtatgtatctgagtctctaactaagtcttctgacataactaatggaatcatctttagctgcatctccagcaatgactgtatgaagatatcatgccactgctgttgggctgctttatctgtagtcatctaactgggggagatgtatagttctctagcataccagtttctttcttgtccaccagcgaaatattttgagatttctcaccaacatttccagtcttaactgtctgtggttcccctctcttccctagacgcagactgtcttacaattgggactcatcatttaagccagataataaaatccggagacactgtggttagtagaggtctttaagaccatcttgtccacaccccccaattttggagttaggtctacagcagcggtctccaaccttttggcaccagggactggtttcacggaagacaatttttccatggaccagggggtgagggggccatggttttgggaggattcaagtgcattacatttattgtgcactttatttctgttattattacgttgtaatatataatgaaataattaaacaactcaccataatctagaatcagtgggagcccggagcttgttttcctgcaactacatggtcccatctgggagtgatgggagacaatgacagatcatcaggcattagattctcataaggagcacacaacctagatcccttgcctgcacagttcacaacagtcttcgtgctccagtgttctaatctaatgtgagaatctaatgttgccgttgatctgacaggagtcgcgsagctcaggtcataatgtgcatgatggggagtgtctgtaaatacagatgaagcttggctcgcccaccactcacctcctgctgtgcaacccagttcgtaacaggccacggaccagtaagggtccaggtgttggggacccctggtctagagaagacacttggttacttcaagcttccacagagccttacaactttgatttcctgaatcctggtctagaactcattcagtttatttcatgctatcatgtcttagtgtgtatgtactgtatctcaatcctttggtttaaatatactttaaagacatttatgatgggtctcagagaaatgtactacttctaagaaagtctcatgtattttatatttttctaagttcttcaatgccctttttctattttactcaattttaccacaattagtatgaaaatttactttaacttctgccatctggggttgcatatttgctttattaaaattgatctattttaaactttattctgggaatccagttttatttcctcctttttgtataactgtactgtttctattctggggaagatcaaatgtatactaaatctgtttcataataaattcagctagcttgtcaaatagcatgtaatgaaacctatttaacttacatatataatattcctcttatggtactgaacattctcaatacaggttgagcatccctaatatgaaatctgaaatgctacaaaatttgaaactttttgagcaccaacatgatgctacatgtggaaaattatacacttgacctcatgtgatgggtatagtcaaaactttgtttcatgcacaaaattattaagaatattgcataaaattagctttaagctatatrtatgaaacacatatgaatttcatgtttggacttggctcccctttctaagatacctcactatgtatatgcaaatactctaaaatctgaaaaagtatctaaatctgaaacacttctgatcccaggcattttggaaaagggatccttgaacctgtgtgatgtaacatgatgttaagattatttttcttcaccttcctacctgtctggtcctctcccatttttacgttggcacattctgtgacatgttctccatcttgggattcctggtctcgtgatttttctgttttattgggtcccagaatagcatccaactcagtaaaaaatttcatactcttagtcatgcctagatcttgagctgttcttacgatcttgtattcrtgttttaggtttttgtattttgttctgcactgtttccagtctctgtctattccaaatttctgaagcttggctgcaatttgttgaaatatcctcttatttctcactgttccctctagttgtcgttgtmtgcttttatcagaccagatgtctattagagccctgacttctggcacagtccagtgctttcctccttcatttgctacagttgggataaaagttgtattattagagggttccaatactgacgtagagatacctgcattaggtagagaggtaaaagatatatgcattatatacatcagacaaggtaaataattggatgcaacattattaaagaaagcagtttcctccataggagatggagtaacaaatcatagcttagcttttctcttaaacagtgrggaaacaaaatacagaacctaaatctgtccattattatgccggttactggctttaataaagttgtgtttttttagtcatattttgatcatctttcctgtataccttttttttctcttccataccactcctttagtatgtagggtgtatgtcagtgtatagtggaagttcaatatataaatgtgtagcatttactatagaaaacagtaattacttaagaaaatggctcattgtagataatttgttttgaaataggataggtacaaacaatttaactcctttcttttttctttatcttacgatttcctttggctatatatcagtctactgggaagcatttaaaaaccaccactctggtacctgcctcatccctcatccccagactgtgaatctaatgtgtagtcagggttgagaactgaggctactcatgagctgagggcttggaagagtcacacagaacaatcagtgcttacrccttgcgaaaattacagaaagactaaagccattttaaatgaagtattttcttttaatggtagggaaatgtgtcagaaatttcataatgccttgttcctaggcagtatgtctccacttagttataaatcctttaatatgccatggtgtgtattaggtctctagaacagttttatacttcatttacattactgacagtacttgactttatattggttattttgacaaccaatcttgtgtttttctcagatttcattttcataaaagaagtaggttcattttctgaattataaacttacaagcacattaactttggtctttgtgttttttttgagacagggtttcaaattggatgtaatattattaaagaaaggaatttttggctgggcatggtggctcaggcctgtaatcccagtactttggggtgccaaggcaggtggattgcctgagctcaggagttggagaccagcctcccaacagggcaaaacctgtrtctacaaaaaaatgcaaaaattagccaggcttggtggcatgtgcctgtggtctcaggtatttgggaggctgaggtgggaggattgcttgagtcggggaggtggaggttgcaatgggctgagaatacaccactgcactccagcttgggcaaaagagtgagaccctgtctcaaaataagataaaataaaataaaataagttttttaaaaaagaaagtaattttctttcaccaagctagagtgtagtggagagaccactgctcattgcagcctgaacctcccaggttcaagtgaacctccagagtagctgggaccacaggcacacgctaccatgcatgacattaacattttgtttgcattaaaaataatcttcagccaggtgcggtggctcacgcctgtaatcccagcactttgggtggccaaggtaggaggatcacgaggtcaggagatcaagaccatcctggccaacatggtgaaaccctgtatttactgaaaatacaaaaattagttgggtgtgtggtgcacacctgtaatcccagctactcaggaggctgaggcaggagaatcgcttgaacctgggaggcaggattgcagtgagccgagattgcaccactgcactctagcctggcaacagagcaatactctgtctcaaaaaaaaaaaaaaaacaaaaaaccaaatcttcaaattataccgaagattaatcataatttattttgtttctttttcttttcgtagactctgttgcacaggctggagtgtgtagcacagtcatggctcactgcagccttgaacccctgggctcaagtgagccttcctgcctcagcctcacaagtagctgggactacaggcatgagccactgactgcacctggactatttttaataatttttttaggcatggggtctcactgtgttgcccaggctagtctcgaactcctggtctcaagtgatcccgcaccttggcctcccaaaatactggggttacaggtgtgagtcactgtgcctggccataatttaaaattaaatattacaattaatggttcagtaataattgagtttaggttttggcccctatcatacaaatgatattacaattaataacttttgtcaggttcatgagttttaagtcattaaaaaaactttatagcatttgtttgagatattttatggtgtatttaatgtctttgctttgaaatgcttttcagaattttttttcttatttaggttacaaatatttaatgtctttgctttgtaatgctttttcagaattttttttcttatttgggttacaaataagtttttctattatgtaagttagaagtaaggtttttgcttctagcttcaataagaaattagaagyggccgggtgcagtggctcacgcctgtaatcccagcaatttgggaggccgaggcgggtggatcaccagaggtcgagagttytagatcagcctggctaacatggtgaaaccctgtctctactaaatatacaaaattagctgggcgtgatggtgcgctcctgtaatcccagctagtcaggaggctgaggcaggagaattgcttgaaccccggaggcagaggttacagtgagctgggatcatgacactgcactccagcctgggcaacagagtgagactagaaaagaaaagaaaaatagaagcaaagaaggatttacactgaatttaattcattgggtgattcaaattatccttgacctggttgtggctctgatgtttactttcagatgtaaaattctgtttgtcttaattccttgcctcaacactaaagtgatcatgttcattactatgagtaagtttagccatcagatttcttataatatttaaagagtaaagttcggaaattagagaaccaatatttytaggaaacttaaatttcgtaaggaaatcatttgctttagaaataatttttttcagtgtgggttggcaaaaagggaaacataaatcaattctgagtgtttcttccaggaaaaattgtcaattttctcagattaggaaccagtctttccgtttgaaattagatcagtttcattctgtcccatccattatactatacctagttccattggtctgacatgagaaaccagaagtaaaggatttcctgagacatcttccttatctactgatgcaattgacattttacctgtaaatataacagaattccttttagaaacaacatgactgataattctaatagctttagctaaatgtggtcatattcttgaaaacagatttgtgatagacattttgtaataaagttgtataatatagtttaaatatttgtatatttaaagagaaatctaattttttccatcccattgacatggtccattttgaagttctgctagaattgtttgataattgtttaagtttttagaaatggttgtagttagttttcaagttaaattactttttttttttttgagacagagtcttactctgtcgcccaggctggagtgcagtggygtgatctcggctcactgcaacctccgcctcccgggttcaagcaattctcctgcctcagccttatgagtagctgggattacaggcatctgccaccacgcccggctaatttttggatttttagtagacacgaggtttcaccatgttggccaggctggtctcgagctcctaacctcaggtgatcctcggcctcccaaagtgctgggattacaggtgtgagccactgtgcccagccttacaatttttaaatgtggtgttttatttataattgtatcttgggtgctctaacagagtaggcatttgctaaataataccagtaatgtaaaagagtaggtcctgcaatgagatagataattagaaaatgctgtttttttggcatgtatgatcaaatagcttagagtttttaagtatcttatataatttattgattgatacatattaaagtttccagaagttaaattatgtttaaatggactaaggaatatgtcatttaaaagaaacatgccaaccataaaaattgaattcctcctttgatttccttgttttatggtttggatgcttttatataggctttcataaaatgaggcataggctactttttaaagtgatcaaatgaggaggatgaagtacatcttagaaaggaatgcagtttacatgatttttaactcaattgacacatgaagatgaattataattacatgaaattgcagactaattgggaggcggataagtatcttttgattgctctttgtaatgtctcaattaaaaatttactcatctcattaatcatttcattgccaaatgtttttccacttctattttattgagtaacaaaagtagcattgtattttacattaatatatcaacttttaggtgtgattttaatggcataaatattcattttaaatcatgattcaccattatgtttacaggcattcccattgaagaaaaagaaaagatatgctctttatcatcttaaaaactctattagggtttctatgttaaaataggaaaacaaatgaaaaataaacataagtacaaaagcacatcactgctttcagatggcacagttgtatttttataaactctcaaggtaaaaattgtcaaaaattttaaatcaggttttataattgctttaggctaaaatgttgtcgaggaatgttttagatttggttgaaaacagggaaaataaaaatctggagttatgtaagaattacctttagagaaacagggcccaggttatttaacacctgagcttgagtatgagagcagtaaataaaggcagggtttctattctattacctggtttagagtccagatttacgtccatagaaaagagtctggaccaaacatacagatggtagtgaaacagaaaagctctctctccaacctcttcagataattttttcttaagttgctcattccacagcatgaatcctaaaactgtaggcagaggctctggagattttaaagtgaaagtcttaaatcattacttgcgatacatttgtataaaataagaggagtgaaatagaggggaaattgaccactgaaggaatgtggtttggcagccataggccaaaggaattctgaggctgaggatgatgagatttagcagaagatgaagcctcttagagttggtcaaaagtgtatttgggtcttttgccatggctctggtcctggctacttgctgcctaacaagtggcctatccttaccacttgcatgaggttgatcccaacagtggaaaaggcactttcgttttcttcccttcttccgtgtatcacacaccaataaaaattctgctggttccgccataggaaaaaccagaaaacattacataatgaatcaaacctggtgcaaggagggcttcctaagccctagggagaaaactttgattaccttaaaaatttttggattctgcagatcaaataaatcataaggcaagaaaatcatgcaaatttctaagaccccaattgacatgaatggtcagtttgtaaaattgtatagaaaagtgttctaccttactggtaattaaacaaatgcaaattaaaagttaccaatttgtatatcattataggccattgtttcttaaattagcctaagtcgttaattatttatttaatttatttattttgagatagagttttactcttgtcgcccaggctggagtgcagtggtgtgatcttggctcactgcaacttttgcttcctgggttcaagcgattctcctgtctcagcctcccaagtagctgggattacaggtgcccaccaccaagcccagcaaattttttgtatttttagtagagacggggtttcaccatgttggtcaggctggtcttgaactcctgacctcaggtgatccacctgcctcaacctcccaaagtgctgggattacaggcatgagccaccatgcctggcctaaatcattatttacttatcaaatttggaaagtcccttcttcccatcaatactccataattttgcatgacagtgattctacagaagggacgctatcatggctagtgaagtacagttattttggaaagcagttgttttagaaataatgtttcaaagtaatggccagacatggtgcctcaggcctgtaatgccagcactttgggaggccaaggtgggcagatcacttgaggacaggacttcgagaccagcctggtcaacatgatgaaaccctgtctctcctaaaaatacaaaaactagctgggcatggtggcgttgcgcctctaatcccagctcaggaggctgaggcaggagaatcgcttgaacctgggaagcagaggttgtgagctgagattgcaccactgcactccagcctgggtgacagagtgagactctgtcttaaaacaaaacaaaacaaaaccaaaaaccaaaaacaagacaaaaacaacaacaacaaaaaaccaaagtaattatatcctcctgaatcagtactttgtgtcttaaagtaataatactaaaaatggacaaaaggtattaattgcagtatcatttgcatgggggtggaagacccacactcagttaaatattatggaaccattaattgtaatatttaattttagaccatgattaatcttgggtataatttaaagattatttttaatgcaaccaaaatgttaatgtgcttataattttataatttaaaaatgtaaagaacaactagtggtattgtggaaagtatatgggaagagggtgaaaactagggagcccggtaaagaggttacattaatattccatatgagacatgatgaagttctggttagtcataatgagaatagagcagagagaaaattttatgcagtatgtcagcagattttttaaagacttagtgactgaccaaaaatcaaggatatctcaaatgtttctgtataagtgattggaaatatagtgatgctaaggtggaagcaatttgtaggaggatcaaattcaggctagatgtggtggatcgtgcctcacttcgggaagccgaagcaggagaatctcttgaacccaggagttcaagaccagccagggcaacatggtgggaaacccatcccacaaaaaattagccgggcatggtggctcacaccccatagtcccagctattcaggaggctgagttgggaggatcatttgagtcctggaagttgaggcagcaatgagccaagatcacaccactgcacttcagcttgggtgacaggagtgaaaccctctctctaaaaaaaaaaaaaaaggtgatgggagaatagagagtttgattttggaattgggagtttgaggtaactaaacgtgcatagttatgttgtaaggatagtccctctgtttatgagtgaaaacgaaggagtttggagccaagggagtacctgaaagcgctgaagatccctttaagaagtagagatattggcacccacatcttcatcagaccaactcctggttaaaatcggggactttcagaagctaagtgatttacttatttattaatcaatatttaaagcacttaaataatgaagagtcgaaggtgtttaattgaataaaataatgcgattgctgtttaatatggtaataactgcaaagctttctcagaatttggtgtcatctcagaaatggaaagaatgtaggcagggtggattcttcttttaatgaaatgatttgttactgagctgtaaacatgaaaaatagctaacttaagttaaccagttgtaatctttgtcctcttaaccccattcacatttggtacttttattatactatttactgttttctctcaggtgttaaatttatttgcagttctgtcctttttgaggtttcgcattactaaacgcatataacttagtgctttgcccatggtacacacagatagtgggtattacagatttttgaataattctgctcttgaaatagcatctataagatttagactatggtagacatctcattactgtcattgatttccctccctttgcctactaatgcttccacagacaatgagtagattctatgtaaatagtgttgggtttaacaacacagcacgtcaagaaacccctgtaaatcacttagtctcagatcatttcatgtactaaatcttcattatacttcattgttaaaatggagctgttcttcttcattgttaaaatggagctgttcttgtaaacaagtaatgaaatagtgtagaacagttattttaaatgtgcttttatttataaatttaggaaaacgcaaattaaataaaggagaaagttcttgtttggagctgtggaaaaacatcagttgagcaatgtttttgatatttttccccttatttaccactcttataaaattaaaacttaaactatttttagaactcaatccatatttcaaaaacatatcacatgcagttggcactagcagtcagtgccattgtaatgtgctttttctgtattttacagatttttttaaagtggtaatatttaacctctttttaaaaaaattcttaaccttgtgcaaaatagcataataaattggttatttttccacagtcttgatatttcagtctatatttatcatatggccacagaagtcctgaacttttacagttcataaaactgtaaaacaaaagaaaaacaagagtacttttctttttttttttttttttttttttttttaccttcagkggtctctggggctgtacttgggctgagcgtttccaggtacctgccatttgcatcttcctctgtaaattgtgtggcaggttcatactgcaggattacatccaaatcatggaaraacttcatagttttagagctgtctccagagttatgggcatatttaactgttctatattcatatttgagatttttgtacttagcccagcactgtttccagtctctgtatactcctaatgattgcagccttttagcaatgtaaataaatattcctttatttcttagtgttccataaagttgttttcgtatatttttttctgcccagasacttagcaaagctttaacctcctcctcagtccagtgctttcctgctccactctccatgttgaaagtgacctggaaatgattcactatttccagccaaggttttgtttcctaggaaaccasatggctggttgtcaataagctccgaagagctgaaaggatgtagtttaactggttcaagctgcctgagggagtaacttgagaaactgccaaataagcaggctttgtgattaaagaagcctggatctaaatgattcttaactatatcatttcagcctgaaggaaaaacttcccttgagacaaaagggaaagaaaaccgttttttgtgtatttcttttcttacataatttactgttttaccaaatgattgttgatttttaaaaattgttttgaaaatggttggcagaggctttttccaagaggtctatagccaatgttaataatatatttcctctgacatgaatcacctagtcctctaacattggttaacttacagaccccacagcatttcactaaataaaagaaatcataagtcaatttatttagtcccatatggtatatagtattatgcatatctattttcagtatttaatgcatttaataaaatcatttcttgaggctgctgtgagctgtgatcatgccaagtttttttagagttttacttggcaacatatttaatgttgtcatttttctcgttaataaaacactgcaacaattgcaatatataattttgaaaaaggttcctttttaccaaataaatcaatgtattaacagctactaaagtctacaggcacatatggaagaggtttactttttgtttctatcctgatatrtattctttggaacaaaaattggtcaataaacatctactatttatagcacttgttcagaactattaaaaatggcaaagcagttggaacctttatgagagtttatactgcacagtggtatggatgctcttagtctttactatgtcttgccctaccttcagtctagattttggcttttttctctgtatcaccacttaatcaacactaatgcaggaaatgagacacagacatgggaaagggtgcctggtcagcagagggttttcagaaacaaaatttttttttctaatagcaaaagtgctatttattggagaacatttggaaaatgcagaaaggcataaaaaatggttaccaactatgcattttgcctctattatatttggagattttaatttacatctacatactcatcctgttgaaaccctatttaggggttataaagagtagaggttagaagcataaattctgcagttggattgtctgcattggaatcctggctaccacctgctgtctgtgtgacaatgggaaagtaacttcctttctattgctttagtgtgtttatctgtaaaatgggcatggtaatcatagtacctacttcataggattgttgtgaaaaccaaattatatcacgcatgctatcgacctaaataattaaaaggatcagaatctaatttagagagagtttattcaagcaccaagtttgaggatgtctcacccagaaacaccaactccaaggaatggagtcagcattgcaaagtaggaaagttaaggtttcatttctataggcagacagaggagtttttagcagaatcacaacattttttatacaaggttagcgcgcccagttacagcagtttgattgttataggtggtggttcttctggggaagggtacatttaacatttttttacagaggatgttaatgggttttctttcatttggtctagcaaagcaggacaacaaaacaaaagctaactttttttttttttttttgaaacggagtctcgctctgtcgcccaggccggagtgcagtggcgcgatctcagctcactgcaagctccgcctcctgggttcacgccgttctcctgcctcagcctccggagtagctgggacgacaggcgcccgccaccacgcccggctcattttttgtatttttagtagagacggggtttcaccgtgttagccaggatggtctcgatctcctgasctcgtggtccacccgcctccacctagaagttaatctttaacaaagctcatcacttgagaaggcaggaggttattgtttctgatgtcttctttttttttttttttgagacggagtctccgctctgtcgcccaggctggagtgcagtggtgcgatcttggttcactgcaactccgcctcccgggttcaagcaattctcctgcctcagcctcctgagtagctgggactacaagcgtgtgctactatggccagctaatttttgtatttttagtagagacagggtttcaccatgttggccaggatggtctccagccttgaccttgtaatccgcccacgtcagcctcccaaagtgctgggattacaggcgtgagccaccgtacccggctgtctctgatgtcttttaattctctctagtcattgtatagaacaagaaaaataagaaagtgagttaatctataatctgagaaacagaagttgtaaccatatgtgacttggatcacagtcatatctctctcaaggcctaaagtatatttggggttccaatagcttttaaattatttatttttacaacgtaaaatgctaggacagactgcctggcatgttagttaatattagatgagatatctaattgttacattgtcatctgctgtgattgctaatcatcagcatcagcatcatcaatagaagtagtgctagtacaagtagcatttaatgtgttgtcacactaagttcatggatgcttgttgagaaagtatgcttgataaagttcttcaagaagctaatcaattggsagatttaacagctaatatctttttatattcacaggggtcaggagagtgctggtattgtgactagtgatgggagttcsgtgccaacattcaaatcacacaaggtaaatttgaactttaagaaatgttgatgacagaccaagtgcggtggttcatgcctgtaatcccaggactttggcaggccaaggcaggaggatcacctgaggtcgggagttcaagaccagcctgaccaacatggagaaamcctgtctctactaaaaatacaaaattagccaggcgtggtggcgcatgcctgtaatcccagctacytgggaggctgaggtaagagaatcgtttgaacctgggaggcggaggttgtggtgagcygatattgcgccattgtactccagcctgggcaacaagagtgaaactccatctcaaaaaaaaaaaagaaagaaaaaagaaatgggatgacaaagataacaaagacagatgatcattaatatggggagggggatttgaataaataatttgcaatcaaaagtaatattctttggatcagccactttcaactttatatcctaacatttgtcaaattaggatgtatttcttccccagttatacttttttgyctaagaccaactcaaatagggggtcatttatttaaatgctttaagatgctttgatttttttaatgcaaattttagtttttatacttgacaaattttattgcttactacatctgttcttaaatgttttagtgaatagtatcttatgaaacacaagtgcttcaacattgtgaaggtattaaatgccactaaattgttctttttagaatggttaattttatggtatgtgacttttgcctcagtaaatttttttaagtaagtgcttcacagttcttacaattaggttatttgtttttgacttttttttagattagaattctgaaacacagagatattaaatgtacttctttgtcttatttggattggctgggcagagaagagaggcgtttattactagcagtactagtctgtttttttctaagttgcactttttgatttctcaagggaatgggtcttgtaaatcacgtctttactgaagacaatttgaaaaaattatatgtttcaaatcttggaattggacacaccaggtatgccaccacaggaaaatgtgaactagaaaattgtcagcccttcgttgttgaaacacttcatgggaagatagctgtggcacataatggcgaattggtaaatgctgctcgattaaggaaaaaggtacgtttgtttgtttgttttccctaggcctttttaaatgrttaggatgggttaatgaataaaagttaaggatctttgtaaagggcattttctaattgttgctacctgttacctaactgcaacaaacaattgcatcagaatgatctggagtacttgttacaattccagattgtaagctatcccctagagttcgagacaagggtgagaatatgcattttagactcactttttgaatgcactgctttagagatttgggagagttgatttatggatggaagcatagagaaattagagtttatggacttgctatctctttaactctgttgctatgttcaaagcttgtatgagataagaaaaatcaagccatttttcctattctcagactcagcacacttctgtcaccaaataggggggtttcttataccagcagttttccagaggacaccaaatgggtatcctataattcaattgtattctgatagtacctggaggtaaagtcaggttccagaagttaagggctcagtcccagaagttaagggctcagtcccacaagattgtcccgcacttcagatgccagttgcaagtccaggcctttggtacatctgacaaccagttataaattgggagttcctgcaacagccctagcactacctttggtttcaaacatcacaaaactcaagaaagtgctttgtatacatttaccagtttattataaaggatattacaaaggctacagaagaacagtctggtgaaaagatggaaaaggcagggtatgtgggaacgagtgtggagcttccatgccctttccaggggcaccaccctccaggcatctccaagtgttcagctatccagaagctctctgaacctagtcattgtggatttttatggaggcttcatgaagtaggcacgaatgattaaatcatcagccactggtgatcagctcaacctttagcctttgtccccttccctgggggtccagggatgaagctggaagctccaaccctctggttgattcccctggcaactagccctcatactgatgctgtgcaggagcccctagctaccagtcatctcaacagcatacaaaaggacacctatcattttggcaattctaagggttttaggagctgtgtaccaggaaagaccaggataaaaataacatatataaatcttcttacatatcacaaaagcataaaaataaaatggagtataaacttgaagatgacatgaaaaaatgaattggaaacaatgacaggaaactagaatatgggaaaagggacggagactgtttacttaaactcttggttcacagcatgttgtttggagctttctgtgctaatgatgtcaaatttgtgcctatgctttcattcatcatttcatctttctttttttttttttttaactgcctgtctttatattcattcctagtagcttccttttatccattcaggcattcattaattaatgttgagtttcttcagtttattagctcccaataaccttgacttggtaacttcagaacctggtgatatttagtaatagatggttacaygcacaccccatcctataagcattctagagctgggcaattcacatatgatgaacagttacagaagcttaataataatgaactgctgggtcaaaaatatctagaacccaggcttttgtaccactcactgtcattccattttttagttctgtctttagacatttcctagagctttgtccagccctgttcataggcattataatgaccttattgtgcttttctgtccccaaatgaaaaaatacatagttcatttaaaaattcagacaatcatgaaagyataaatatggagtaaaaatttcttaaaaattcaccacttagagataaccactaactcactgtttcctgacataatgacttacctagatgctaaactttatctttacctttagctccctactgaaaatgttctgtagtgcccattcagactcaatctgtgcatgtccatggggctgcccttgtcttggtcagtcctgctcagaactttgtaattatcatagagtacactcaagcgatatttattacatctgctacatttcattgttcaatacagttgattactttcttctatcagtaataatcaatgaggatgggtagccaccattatgatcactaacaaacccagcttgaaagttatcactgtagtgtactacttttataggaatatacccagttcatcaagagtgttgagggtagaaratgtcagacccacaaatcaaatttttgggaacccctacccactttcaggtctgcttgccttcagatttagtattcaaaagcttttctgtacatctcataaagcacatttttcctgcttgaaaatcttctagatttcctattgcctccagccatggtcatccgttattagtatatacatactattagcgcaggagtccccaacccctgtgctagggactagtaccagtctgtggcttgttaggaaccaggccacacagcaggaggtgagtggtaagtgaaacttcatctgtatttataggtgctccccatcgctcactattaccacctgagctctgtctcctgtccagatcagcagcagcattagattctcctaggagcatgaaccctgttgtgagctgtgcatgcaagggatccaggttgtgctctccttatgagaagctaatgtataatgcctgatgatctgttactgtctcccatcacccccagatgggactgtctagttgcaggaaaacaagctcagggctcccactgattctagattatggtgagttgtataattatttcattatatattacagtatagtaataatagaaataaagtgcacaataaatgtaattcgcttgaatcatccccaaatcatcccctgtccctggtccatggaaaaattgtcttccaccaaactggtccctggtgccaaaaaggttggggactgctgcattagtgggatgcaggatttttgtaactggacatccacagaatgccttatttcttttcattatggttggctactgggtttggggtggggtggagcttcccctctgatgatttaaacttctctttwtttctatatagcttctgcgtcatggtattggtctgtctacaagttctgatagtgaaatgattacccagttactggcgtatacccctcctcaggaacaagatgacaccccagactgggtagccaggtaagcagagaactggactaaacttagagctctagtaaggagagttttgccttgcatatgtttataactgaagttattcattcaattattaattaattccaggattaaaaacttgatgaaggaagcacccacagcatactccctgcttataatgcacagagatgttatttatgcagtacgagatccttatggaaatcgtcccttatgcattggtcgtcttattccagtgtctgatataaatgacaaaggtaataaactttagaaggaatatcatttcatagtgtttttccattattgtcctactgctatcaagccctgaaatctttaggtatagaaagttgatgggtgggagggagctaggtaagaaaaataaaaataaatgtattcttcctttttaaagtacgtttctttgagtactcctgaggatgagtccccccccttttttttttttttttttttttttttttggagaccgagtttcactcttgttgcccaggctgctggagtgcagtggtgcgatctcagctcactgcaacctccacctcccaggttcaagtgattctcctacctcagcctcccgagtagctgggattacaggcgcacaccaccatacccagctaattttgtatttttagtagagacagggtttctccatgttggtcaggctggtctcaaactcctgacctcaggtgatctgcccaccttrgcctcccaaagtgctgggattacaggcgtgagccaccacgcctggctggatgaatcccttttaatgtttttaatagagattcctattttttcctgtcttaattggctattcatgtcctttgcctagctttttcatttctgcagtatgattttagtggtttcttttcacttttatcaagatatctttttctagccatgaaatcataatgttagaaggaatcttagaagatcatttattttatctttggctcaagtcaaatgaggatccatgtgctcttaaagtcatagaaatggctattctatgagttttatttacttatttatttagtgttagctgttccattgaaatagcctcttaaaatttctggaatccattaattgaattgatttgtgatttacagagaaaaaaacatcagaaacdgaaggatgggtggtgtcttcagaatcttgtagcttcttatctattggtgcaaggtaagttttaccttgtttgacatattttattttcccatgttgaaaagaattttttttagacagtttcttatttatgtgaaagtttgaaagttttctttttgatgtctgcaagaaaatatttataaatggtttttcttatgcatgttatgctcagcagttgcactgagtttaatgttctagtaatagcttctaattctgaagctggcattctttcaagatactatgaaacttattttctttattttgtatatttttctctttttacagtacaatatgaaaatagagacttattttagaaaggaagaacttcctcaatgagagatagttatgacagaaaaatgtaagccaggagaaaatgttttctttatactttattcttttaaaattcaatacaacttagggcccttaattttttaattctatactagaacttagtgtttacagagagattataaagaaatcattgcaggagacataccactttaaaaagtcacttctagattttatattgaatgaatcaattgtttctctaagggaaggtactctgtgtgctttataattaatattttcatcagccttaaggactagtttattaaaagtcttctttctttaacattgtttcccaagatattaccgtgaagtcttgcctggagaaattgtggaaatatccagacacaatgtccaaactcttgatattatatcaaggtctgaaggaaacccagtggctttttgtatctttgaatatgtttattttgcaagaccagacagtatgttcgaaggtaagtagatttcttttctttgaacattcatataaatgttttagctatctccttgaaacatggcaattcttgcctcaaaggcttacctgrctctttgaaggcatatagttatatgttgtggatataggactgagcccacaagtcataagatcactatttttcacttccttttgactcttggattttgttttttgttaggagtaaggattatgattttctagatctatatgaaggtcgattttttttttwaaaccacacagttgagttccccagtttgtgtattttcacattcatatttttgtatatattgcatttctttttatactcaatctgtagaattctagcactagttttttagaataacactgttawatcatgctaagtaaaaatactctctctccttttccaaacacaccagaccaaatggtttatacagtaagataccgttgtggccagcagctagcgattgaagcacctgtggatgcagatttggttagcactgttccagaatctgctacgcctgctgctcttgcttacgcaggaaaggtattttctcttaattaacatgcagtgaattgctctcccagctgtggaataagaaacccttgcctataaagagaaactcatcaacatttctaaggagaaaggaagctttggtggttaatgttggtttgtttacaagcgttttttattttccaggctttttatccaatggcactattttagtgaaaaccactaaaaggttcactgaaaagaaaaaaacgttcactaaagcgttcagaaattggcacccttctttttaaaaagataacatcatgaatatacagttgacccttgaacaatttgggagttaaaggtgccaaccctctgcacagtcaaatctgtgtatgcattttaatgcccccaaacttaaatactgataacctactgttgactggaagcctgaccaataacataaacagttgattaacatattttgtatatgtattatatgctgtattcttgcaataacgtaagctagagaaaagtaaatgctttgaagaaaatcataaggaggagaaaatatatttactattccttatgtgaaagtggatcttcataaaggtcttcatcctcattgttgtcttcacgttgagtaggctgaggagggaagaggaaaaggggctggacttgctgtcccaggggtggcagagatggaagaaaacccacctataagtagactcatgtacttcaaacccatggtgttcatcaactatatattcagtggaaaaatttacttaatattaaaataaacgtcttgaattatcttcacaagtcactggaatatttgcttgctactaagtatgggtaataataaagctgtttatgttcatttagcatgatgttgtcagtgttacgctttattttcataaccaggtagatggtgtaactgtagtaatcctggggtatmacatccaatattcactaccttggatactttattaacttctaaaagaattaatatgcatacattttagaaaagattaccttgataaatgggttaattacttcctatccctaaaaagtatctcattggtctactggtttttatttatttattttaattcatttctttaaaaattatcattttgataatgaatttttctgacagtgatttaatctttgtcatgtcttcatatgcttactgttatctttcaaaacagaggaataatgtttaagacaaaaacattatgagtcctcacaaaatgaattggtttttccaccaagtatattttgtttagtggtttttctttttgccttttttccaaataataaaggaaaattattttgaaattttacttgaatattgtggcggcaacacaacctagagaaaatatttgcctattctgtatattactcctcattatcctttcatttcttctctatcagtgtggacttccrtatgtggaggtgctgtgtaaaaaccggtatgtagggagaaccttcattcagccaaacatgaggttaagacaacttggtgttgcaaaaaaatttggagtattgtcagacaactttaaaggcaaaagaattgttcttgtagatgattcaattgtcagaggcaataccatctcacctataataaaactgctcaaagaatctggtgcaaaagaggtaagtaatattaaaacatatcctaaagcataagttaacaataagatactggcataaaattgcaattcagggtagtgaatcaaaatggatgttcaatataataaattaactttttttatcagtttggtttaggaataactgtgtagcaacttgaagaacatgtcacagccacacttacattaaatgtaatccttaatagattaaaaaagctcaatataaaagcttaaggctgggcgaggtagctcatgcctgtaatcccagtactttgggagcctgaggtaggaggttgcttgagcccaggagttcgagaacagcctgggcaatatagtgagaccctgtctctacaaaaataaaagataataataaaattaaattttaaaaaacctaaaatttttacaaaatttattcaaagactaactacacaaaataggctgggcacagtgactcatgcctataattccagcactttgggaggctgaggtgggcagattgcttgcatccaggagttcaagaccagcctggacgacatagtgaaactcacctctcctaaaattacaaaaaatgggtggggcgtggtggcacacacctgtaattccagctacttaggaggctgaggtgggaggatggcttgagcccaggaggtagagattgcagtgagccgaagtgatctcaaaaaaaaaaaagtcaaaaacacacaatagaatgctttttaaaatcaatggagtattgattgctttctctacttgaagacatgcagccaatcccagtgtaatacctttgacttattattttttaaaatgtatttgttaaagacagtgtctggctctgttgcccaggctggagtgctatggcaccatctcaactcactgcaacctctgcttctggggctcaagcaatcctcccacctcagccttctgaatagctgcaactataggcatgtgccattgcagccaggctaatttttgtatttttagcagagacggggtttcaccatgttgcccaggttggtcttgagctcctggactcaggtgatccacctgcctcggcctctcaaagtgttaggattacagacgtgagccatcgtgcccggccaagttatattttaatatcactttatgcctttttttcttttttccttgatactgggactcactgtgtcacctggttggaatgcagtggttcgatytcagcttactgcaacctccacctcctgggctcaagagatcctcccacttcagcctcccaaatagctgggaccataggcacacaccaccatgcccggctgatttttcgtatttttagtagaggcagggtttcaccatgttgcccatgctgatctcaaactcctgagctcaggccatctgcctgcctcagcctcccaaagtgcttgattacaggtgtgagccaccatacccggcctcactttatgtcttgaaaaaaawttttttttaatttttattttttaaattgacaaatgtatatatttattgtgtacatgtttttatatagatatattaagttattttaagatttcaaagcttattctatttcagtagctcatactacagaagtgagatgccatttacaactaatagttatgtaaatttaaaaataaagtctcagcctgggcaacatataccccatctctgaaaaatcaaaaataaaatctcactgtagaagaaagtgggatgaaaagcagcatgccagtttatttagaaagtttccaagataattgggattatgattttccagccttttttatacctgtgtttaggattatgatcatcttactctggaattctgtggaaattatgtaatagatacaagagtttaacataatttcatcatttattgcaatagtgaaaaagaataaagtcaaagaacctggaaatggcatatctccctgttggtgaatataatttagtaaattgatatatcagtgtgatgaaatatgatgcagccattaaatactaagaagactgcgtagcaaaaatgggaaaatctattctaataaagtttaaaaaggaaatgtggacactgagtatagccatgtaaacgtacctgatgaaaggcaaaaaaaacaataacagacaaaaacaactctgttgtagtagtaaggtttttgttataacctggtaaattgtatttttctttttaaaatggtaagataagggataagcagaagtacctggtattacaagagaaaagtggctctaggaatgtaaagacatcaaatgagaagtaggatatctagacaaagaaacttcctcatgattaggtgaaagaaaaaaaaaaccaagaagcagctttgtagaaagaataatttattacccatatgttgttactgaatattctgcaaaacaattttgtattgtatttgcacaatgaaagaattttgcatagtcttaaaaaccttgtgtgcaatgatttctttccaaggtacacattcgagtagcttcaccaccaattaaatatccatgcttcatgggaataaacattcctacaaaagaagagctcattgccaataaaccagaatttgatcaccttgcagaatatctaggtaagtattaaaatttctataaactttgattattaacagagaaaatccaaagcttgacartctttacacctttagtaaaaaggagtattcagtgtttgttaaaagtagttatatatgttaaacagatattgaatactattctcaacagtgagagtagtgggcatgggcagacaccacagagtcttgtgttggagagctaagccaaggtgagatcagagaaggaagaggtggtttccaggtggagggaagtgcaatcataatcacttaaagcctcccaaaagtcagatcccaagaaaaacaaaaataatttaatcagattctaacagagtaatttggatgtggatacaaatcacaaggtaaaaagtttgtgtaggttcatattcaataatgagataaggagacttcgagatctaagttatcctgggtaagacatcttcctttcaaaatcaggtgatgtataaactgtggaaataacacatgatatttagtcattgtgccttggtacctccacaccatctgtttgtggctggtgtttcttttaacctgtcatgcatatgcctcactggttaaatatttttaaatatcaccctgatgggtgtcatacatgttataagcactcacactttgccagaaactatgctgcctatattatctatattatcataaaaactctacatttaggcaatgtttccaccatcttatatagatgaaaaaatagacttaggaaaactgagtgaacttgagcttaactttgagcctagatcttcctgactttaaattccattttttcaattaagaaaattactcccaaagccctctaattccattctagacttgaagcctcctctgctgttttaaattatgttatcccctagattccaattaaaatttttaaaaataaaggaactgagttttattgattttttttccttttttttttttttaaagaaaggctaaaggagaaatttatcctagcttaaattattctgtttgtaactattctctgttgacgcgtttcttcctttctaaaggaattcttattacatttttatttttccctctttctttaggagcaaacagtgttgtgtatctgtcagtagaaggactggtttcatctgtrcaagaagggatamagtttaaaaaacagaaagagaaaaagcacgatattatgatcyaagaaaatggaaatggtctggaatgttttgaaaagagtggtcattgtacagcttgtctcactggaaaatatcctgtagaattagaatggtagctggtagggttggatgtgtgtagtttcaagatagaaagttggtcaagaagttatagtggtcacacctcatctatttactgttactcagttggtacaatgtaaaatgccaygcttatgtttataagttttgagattttttttttttctgaaaaggataccaaagtgcgataactgaacatttccaattgcatataatacaacaatatgtggtgttcttttttttacacaagcattggctagcctttttaacctggtcagagaaggcaggtggtcactgacatttcccaagtccatgctttaaagggtttgcaagaagttagggttaaggagaggtgatgccaacaagacaggtgagttaaatataccatttcacacaaagtttgaatagaatacattatacctcataggtgtctagcctctacagttctggctgtagttatgaccttggcttccctgtctaactgtagacaaatctttaaaaaaaaawaaaaatctggtgcctcagtttccccacatgtgcaatgggatacttattaaataattaataagaatgtgaataagtgtcatacttttgtgatttgagccatcatttcacttctgattttaagacaactcatgattgttagctttcagaaagctaatgattgttaactttttgaaattagtttacaattaattaagatttcattatgatggaaggagacataattggcagatctttgccatctctctttgagatgtcctaaaaagggttgtaaaaatctgtgaaaaagtttttcctacatttgactagaaaatgtgatccatagtatttagtgccctgatactataagctcagcaagtaacctggtacatttgaaataaaaaccaaatttttagattcaaacaatccctttatccttaatttaattaattatcatatgctttttttaatgaagtgcttgatcacttgcaaacatatatacatgtagatgtacatatacatgtacacatacacataaatattattgcaattaagtgatcaagtacagacacaataggggccagttttgtttaaggatcaaagagacaaccactttggggaattagtatcaacttacaatccaagtccaagtatcatcttataatcacttttttctactatattaagatctaatgaatttgatttcttttttgaagttttttcttgtaacatctgagattagaagtttaagatsacttgaccccaaacctttgtttatgtaagaawttttaaacataaaagtgtttgtttctgttatgttaccataatttgatgtatatagtgtccagatccatttagaaatttaatatttattaataactgaaactgtttgtcttcctttggtatatagtctcgcatattatattatagcaggccaagataaaattttgacagctctttaagcccacatgcagcagtgggtcagataaccctgtggcagtgacacgggcaaattggcatttgaataaagccctgggaccacctcaacatgcgtagcctcttgtcttaaatgtactccccatggcagcatggaggaggcaagacctgtgggtcaattttgaactggccttactttgatttttaaaacaagagactcagggaaagtactaaaccaaaatctctgattttactttgcgttttctgtagtttttgttttactgagatgcttttgtaaaggaaaataatactgtgacagtttagtaattctacagattcttaatatttctccatcatggccttttacttcacaattttctgaagtctgaattcaattacaattttttttttaccaatttaatctcaaatgttgtttaactgctttaaattcatatacgtagagtattataaactgsagagatgaaaaatgtgttttcacgggatttatattgtgaactaaactaagcctactttttgtgacttatttgtgatgccttgttgataaatatgtgtaataagtatgtttaaatatgtgtgtccttttttttttttttttaaatagtgactttagttagtgctttatggtaaacagcatggagacaacttccaggctccattcttggcaccagctagtcatatcttatttctctgatccaggcatttcaataaataggccatctcttatgaaccaggcaaaactgctggttgactatgagggacaaattaagtaattagaaaagcagtactaagtaagcactacatcgtggcaagttcctaggaagcactatggggaaagagggagtgtcatggaagagcaggattagattcaaagtgtcagggtgggtaggtaaatgaatagataaactgtagtacattcagacaatagaatattattcagtgcttaaaagaaatgagcaatcaagccattaaatgacagaaggaacataaatgcatattaactaagtgaaaggcaccactctgaaaataccactctgaaaatattgaaggtatccaaagaaaaagtctcccatgttaaggataaactggtcacagacaagaaagattactagtagggcacctgccagtgttaagaaaatttctgtgcaactaggtaaaccttggtcgctggactggatctttaattcttctaggttcctccaatccaactttcttccatagaattactaaaaacgagacttgctatgttcttaaagcccaagctcaaacttaactgaattttaagggagaaatctcatgcccaaaggttcacaaaactgcccaatgctataaccagagacattaaaactgtaaaccagaatgaaaagctaacatctccatactgtgggcagcttttcccaagatgatggaacataactccccatcctaatgacactcttgcccctcttaattcttccttgtttatgcctacctctttgatttggcaggataatttcacaatcggtagatattgtgggtgacttgacagaatctgacttcataaatcctttagtccacccagggggtaatactggcaacatcctcagtaaactttttgttcaaattgtactaatggtcttttttaaaacagagttagctctctctgctttaattcaagccagtcatggaatgctaagtaataggattgctgtgtaccagctaaacaaagagatgtctgtgcttttgctcatactacatgctgtacctggatacattcctttggggaatttatatacacaaaataagaaaatagcccacatggtataataggtctcacctaattcttcatgatcatttgatttattcaactggttgtctttaagcctaggttcacggctgaaaactattatgctgagattgttactttgtattttcttttttttttttttaagaactttatacctgtttcttgtcaaatttgcatagaaatgcaactcctaagagaataatgctctcccagcactttgagatgatagacagtgcctgtggaacagacagaattgaacttaacagtggactccaggtagacttagcctgagatccactccctccaaacctcttttgttgttcaaatgtggctaaagggttttgatgctaattcctagttaccagtgactcccttcaacatgagggcagactggcaccaagagatatcaaaacctaaatacaggatgattgatcagtgatgcttttgagaaagaccttgatcaaaaggggaaatgtgaaagttgtcagattcaaaatggagtcactcgtattaaaaccctggcaaacggagccaggaaacgccatgaaggggaagggttctcatgtacatatggttgataacaagaactatcaaaagactacaaaaatttacaacctgcacaaaggccaccacaaccttaaacacaacacacacacacacacacatacttctgcaacgacatctgcctagcaactgcctatctaacgtatggactgacaccacccttaccacgcttgttattgttaaaacaaacagtgaggtttatttttatttatttatttattttttgagatggagtctcacttcgtcaccaggctggagtgcagtggcgcaatctcggttcactgcaacctccacctcctgggttcaagtgattctcctgcctcagcctccagagtagctgggactacaggcatgtgtcaccatgccaaattaatttttatatttttcaaagagacggtttcactgtattggccaggatggtcttgatttcttgacctcgtgatccacctgcctcggcctcccaaagtgctgggattacaggtgtgagccaccaccactcctggccttccagtgtacttccacagttacatattctttcctcgtgccctgtgaagaggtgccttccaccatgattttaagtttcctgagggctccccagccatgtggaaccgagtcaattaaacctcttttctttataaattacccagtctcagatatttacttaaagcaatgtgagaacagactaatacacctgtcaaaacaccaagcctgaaaaactcaaccactaatttgctctctgccttctcctgagcagctgaacacttagagtaactcacacaatgccttattatcccaactgtgatatgtggtacaacagcacataacaggaggacctaaccttgtttcaggtagggtcaaggattttccaaattatttttgaactttttaaggaaacaatgacattgacaactgagagataagccttaaaataagtagagtgtgccagtcaaggtacaaaatatcagcagggtacagggtgggcatttgatatttccctgcaactggaacagtgtaagtggatggagctgagttaaaaaaaaaatagtttgggaaacaagcgcctaagacatgaatccctgctataagggtgctatttagtataggaggtcagatttggaaataatgcagcaacagtaacaactgatgctgtaagaaatatatgtcgctgtctgggaagggtctggtattgaaacctattttaaagttagtaagatagcctgttaactgttttatggcagtaaacttggattcctgggtgacaaagaactttgtaatttatggcaaaagcagaagccagaacttcatgtttatgcattttccatgtcccccaagtcccaccaggatggtgaagatgggcctccatggatgtctgcacatgcagtcagtgggttacattataggagaggaatactgagtttgggggattccatacttttgtagttaagtggaagcaagcctactctttgggaagaatacttcagctatgaaactgatcatcccaaacaaccctgaaaaatgatctaggtaaagagcagttaggaccttacgttcttggcaaacccagaatttgcaggtcccatgacaaatgacccctcccaagagtatgatgggttcgtgggatggagtttggaggagtctggataaattattctttagggcttgaagaaaggcatcactgaggaagtcatgtttaagctgtattttcatcaagcaggcatggagaaagaagggtatttcagcctgagcccagccaaaacaggtgtggaaacatgataaggactttgtattctcagaactcttactagcctttcattatgactagagtttacagtatcaggtgtggggaatgtggaagatgggtgggggagcagtggcctgctgtgagatatcaggttggaaagaaaatgaactctcttgtttaccttgctgaagagtctgaatgttatgcaggcaacgagggatcattgaagcttcttattctcatagaagaatgctatgactgatctggtatatgttttagaatgatcaccttggattatcaggtaaaaatgctgtcttaaacatagtgttctacatttgctccctaagactccctgaaaatgacagtaacaggatttttaaagtcatacacccttaaggattaaagaaaaggaataatggaaatgaaattctggaatcaatagcaaagggctcagttgacttgaaaaacctgaattctaaacccccagtgagcaaaaccaacaagcaattctatttgtatcacagaaccccctaaaaaactaagaaactggcttcaggaagtagaagtgaagagggtacctaaaaggactggaagttcatttaggagagtgttatatcctttatgccacccccggcccccgccttattctgaagcctttttttattgctcaggagtaaaacggggtctctgtaatggaggacatcaggcacctaaaacaaagagaattaagtgaaaattgtactaaattctgagacataccgcagcctccatacccctcctctcccacttgattttcaacaaacgtcccatgggctcaacagcttccaatcaacttttaaatatacccccacttacatatgagcagataaggaccaccagacatcctaggaaagcctctaatgtgaaagatagagcacaaaatcaacagaagaaagaaaaaggaaacttgagggaaatagatactgcaagggaagaaaaactttaaaaaaggtatcattaatatcagagagttggatgatgatactggaataataaaacatcattttggcagcaattcagagtcaatcagaggcaaacaaaactgaaaacgttttaggaaaaagctgaccaagaagacctgaactaaagtagcagtaatggcgatgaacatgacacttaaaaaacgcaggttctaggcccctcactagaaaactaggggatgaacctccggggatggagtccaggaatttggaatcttctaaaacatcaccaccggcaattctgatgtagccagctgggtgctggtctcaagactgagaactagaggacatagggtctaatcggatgtaagaggttaagaaagtgggaaggttgataactgtctggctgggtggatgatggtgtcatcccaacgtagaaacatagaaacatagacaagatacacttttgcccacttccaatctaaatacataaataaggctgtgttagtttgagtagtccatggtacatcttggaaaagtatagttggcatgtggagatattttttgcttagattagaagcacagtttcttgtcaccaacaactacggctgcgagagcgtcctatgcttttttctcacgtactgttttgatgcagagctgtcttcgcagtccctcccccggctaaaaccccccaaacaaaaaaatcccgattactctgccaccagacagtagctttaaaacacctctgttattgcccttgacgcttattgtaataattgacatgtctccaactgtaacaattcccttggaaacagaaagttctattcaggcatatagtttacaaaactccacctcggacctgctttaatttctttacaggtcctactaaatgctcctgtcaaattccttagttatcgtttcaatctgcttcccaattaaaatgtcagcatcatgatgacaggaacgtcgtttgcaggcgtcactgctgcagccatatctccagcacgtttccagaaaatgtcattggttgaaagcaataactctcctatttcacaatgatttcatctctcttcacatcaaccctaggtgatgtttttattctcaccttatgaacgagaatactgcggctcaaaattcaagagtcttgcccagagttttttggcaagtacgaaagggttatggctccaaactggttagctccgaagtccttgcaaaccctgtccgagaccatgcgcgaccccaaggagcgcctgagcagataaccaaaagtgaaaaagcctatagacctcttcactcaagttagcgcctcggcttcaggagaggcagcgccagctccacgcagccggcccggggtcgctcgcactgacgtcacgtagcgacgcggaagatttacgtatggtgcctcgctctgggatagctttacggcttctgggagctgctgcttcgctgtgagaagtatccgcgacgagctatccgggaaagggccgaatgcgatcaaacctaatccgcgagacttgctaag

SEQ ID NO: 94727 - DNA, 26593 bp, Homo sapiens
  misc_feature (1)...(26593): n = A,T,C or G
tggctaaaagtggccaaggtagagctcaagccatggcttcagtggggcaacgtccaagcattggcagattgtcagctttgatgtggtgttgagtctgtgggtacacagaagtcaataattgaggcttgtgaacctctacctagattttagaagatttatggaaatgcctggatgttcaagcagaagtttcctgcaggggtgagacaatcatgaagaaactctgttagcacagtgtgaaaggaaaatgtgtggtgtgagcccccccccacccccaacacacccacacagtcaccaccagagcactacccagtggagctatgagaagtgggccaccatccttcagaccccagtatgatacatcaacaaacagtttagactatccaactggaaaaaccacagatattcaatgccagcccatgaaagcagccaagaagagggctgtaccctgcaaagtcaaaggggttgagctgcccaagaccatggaatcccaacgtttatatcagtgtgacctgtatttgagacatggagtcaaagaagatgattttggcaatgactgcccctggattttactgccttacctggattttggacttgcatggagcctgtagcccctttgtcttggccaatttctgccatttagaaggagtgtatttatccaatgcctgtttcttcattgtatctaggaagtaactaatttgcttttgtttttaggctcataggcaaaaaggacttgccttatctcagatgagactttggactgtggacttttgagttaatgctgaaattagttaagactttgggggaactgaagagagtgcatgactggttttaatatgtgaggacctgatatttggaaggggccaagggaagaatgatatgatttggctgtgtcctcaccgaaatttcatctggaattgtagctcgcataattcccacctgctgtgggaggaactcggtgagaggtaattgtatcatcatagggcatctttcccatgctattcccatgatagtcagtaagtgtcttgagatcttatagttttataaaggagagtttccctacacaaggcttcttgcctgcctccatgtattatataacattgcttctcatttgccttttgtcatgatggtgaggccgcccaagccatgtgtaactgtgaatctattaaacctctttcctttataaattacccagtctcgggtatgtatttagaaacagcatgagaataagctagtacagtatcctaaaactataaaaccctagaacaaaatcaagagaatagaacataactgaactaaaaaacctctgtgcaacaaaagtaactatcaacagaataaacagatgacttacagaatgggagaatataattgtaaactatgcatctgttaaagatctaatatcaaaaatctttaaggaacttaaagaaattaacaaaacatacacaaataactccattaaaaaatggggcagggacatcaagaaagaattctcaaaagaatatatacacaggaatgtgttcaagatgatcaactagatgcagtcaggaagtgccactgccaccagggaaacaccagggttttttttttcataccaaaataatttgaacagatctttggagagaaaatactgaatgtggatggagaaaagaagtagtcactgaggctgaagagaaagaaggctgaggacgctgaatggtgtgcctgaatgctacagctggttctctaccctgagctgtttctagggaagggtgagtgaaaggaatagtaaacagcttcctttcactgtagacatctggaattctggctagatggggctccataccttcaaggacatgtggactggcagaggggtctcccagaaattgcacagagatggagatgcagacaaaatccagggacctttgtgaataggtcctttacacagacaagactcctatataagaaaaacttgaaacaaaggtgttgcattcaactccttgccttcagaggatgccctactctgtaatgtcacagctttcaatgagctatcttttctcactgcactctgtgactcaccttgaattccttcctgtgtggaatccgagaaccttctctcagtgtctgaatcaaggcccctttatctgggaacacttccaaggagacttttctggctttcatagtttgccttaatttgatggttattagtcctcactcttctattattttctcccaagcattaacactgaagaaaaaaacattcacctctattgtagtcataatttctacttttcccatattgatacatttgtgatatatcctaataagtaacactttccctttcaaaagattaccatcataatttgccattactgaaagtatgaaaaatttaaattatcacattccagggtctatttgtgttctccctaccaatagtgataggattctccttacaactggtagtgaatgatccaactctaaaatctcattttgttgtctgttctttttttctgatgtctcttggtgcatattatcaaattctgggagcttccaagaagtagactctaagctgaatatgtttttgagggagctaatttgggagttttattgaacataacatctgtgaaaaagtagggagcaaatttggacagtggaagaaattaggatataattcagtgcaatggtttgaatgtttgagtgttccaaagattaatatgttaaaattcttataaccaaaatgactgtattagcagacagaaccttttaggaggtgtttaggtcacgaagggagagtcctcattagtggaattaattccattccaaaatttgctcacaagaactcattcatctcttttccccattaagacatggtgatgggctgccatcttggaggaatgcccaataccagcatcttgattgtgaaaatttcagcctcaagaactgtggcaaataaatgttttttgtctatatgctaggcaatgtatggtatttttctatatagcaccctgagcatgctaagacatgcagtctcagcataggtttcatctcacccactgggagttctgaagacaagttagcccttcagagttggtccacattgaaatgaggagaatgggcctttaaagtcttacatatgaccaggcattggatatgggctgtcttggaaaggtccccttatactagatagctttcaacagcgctgcgctgagagagagagcttataggtgaggtatgtcagttgttaatcacttcatcagctggaaagtaatttgtatattcccaaaaggaaaatttgggtgacacataatgcatgcactcaaggacattaaaaatattgaacaatattgccactctgtaggcaatattttctcagaaactgtgttcaaacatccttttaagaaagatttacctcatttcaggttaacagattattaacagaataaaaacaaatttgtctattttgtgacatgcatcttttccttcctaattctactttgatgtaaatttctggtgagactttttaaaagtacaaattacctgaattacaagacaatctgtgaaacaagttcaggagtgggcatttagaagacaaatactttctaagagtgagaaatgtcaggagtgctgcannnnnnnnnnnnnnnnnnnnnnnnnnnnnnnnnnnnnnnnnnnnnnnnnnnnnnnnnnnnnnnnnnnnnnnnnnnnnnnnnnnnnnnnnnnnnnnnnnnnnnnnnnnnnnnnnnnnnnnnnnnnnnnnnnnnnnnnnnnnnnnnnnnnnnnnnnnnnnnnnnnnnnnnnnnnnnnnnnnnnnnnnnnnnnnnnnnnnnnnnnnnnnnnnnnnnnnnnnnnnncccctgcctcattgttgacacaatgctgctttcttatactagaaactcttcatatacaattaaattatctcttgttctggagacagccacatttacaataagaatgaaatttattattcacacatgcaaacacaaaatcattcatccttttctttattcacttgctttccaaaacctctattgtcaatacttaaatcattgtgacattgattgatattgatatgtaccaagttagagaaagttataaagaaagatagcattttaacaagttgtctaagaaatggacttttttgtttcttatgctgacagttgtattctagctctgagtcctgttagaatgtgctggtgtggccgatgaaatagtctttgtatcaatttaatgttgatacttgatgaacttgctcagaacaccgtgaggtaactgtgcttgtcaccttcagcttccatcctcattgattccaacaatctgctgttaaatttgaggtttatcccacatcttttactcagaaggaacttgatttcatttttatgaagttgatcaagatgtggacatataagtttccaaagagtacattgttggcatatgattcaaagatgcaaaaactacatatcatgaatgttctgatactgttcaaaagctctgtgagtatgctgttttgaacaagaaaattatgaggaacaacaagattccagaatttatatcattcttgcaaatgtcagttctcagtagtgagctgctatctgaacaccttaatctgttaaacatttgttatacatttggtctacaatcatcaatttacaactggcagtatgtaccaagaactctgtggaggacttacattacctccttctgatgtaactgttgtcatatcagaacttagtaccaatatacatttgtaaaaaggtgaaaaatctgttgcattttcttcattttgactttgcatttgagatttttaacagaaagaagtgggatcagttgtacagtgaagtattaggtaagttagtacttaatttattcacttttccctccaatatgtggaaggaaaccttcctttttggggtctgttagagtgtgtttataaattgaagtaaaaaataacctttttggttatgtgaaagacaagggtgggcaaggttgtggagacattgaaaccctcatacattgttggtgagaatagaaaattattcacccactctgaaaaagtctagcaattcctcaaaagattacacttacatttaccacataattcagtaattgcctttctaggcatatccccaagaaaaataaaaacatgtccacagaaatcatgcacatcaatgttaaacaatgctattcataatgaccaaaagtggaagtaaatcagtatccatcaactattaaatgaataaataaattgtgtttataaatagcatctgataactatttggcaataaaaatgaagtccttatttacactattctatggatggtcctttaaaaacattaaactaagtaaaggaagccagccacaaaagaccacatattatatcgttccatttacttttagaaagagcctgaataggtgtatttctagaggcagaaattagattactggttgcccagtgcagggcgggtgcagaaatttggtggggagatgagagctaatacacaggagttttttgtttttttagataaaactgattgttatgttggatgcacaagtctgtgaatttacaaggaaatacttaattttaaatactaattgatgaatcatatggtatttgaattatacttcaacaaagttttacaagatattccttgaaccacgatattcaaaaacgctatttgcattgtacgatcacttcatctcttactctgtgtcaagggccctgcaggactctctcacttgccactattcttgacactattataaaataggttacataaaacagggtacttgcaaggtcattaatcttaggtggatgacagcgaatataaacataaaagaaacatcaaacatccttgagtaaatatgaagtaatcaaactttgtctccttgccatccatgtactcaggatgctcctataatatatttactttggattgaaggagttatgttttaacttgattgatttatctctgtatataagtatgagaaagaaacagtgacttgaaaagaatgattgcattgcaccaggatggctctgaaatggacttcagttcttctgctgatacatctcggttgttactttagctctgggagttgtggaaaggtgctggtgtggaccggtgaatacagccattggatgaatatgaagacaatcctgaaagagcttgttcagagaggtcatgaggtgactgtactggcatcttcagcttccattctttttgatcccaatgacgcattcactcttaaactcgaagtttatcctacatctttaactaaaactgaatttgagaatatcatcatgcaacaggttaagagatggtcagacattcaaaaagatagcttttggttatatttttcacaagaacaagaaatcctgtgggaatttcatgacatatttagaaacttctgtaaagatgtagtttcaaataagaaagttatgaaaaaactacaagagtcaagatttgacatcatttttgcagatgctttttttccttgtggtgagctgctggctgcactacttaacataccgtttgtgtacagtctctgcttcactcctggctacacaattgaaaggcacagtggaggactgattttccctccttcctacatacctgttgttatgtcaaaattaagtgatcaaatgactttcatggagagggtaaaaaacatgatctatgtgctttattttgacttttggttccaaatgtgtgatatgaagaagtgggatcagttttacagtgaagttttaggtaagaatttgtttaatcgggaacttgaagatctaacttatttgtgtctttgaagcagagcttatataaagccataaagtcagggaagtggagtttttggtaagtgaatttatgaaatgaaaatacaagatgatctatcaatctcacaaacattatagaaaagcttaaattataaggtctgttaaaaccctgtggccatcactcatacagaacaccccaggaaatcataaacctatatattagtacacctaagactttaagcaattacacatctgttttactatataatgttttagatcttaaaaacagtgaaatccatcaagtaacatcttactgaatgcatagatttagaatgagtaattacacatttttctacaactatctatataactgcagaaagttttccttgtaaacctcagttttcttttttaggtattaaaagatattcccatgtttccagaaggtttccttcacagtagagagagataatgtccacatctcagatgcaaaagttaatcagggtaatttgaagtttctaatgtttctatactccttcactaaagaattggaattcattcatttaaagtccaattatcttgttgaagtgtgaaggttgttatatctatatagtttatttgaaactatgtctctttatttaaaaatatgagacagattaaggttgagtacagatctctatttcaataatttctcaaaaatttctagctataatttacaaatatatttacttaaatgataatattattaagatcttagctcaaatccaaatgagtagttggtacaaggatttctgccatactctcaaaatagtccgagttcacttgaagaatcaaagataaaaggattagcttaaggagttgtgtaaactggactgttagaaaattggttttatgggtacagtagaattaattgattatggagctcaaagagttgtttaaatatctatatgcaactattgaagctttaaagagaaaataaattgatgtttaattttctatgacttattttaataattgtgagtacactgacttgacattagagatgtcgcttaacttcataattctcccaccactttgcctttcttataaataaacatggacaaaatatataatacataaaaatatattattcatatacatgaatatatgtatatatttttcaaagcacacaaactttacctacatctttgcctacataattctaacccctttcagaaagttatgtaaagtaattatcttacatcatccactttttcttttctttattcctgtcaggaagacccactaccttatttgagacaatggggaaagctgacatatggcttatgcgaaactcctggagttttcaatttcctcatccattcttaccaaacattgattttgttggaggactccactgcaaacctgccaaacccctacctaaggtaaacatactttcgttggttttattttgttggcttcgaagtttcagtagaaatgagtctatagccttcattcaaaatgtttgacttacactgaaagaaagatgggaagtaggtggtgtaaagcagataccaaatagaaactcatgtatatgttaataccatcacatgtatgtgagttttatgcatattacaaatagagaggaatagtaaggagactttgaaaatagggttgattaaagtcttgattatgcaacacctaaggaggtatttgtcattcattcaaagaatatttataaagggattagcacaaaacacaagtaagtgcagaaatttcagagaaaaaaaatagacagtttccgtctgcacataccttacattctactttgaaatatagaaaagtaactaatgaaaatgttttaaaaaactattatctcaaggaaaaacccaatgtcaagaaagcatcagtggagataatagaaagtatcctggagtcatggattagtaagatgagagctgaacaatatgcaggaataggtaaaagaatggcggggagaggcagacaaaaagggaaagcagataaagtggtcaggacagttctcwagtcctcaggttttgtttttagggaatgattaagaatctagatcatactaagaggtaaattagagccagatacatattaggagtggaaatatttattaagaacattgaaaaactactaaaaagagttaagaaataaatatatatgaaacgattctcttttttaagaagagcctccaagatattcaatggattaaattacagaagggccacactgtaaagagccaaccattcaggaaattttccatggattcaggtagaagatgatggaaaagtggactagaaagttgatagaaataattatgcctacatttgctaaaatagtgccaacttcatattgtgttgtgtggaagaaatattaaaacagacaaaacacttaaaatgtctctgggatatagtcagtgactcagaaatgttattaattttgcaattatggttattttgttattattgccaatactactaactacttaacatgtgcaagtcacttgagatatcattcctcatttaagagaaccagattattcagcacatcaaggttatattctcttgcaaagtcatatatgacagataccctgtggacttgattaaaattagacatatcaattgtgacagtaaaatgagctagttgaaattctaaaattctaccgtaagtaataaggatcttcactagtattcgagcataaaacacttcctcaacaatacaaatgtgtgccttaaatatgtgcagacaaacccagggttcacttgactttaataaagtatttaaatcatttctgcattgagatcccagaattttacattttagatcataaacataccctattagagcagacgatgtctgccgtatgacaagcaactcagtaaagctttctgggggaacttatctcaacatcataggtgcctgacagagaagcacagagatagtgaacaatgcatgtataataaagaacaaataatttctaccacttgtatctgaatagtgcccttagtttcaatacgaaaaaaaattctgtcagcatataagattatattctttttgaaggaacagaaaaatctcatatattttaaattaatatcacattttaagacatatgtacaaagtaagccttcttcaatgcattattactcaacctcttaaaagaacatttttgcttacataaaactgatattttattccattgttaaaactcagtatctatgtttaatgcaaattgtatgggctttatatagtcactttctcaagagacaaaagctgaggtaaagactaatgaaaaatctgcgccactctacactactcttgaaagatttccccattcacattaagggaaactgacagtgaaaattggaggaggaagagagtaggaggtgtaaaaggacaagaaaaaaggttgactagtagtacaatagtggtaattactaatactaggtcttgttattaacttgcagaaagttttgaatgcaagtcaatggttgtgaaaccagttatttaactgtttattatgtaaaataactgctaacacaggttgctttcttttcaattatatattacattctcagataatttctatatattttaagagaataagacacttgacaaactgcatcaagtgttttaaaaatgcgtattgttattaattttataatatattcacgtgaaatcataaaaaaatcaagttgtacctattaaacattatggaaaatattcacaaaattaacattagaattaatccgacatcttacatgaaagaatgattaaaatttatttgcatacgatagcattaaaataattttatcaatgaaatattcaattacaccatcagccatagtacagataatatgagttagaaaatgataaatataacaagatggaagtttttgcaggataaaatgtatatacaataagattgaaattttctaaataagtgtcacatgtatacattgacctatataaataggacaaaatccataataaaaaaatacatattttctataaataatatctctaggtagaaattttagaaaaattattttttaaaacgcttttcatacttttatacaatttcttacattaattttgtattatttttataatattatcactaaaggagcaacaacccgtcaatatcagtgatgaatctctaaacagaggttagattccttcaacactgggtagaaaaacaaggctctgatatcaagccagtgagatgaaacactgaamacgagtcacattaaatgtggytacaggtaactgcaatcacacacaacmcctagaagccccaggtattacgtggaatagtagtacaaggactctcacgttaacgtaagattaaaaatcatattttaaaaaacgctctgccatacgtggtgcactgttcacatttagacatttttttctttgttttgttaaaaaccatttggaaaagttttaccccaatgattaaatctgaaaatacttaaatttaaatatcggtatacattggggaactcaagtcagaataattctcaatcaattgcagccaagcacatcttcaccaggcgtgtaatgtggtgtgcgtgagctactcaaaagagagacaagatccccctgcagaaaggcctggtggcctcttctattctggtgccagtgctgcctctgagacacaacaaagtgatgatgagagttcctcacatgcagttataaacagcacatcaatttaacagtgggatttcagggcaataggtgctccacctaaacaataacctgaaaggtacaattattcaacaactaactataaactctacaattctgtatgataaatgagactctcaagactgagtcataaaaattccaaatcacaatactagactcaggaatgtcagtgattcttaaccaccagcttttattttcattttttattttttgaaaaactactggaaaactctgacaaactttaagtgaagcataaagcattgtagaggaacataaatgtagatataaaattatcccaactgtgaatagcttttcctcagtgctcatatttagggaagtagatcactaatggcttcaaactaaaagaattctacagaaaacatgcctgaaataaacacaagtgtttaagtagaagaaaaatatagcattaaagcctagtggtgccacttttccaagaacttatattagtaattatagtattataagtgaagagtctgggnnnnnnnnnnnnnnnnnnnntataagtgaagagtctgggtatattttttacacattatctccctgactacaatgtaatagctccatttcttttctccattacacacatgcagacacatacctacataaacacacatatttacacaaatatccttaacagaggccaactacctcaaacatcttcttgtaaagaacctgagtgattgagtcagttaaaaaatattatttactccaataattcctcaaaatacttgattttctctctttaatatttggtaccaattctttagtagtgcctgctgtggtgatactcttttgtgattaaacaattttttttcacaggaaatggaggaatttgtacagagctctggtgaaaatggtgttgtggtgttttctctggggtcagtgataagtaacatgacagcagaaagggccaacgtaattgcaacagcccttgccaagatcccacaaaaggtaagataaagtgccttactggtgtggaaaactactgaaagaggctgttaaagtttgagatctacacagaaagaatattaaggstagactgaactctttacagccaaatacagtcttaaatatcttgtgtagcttccaccgacacaagtcatagttgtgcctcagacttagtggttacatgtggccctgggggtgttactacccttggyatgcatgagtggttcctattactaccagtgggaactcagtactccatatgtatccacaaaagggaacttgagacccatgattatttttaatttctgatattaacagtcatacatatggctgaaattaactcaatatatttcaggtaagtgaaaatggtgcctaatgtagtctttagatgactttcaagtgttttcaactaaaaatatatatccagaactgcatctttgtagaaatacaaggaagacttatgatcattttcttcaaagctgttttcctaatctcagcagtatctaatgagtgaagaagatttgacttactcttggaccacctctattacttattgtactctggaagctcttggtgaatgtttacaattaaggaatgtactatttctgtttgtactttaagtcaaatgcttatgtgaaatatgtgacaacaaatagagaacactgcctgaagcaggaaggtgaaagagaaaggatggagatggatcctgacctgaaggtggatcctgtacagtataaaatatggtcccacaaggactcagcactaactaccagattaacaacccctcccagtggaggcagcagwaggaaatataggaaggagtcaaacagaaggaagccaggcaggggaacaggtttagatgtcccctccatagaacatagtaggaatgtattttcttctatatagaataaaccagggacctttgtgtatttgtgaattactttttaatttcctatctgataaagctttcttgtaatgacctctaactttttgctgaaacctgagttactttaacactgatgtagcaaataaaagttaaacactgtaaattattgttcactttatgaggattgctttggagtttcaaaattagtaacaaaataagaatgtcttggctatagcagaacatattaatcactgttgtcaaagctttgtagcacgttgtctaagtgataataatcagttgaccaaattcagcaaaatacaattttgagtttattcaacagctttatttttattcatgattccaacaggctcctcatttctaggccaaaaaaaaaaaaatccaaaattaacgatactggtaatattctgaatttgtggcaaaaattgtcacttgaaatttttcttggaagtagtgcttgaaaatttgtaattccaatgaagttatacgtaaaaccttggcagcatttatttatttcttataattagcttattttatagacttgctattttgtcaatcaaaggacaacaggctctaatataataacctaccgacaagtagatacatttatactacttctcatattattcaaaaacaaatgaatatattacaattaaatttggagatgaaaactaatataaaatacataaaacaaacatataggtcattactaaatagttactgttttattacactagaattacaatgactccatataattttttatactttttttataatatttttattttttaaattaaattaacttttatttttaacttttaagttcaggagtacatgtgcaggttttttacataggtaaacttgtgtcgtggggttttgttgtactaattgtttcatcacccaggtattaagactaatattcatttattatttttcctgatcctctctttcctcccaccctccaccatcctatacatctcagtgtatgttgttgccatctatgtatccacgtgttctcatcttttagcttccactcaaaagtgaggacatgtcacatttggatttcaattcctgttagtttcctaaggctaatggcctccagctccatccttatccctgcaaaatacatatttttgtttttttatggctgcataatattctgtagtgtatatatgccatattttcttcattcagtccataattgatggtcatttaggttgactgcatgtccttgctattgtgaatagtactgcaactaacatatattttcatggatcttcataaaagaaccagttatagtcctttgcttatatacccagtaatgggattgctgggtttcatggtatttttgcctctaggtttctgaggaatggccacactgtcttccacaatggttgaactaacttacattccaaccaacagagtataagcattccttttctatacaatctcgccaacatcatgatattttttgaatttttaataatggccattctgactagtgtgagatgttatctcattatggttttgatttgaatttctctaatgatctgtgctgttaagttattttacttcatgtgatggttggccgcaggtaggtctttttttaaaaagtgtaacaattttttgaatatttgaacttttcattgataatcttatttttctacggtactattttggaaaataatggtttcttatatatctaaatcattataaaagttaagaaaataaaatgtgagtattgtttttacatcaatctctgagtagatttatttactaacatcccttgatctcattcctaccctttttacagttctaacattctataatttttgagttccactcatggaataagatattctctttactgtaacaggttctgtggagatttgatgggaataaaccagatgccttaggtctcaatactcggctgtataagtggataccccagaatgaccttctaggtaacactctggtgaacaaatactggatatattagtaactgcacattagaatgttaatagtttatcttgaaacatgcttattgaatatttattataggaaaacaaaaagaacttctttgtatttattttccagtcctaggggaaaagaatatggtagaattgytggcattttatgatatwcactcatatactttatggtcagaatcagagataatctttatttcaggtgctattatatctcacagaatttttcagtatcttcctgggctgtctctccgtctcctgtttctacaactttacacctgttttctcctctcctgcaggtttatttcaaatgccagtaaatataatagctcttctatcaccagtgactctgtattatctggaggactaaattcctaatcttaatcttaaagtagtgacacatttcatgatgaagtgtaacctgtctttcctcaatcctagcaccaccaccaacccactgcctgctgccttgcacaccccacatatcacactctgtgacagcacctaaaataaaactttatttcatgcccatctctttgctgtcctcttttgtgcacatttaaaaaatctagaatgcacttttcattagtcccgctgaaaatcttgtattcagttttgcaccctgaagttaygcacaccacggagacttcarttacatctcctaaacaagtacgtgtttattcctctgaagtctgaaaagtaatggcaaattagtttaatgtgttatctagaaaacactgtcactttcagagcatttcattgtgtatcgcattttattcctatgaataattttgctaaaattcatccaatcctaggtcwtccaaaaaccagagcttttataactcatggtggagccaatggcatctatgaggcaatctaccatgggatccctatggtgggcattccattgttttgggatcaacctgataacattgctcacatgaaggccaagggagcagctgttagactggacttccacacaatgtcgagtacagacctgctgaatgcactgaagacagtaattaatgatccttcgtgagtagaacagtatttttcactaggtggtatttgtagatagcttctcttttcaatagtgagcatgagtttcatcctttttataagagagtaatcttgaaagaatttaaatgatttaaccaatctgaaatctgctttgttttttatctgttatttaaaaattgtgcttgaatcccatacatctaatgagtaaccagttagtgaarcaattttctaaacaaaaataattttaaaatgtcatagataatataaaaaatacatttcttaaaattttaacataacgaatccatagtagaaaggaagaataaacttgaaatattataaaatgttttaattaaatatctaaaatgactcagaatataactattttcttgctgaaaaattaatttttatcatcattattttaacagacttgaaaatgagatttaatttcgatagcttaaaatccacctatttatgccataaaatccaaatatttttactatgtttacagagtcatgaaactatcaccatcatataattttagaacatttttatcaacacaaaagaaactgcaatgacaccaaaatcacttctcrtaactgcttagtcctagtctaacaccaatttgttttctttctctataagttattctctctagatatttcatataaacggaatcgtacagtctcaggtgctgtgtaaatgacatttcacctagcctaatttttgttcttttcttatggtttttgttttacttcatattgttttgtgttttaatacttcatttcctttacacttgtgtaatattttatagtatggatatgtcataatttagttgttcatttgtcagttcattggccttttgattgtttccaattgtggctactaagaatattgctatacatgtctttgcataaacatgttttactttcttttgggttgatgctakaagtggaattgctgcctcatgtgagaactgtatgtttatgaagaactgctaaactgttttccaaagtaattgttccattcatcactaccatcagcagtacaatatggttccaattcctccacactgttgtcaaaccccttattgtctgtctttttgttacagccttcttagtgggtgtaaaatgatctctcatcctggtcttggattgcattttcattactgctgaagatgttgagaacatttataagtgcttattgatcattcatatatcttcttagaaaacatgtctattccaacgcttggaacatttttaacttttctatttgtcttattattaagttttaagaactacttatatattatgggtcaaatcagatatataatttttaaatattttgtcccattctgggtgcactaactttttactttttgatgatggtctttgaagcacaaaaaatataattttaagttaaagttttaataattgattttgttcacaccccaaagataacaatgtgaaaaattccttgcggagtccagctaccatcaattccacatttataactactctcaataaagtttttgtgtaaggagggtatcatctaaaggaatgctttaaaaatactttatcccaaagaaaatagaaggataatgaatgatcaatatatgtttaaagaagatgggaaataattgaaaagcaacacaaaccagcttggamaaatagaaaagaaatataaaacaaagtggtagatttaaatgtgattatacaaatactttcactcaatctaaacagacttttaataaaagagcaaataatgagtaaggacataaaacacttgaagaatacaattaacaaatggattcttacaatctaaaatgatatacaaacacatatatacatatacaatacacatatatgtattgtatatatcaacttgaagacacattttcctggagtacgtcagaatagttaatctttacttgaagtgatatgtggtgggcaataaatcaagacttaggaaatataaaaagattcaatatcatgaagactatatgatccagccatagtggaaataacggaggttaaaaatactattactaaaatatccttaatattggaaattaaaaaaatacacttcaaaaaaatttaaagtcaagaagtaaatcataattatgtatgcacttttatctcagcaattctactctcaattatatacacaacagatatacataaatatataaatctaatgctgtatagcagagtgttcatgagagaattatcaacagtgttcaaaaattgttagcaacccaaatatctattcatcgtaaaatgaagacataatctgtggtttatcaatcaacagaatactacatagcaatggaattacccaagaactgctacattaaagaaaaagacacttttgagtacatattatataattcaattacataaacaagcaaaactaatgttgttattcgaagtcaggctaatccttagttggaggacaaaagtagtcactaaaaggttcagaaaaagggagttattctaggcagattgtgatagcctataccacgacctgaacagtaggtaaattggtatcttcacctcaagataatgttcaagatgatcttccatttttgaactattcacttagtgtatgtatatttatcttttgtgttttatatttaaatgtatattttatgagatatataaatcatttacaaaattctaggaatcagatagaaaataagcacagaaaatagagaaaattctagaggctccatcacagtttggccaataaaagcctctcttagaggtaacacttagagggaagccacaaaaagggagagaagcatgccttgggttgcagcaagaaagagtactccaagagcaggagagaaggaacaaaatgtgtaaagtgctaagaygagaacacctttggaagcttaaagaaaattagaaggccaatctagaagacaatgtgcaggggaaaagtgttagaaaagagcttgccagtgtcttaaaatgtagggttctgtagaccaaataacagagttgaattttatgattaaaagaatgagaagccaggcaaaaatcttaatcagaagagtgccataatctgacwttaatttcaaaaaatcattctggctacagggtgggaaacagtaggaaacaaaagagtaatgtaaaagcaaagtgacaagctatgaggtatgtcactcgccatgataaaattcctttttaggaacttacagatgataattctcacatcgcattttcacaatctttcttacagcacttaaaatggctcatgatgttgagcaggtactcatatgcctgtttgagaactaagagtgtaattggattgttcataatacaaaggataaatgcttaaaggatgaatatcctatttttcatgatgtgattatttcacattgtatcaaaatatctcatgtaccccataaatatatacacttaatatggatccacaaaaacttaaaattaaagaattaaaaacaattaaaatgccttatattttctctgcttgaaaaaaattaattttctcacctgaccttccatttctgctttaaaaatgtttgtcaatgagaaaagtccaatttaaaagcccaactatctatgatgactcaaattaaaatacacaaattctctgtcaattttttcaaatttactttgaattatttgacactttaaaagcctttcatagacttgatacatacaggccagttaacttactttcagtgttggtatctttatttttatccttcagatataaagagaatgttatgaaattatcaagaattcaacatgatcaaccagtaaagcccctggatcgagcagtcttctggattgaatttgtgatgtgccacaaaggagccaaacaccttcgagttgcagcccgtgacctcacctggttccagtaccactctttggatgtgattgggtttctgctggcctgtgtggcaactgtgatatttgtcgtcacaaagttttgtctgttttgtttctggaagtttgctagaaaagggaagaagggaaaaagagattagttatgtctgacatttgaagctggaaaaccagatagatgggttgacatcagtttattccagcaagaaagaaaagattgttatgcaagatttctttcttcctgtgacaaaaaaaaaaacttttcaaaatctaccttgtcaagtaaaaatttgtttttcagagatttaccacccaggtaatggttagaaatattctgtggcaatgaagaaaacactagggaaaataaaaaataatataaagccatatgagctcatattgaaatttgttgcacttatattgagatttgttgtttgaattcacaagttacataaaaatattactcagtttaactacatttcacacattttatataaacacaagaacattaagaagtctactgacagtatcagtagtgttttgcacatactcagaataatttggcttcattttgaacaggattcggttgttttaactgttgctaaagaaactattacatagttaaattgtataaaaagtctctctcttccttttgatatcttgagataagtagtattgctttacttttacactgcatgcagcttcattgtcacattttttgctaaaattgatggccaaatgtttactgttttaagagcataagtcatttctcagtggaaattatgtgaaattagaaatatagccactgttacctgcttcctactgtaaaattgaactgttttgccannnnnnnnnnnnnnnnnnnnnnnnnnnnnnnnnnnnnnnnnnnnnnnnnnnnnnnnnnnnnnnnnnnnnnnnnnnnnnnnnnnnnnnnnnnnnnnnnnnnnnnnnnnnnnnnnnnnnnnnnnnnnnnnnnnnnnnnnnnnnnnnnnnnnnnnnnnnnnnnnnnnnnnnnnnnnnnnnnnnnnnnnnnnnnnnnnnnnnnnnnnnnnnnnnnnnnnnnnnnnnnnnnnnnnnnnnnnnnnnnnnnnnnnnnnnnnnnnnnnnnnnnnnnnnnnnnnnnnnnnnnnnnnnnnnnnnnnnnnnnnnnnnnnnnnnnnnnnnnnnnnnnnnnnnnnnnnnnnnnnnnnnnnnnnnnnnnnnnnnnnnnnnnnnnnnnnnnnnnnnnnnnnnnnnnnnnnnnnnnnnnnnnnnnnnnnnnnnnnnnnnnnnnnnnnnnnnnnnnnnnnnnnnnnnnnnnnnnnnnnnnnnnnnnnnnnnnnnnnnnnnnnnnnnnnnnnnnnnnnnnnnnnnnnnnnnnnnnnnnnnnnnnnnnnnnnnnnnnnnnnnnnnnnnnnnnnnnnnnnnnnnnnnnnnnnnnnnnnnnnnnnnnnnnnnnnnnnnnnnnnnnnnnnnnnnnnnnnnnnnnnnnnnnnnnnnnnnnnnnnnnnnnnnnnnnnnnnnnnnnnnnnnnnnnnnnnnnnnnnnnnnnnnnnnctactgataagggtctatgttcagtggtgcatgtattgtgttgataaatatcttaaacaacagaaaacagggttcgagagcagagaactggtctgaccacaaatttaccagggtggagattttccccaccctaataagcctgagggtattgcaggagaccaggacatacctcagtccttatctcaaccacgtaagacagacattctcagagtggctgtttatagacctccccccaggaatgcattcctttcccagattactaatattaatattccttgctaggctaagaatttagcgatatcttccctacttgcacgtccatttataggctctctgaaagaagaaaaaatggctctttttgccccacctcacaggcagtcagaccttatggttgtcttcccttgtcccctaaatgttgttgttattctgttctttttcaaggtgcgctgatttcttattgttcaaacacacatgttttacaagcactttgtacagttaacacaattatcacagtggccctgaggtgatgtacatcctcaggttatgaagataacaggattaagatattaaagtaagacaggcataagaaattctaaaggtattatttgggaactgataaatgtccatattaaagtgaaatcttcacaatttatgttcctctgcctcagctccacccagtccctccattcgggatccctgacttcctgcaacatctgtgtgtgtgtgtttgtatgtataccacattttctttatccacttattggttggttgatgggcatttaggcttgttccattctttttcttttttaattgcgaatagtactgttgcaaacatgtatgtgtgtgggtctttttcatataaaaattttctttcctctgggaagatacacagtagtgcaataggtggatcaaactgtacttctactgtaatttcttatagaaatcttcatatggttttccatattacttgtactagtttacattcccatagcagcataaaactgtcccctttttaccacatctatgccaacattttattatttttggatttttaaattatattcattctttcaggagtatagtggtattgcattgtggttttgatttgcattttcctgataattagtgaagttgagcattttttcatatatgttggccatttatatatcttcttttaagaattgtctatttattacattaggctactttttgatgggtttttgtttttttttagccatttgaagattctggacattagtcctttgtcagataaatagttcatgaatattttccactattctgtgagttgtctgtttacacagatgattatttcttttgctggcggaagtttttagtttgattaaatcacaactctttatctttgctttagttgcatttgcttttggatatttggtcatgaggtttttgcctaacctaatgtctagaagagtttttccaatgttactttctagaatttgttattgtttcaggtcttagatttcattatttgatccatcttgagttgactttttataagggagagacaaagatgcagtttcattcttctacatggggattgccaattattccagccccatttgttgaatagggtgtcatttccccactttatgtttctgtttgctttgtcaaagttcagtgggctgtaagtacttgtctttatttctggaatttctcttctgttccattgatctatatgcctgtttttatactgataccatgttgttttggtaacttgtaatatgccttgtaatactttgggtaatgtgatgcctgtaggtttgttctttttcttagtctttctttggctatgcaggtttcaaaactgagaatcaaataaaaaactcatccattttgaaaatagttgcaaaagaaaaagaaaaacaaaacaaattactaaggaatctacctaaccaagaaggtgaaagaactctacaaagaaaactactaaacactgctgaaaaatgtcgtagatgacacaaacaaatggaaatatatcccatgctcatggatgggtagaatcaattttgtgaaaatgaacacattgccaaaagatatctataaatccatttcaattctcatcaaaacaccatcatcatgcttaagagaactagaaaaaaaatcctaaatttgatatgagttttattatcatatttgacttgtagtaagaaatgtaaatcctttattttaggttgtgataatatagaaattacactctaaagggacttagtgaattttcaatcttgctaaatatacaggtacatatatatgtccatttcttttaaaacaagacacagcatcaattaactagctaatagatatcctgtgaaattcaatgtgtattttgaagacagattgaaataattattattctacatagctatactttaaatgataatatctgttttattattttccacatagatttttgattcattcctcctataaatgtagtacggacacataaatttctagtaagtcaaaaaatatatacaaaggataccaaaaagtttataaattttgtggaaaatagctaaatcaagccaaaaatctcctttagtctacacatcagggaagcactttatgatcaaactagtccagattaacagaaacccagttgtctttgtcactaaaaagtcttgccattaaccacttctcacaaaaatattctacagcataagatctgattaaaaacatatatgtatacatatatgtatctttataattatatagacatagataaatcatgtaatatacatatacacacacactaaaacattgatgagatagagagattatagaaaattttatacaaataatctaggaattaatacagatataaagaaacacagaacttatatagtgccaaagattaataatgttgttttatcatacttataaatctgaattaattcacataaaacctatcctatgacacacataacaaaagattggtatccattgttcagtgagaactacaaatcactaaccaaaactgacaaacaatctaattaaaaagtgattaaaatatgaagaagcaattcaaagtaaaaatggcccataagacataaaagattaaaaagttactgatgctcagtaaaatagaattaatgccaacaaattgatgtcatacagaagatttgcaccctataaaaacctgagaaatctattttgagggagtataatttgaaataacccttttaaataaaatgtaaatatgccatttgaaactgaagttctacatttaggaatctgtcatgaaaaatccatgcacatcagcacatgtatgaacagaatgattcctccagcacttaaatggctttcagccactgaacacatgtacctccaacaaatgtatgaggggagccattgcagaaaacaggctgactatcactttgctaaacagaaaaagtagtttccagaaaaacaaaaaagtattttttgcaatgaaataaaatatatgtaaactggtaaaaagaagaaagaatctcaaaaaacacatgtaactacaaggatgagaatttaaatttttattctatataattctgcaatgtttaacttttcagaaagttttcatgtgttaattatcatatttaaagtttaatttgtgaaataaacacatccatttaagacaggaagtttcaaaatgtgacatcacattattaattcgctagtgtcattcaaaaaacttgacaatgtttctcatatattattttatccacttgcagcttgtttttaggacatttgttctatttttgaaaatatgtatgaataaataaaatgtttaaaaattgcaataattgtagaaacctaaatacatgtaattttaatattttttattgtactatttttaatattttatgaattatacaatagtttaataatttctgctgccttcttcaaagggttatatttgttgttattttgagacatgactatagatacattgacaattttcctatcaattaatattccctccctttgaagtttggcaaagtttgtaactgtctcaacaaaaagagtgtaatgaaaataatgcagctaaactttcaaagcactgctggaaacacagcatattctccctctgtttctctttcgcastttctgtttcttcttttcatgtctttttgtttcgctcactattactaaataactcaacctgtagtccccataataaatgacaatttgtagagagacacaaatatatgcttaaggaatcctggtagcccactagcactttgagcctttcaacacgaatctctaagtatgtaagtgaatgatcttcagataattatagacccaggcaccacagaaaagtagctacctaagaagatctgtgaaggatcacataactgagcccacctaacatacagattccgagacatgataataaaatgattacagttgttttaaggccctacatttgaaaactatttgttatgcagtgatacacacctggaataataattctacatattttaaactatacatttgtaataaaattacaatttatatatatctacataacaggaaactgcgatactacacttggaaaatatctgtaccccgaataggagagtcaatataacatggtggttaagagctggcactctggatccagatggccttgattcaagtcttagaaaccactatataacgatgtgggactggaaaagttacttgaactttatttgccttagctatctcactaaaggaatggcaagatttgtcatcacattatcaatatcatgtgttatttaaagaacaaattcattaatattgcaaagcactaacaattgtgtatacagcaaaataatatttgtactattatcat

SEQ ID NO: 94728 - DNA, 46696 bp, Homo sapiens
  misc_feature (1)...(46696): n = A,T,C or G
tctctctaattagagatgaaagtaaatatgcccgtaggcacgaggaaaggaaagaagaaaagttaaggggcatagctcaaatgatctgttcaagaataatattttttgaaatattatatattttctttaaatctatgtaatatttccttctgtattattatatttactctaaaattaaaagaccacctttaaaatgagaaacataaagggaaatatgtctttaaactgtttcaatcagttaaggaaatgcctttgcactaagtatattttaggaatttggcatgaattgaataataataaacatcagattaaactcccaaataatttcacttcctttctttgtcagcacaatatcttgagaactctggcttttatgaatatatagattaaaaattcaatattgttttcactggttcatttgtcataagaagccctaaatataaatgttcacaattttgacaattttgtcaaagactatgcgtagctaccaggtggagtccttttgggtagtttcctgatgttgctgaaaggttgtacataaatcagtttgttaattttttttagatatatttataatatttttccagggtgggaacattgttgataataacattgtttaagtgacactgtaaatctaattttgagcttcttatagtttccacagtcaactctcttctttcaaatctcttaatttgttctgaagttatgttcttatataaataaaaccatgtaggtttgcattgcagtagttgattgaaattttattttttaatgaaagctcaatatgtatattttctaaagagaaattaatttgtttccgagagtgtctgatggaagattatttttcttcatgaataaatgcgacaattccacacaaataaacttattaagctaacatcagtgtagtacagtaagtgttcaatgttaatctcattaaaaagaaaacaacaacaacaaccaggatttatgttcctttttataatgtgttgcttgattttaacacgtgtgcacatgtacacacacacacagatactacttttacattttaaatgaaaacaaataagtgaacaagaataacaaaagcctaattattgtatgagaaatttcttcattagggctttatttttgctctatatagttgagatatgcagttgacctaattactagtgtccttgcataacgacacatcttccttttctgcccagacatcatggtcgatatctgcagcatgaagcctcaccattttcttccctatgactctatgatgtaacaattcatcttccaagatgattttaaatttcacaccaagtaataattaagtaatttaaatatatttttattagaatttgcttttccttaaattcattctaaacttgattctctcttctgggttgcaaaagattattacacattgtatgcatgtattaaaacatcatagatactctataaatagtaacatataatctagtatagacccatgaaaattaaatatactttttaaaacttctgctgtttcctttaagctttgtagattgtatctcatatgctgctgctagaataatcatatatagggctttctcacaagacagatgctaaggtttcagctcatttgtatctctgtaacaataaacactacattttaaacaaacattttaattataatgactaaatttctttgaaagaatgtgatggataggatatgttctaagcacaatatttatattaactcatttaataatcaaaccaagtatgtagacaaatgggaagtgttgtgcattgttggtgggaatgtaaaatgatatagacaagtaaaacagtatggtggtttctttaaaaagttaaaaacgtaattaccagcaatcccacttcttggcacacatccaaaggaaatgaaagcaagatctcataaaaaaatttgcatactcttgttcacagcagcattattcacaataactaaaaggtagaagctacccaagtatccattttatttttattactttaaaaaaattatggtatctgtaaaatatttagccttaaaaagaaaaaagcaatcttacacaagctacgacacgaatgtaccttaagaacattatgttacatgaaataagccagttacaaaagaacaaatacagtctgattacacgtttatgaggtattttgaggaatcaaatttatagaaacagaagtacaatggtggttaacagggatcagagggaggataagttgttctttaatgggtatggagtttcagttttgcaagatgaaaaagttctggagattgattacattacagtgtgaatatacttaacactactgaagtatacttaaaactcattaagatggtaaattttatattatatgtattttcccacactcaaaaaaaggagaaaactgaaacaactgcataaagaagatgctattattcccagtggggcaatggaggcacagagaggctaaatttcctgtccctctcacaaggctggttaatgattgtgtttgggatttaaagcccaggacttgtgctatagcccaccctcttgctcactagtcctctcccactgccttcagtgtgttttcctagcttcacaagttgtgtctaggttagaataatcacattttttcactgataaatttacttaaggaagcctgaggtacaattccacaggtttccaaaatttgtcagatttcaggctgtccgaatgtattatattatcttgcctattgaattggttttaaacttacactataaaataattttcaatagcagatttgtatacacaattgaaaatataatttgttcagcttttgttttcagtagttcactactgcagaaagttgacctatacagactctatgtctatggaatgtgtcagttgactgcatgaaggttggtaggaagtggaggtggtctgtgggagccaatggctctatgcgtcatcaaaaggagaaaagaaaatcatagcttataaaatcacaaaatcacatttagaaaataaacaagttagcctagaaagctaactttctaagctagggaatctcagaaaattcaaacatttcaggttctcaatcaaagagagacagattgacatacgactgtctcaatgccctctatgtgcctgttcctgattcatttggaagcctaatgcttccccataagggcaacaaaatacaactataataggtgcacataaaccccttttgtctgtattctctctttaatactcttccaccctctttacaaaatgaaaataaaacaaccctgactggcaaagattaggaatctgttggcagcatcttttttttttttttttttgtagttcttattttattttttttttttcattgatcattcttgggtgtttctcgcagagggggatttggcagggtcacaggacaatagtggagggaaggtcagcagataaacaagtgaacaaaggtctctggttttcctaggcagaggaccctgcggccttccgcagtgtttgtgtccctgggtacttgagattagggagtggtgatgactctcaatgagcatgctgccttcaagcgtctgtttaacaaagcacatcttgcaccgcccttaatccattcaaccctgagtggacacagcacatgtttcagagagcacagggttgggggtaaggtcacagatcaacaggatcccaaggcagaagaatttttcttagtacagaacaaaatgaaaagtctcccatgtctacctctttctacacagacacggcaaccatccgatttctcaatcttttccccacctttcccccctttctattccacaaaactgccattgtcatcatggcccgttctcaatgagctgttgggtacacctcccagacggggtggtggccgggcagaggggctcctcacttcccagtaggggcggccgggcagaggcgcccctcacctcccggacggggcggctggccgggcggggggctgaccccccaacctccctcccggacggggcggctggccgggcagacggtctcctcacttctcagacggggcggccgggcagagacgctcctcacatacccggacggggcgacagggcagaggcgctcccnnnnnnnnnnnnnnnnnnnntctacctctttctacacagacacggcaaccatccgatttctcaatcctttccccacctttcccccctttctattccacaaaactgccattgtcatcatggcccgttctcaatgagctgttgggtacacctcccagacggggtggtggccgggcagaggggctcctcacttcccagtaggggcggccgggcagaggcgcccctcacctcccggacggggtggctggccgggcggggggctgaccccccccctccctcccggatggggcggctggccaggcggggggctgaccccccccacctccctcctggatgggggcggctggccgggcagaggggctcctcacttcccagtaggggcggccgggcagaggcgcccctcacctcccggacggggcggctggccaggcggggggctgacccccccacctccctcccggacggggtggctgccgggcggaggggctcctcacttctcagacggggcggctgctgggcggaggggctcctcacttctcagacagggcggttgccaggcagagggtctcctcacttctcagacggggcggccgggcagagacgctcctcacatcccggacagggcgacagggcagaggcgctccccacatctcagacgatgggcagccgggcagagacgctcctcacttcctagatgagatggtggccgggaagaggcgctcctcacttcctagatgggatggcggctgggcagagatgctcctcactttccagactgggcagccaggcagaggggctcctcacatcccagacgatgggcggccaggcagagacgcttctcacttcccagacggggtggcggccgggcagaggctgcaatctcggcactttgggaggccaaggcaggctgctgggaggtggatgttgtagcgagccgagatcacgccactgcactccagcctgggcaccattgagcactgagtgaaggagactccgtctgcaatcccggcacctcgggaggccgaggctggcggatcactcgcggttaggagctggagaccagcccggccaacacagcgaaaccccgtctccacccaaaaaatacgaaaaccagtcaggcgtggcggcgcgcctgcaatcgcaggcactcggtaggctgaggcaggagaatcaggcagggaggttgcagtgagccgagatggcagcagtacagtccagcttcggctcggcatcagagggagaccgtggaaagaggagagggagagggagagggagagggagagggagagcggcagcatcttttaagaagaaaatatgctttacatttctttaatacatttataagttaaactgatggtctaaaggaatgtgctagtttccctctggtcttcctgactttcccaggccttcataggtataactcaggggcaagagcttggtggttgtagttgtgtgtaagtttgagacgagtgctcttaaaaaatggattgatttccactcatttcttgtttatgtgattctgcataccaaaagaagaaaaaaccaagagttgtggaaatgattagagtatttgtgtttctgatgccaaagtaattaatcatttcatctttaatatgtttgacatttaatgatattagaaactcacgtttattccagatggaaacatactgacacatgcacaaacacacacaaaaccaatttttatttctgttatgaccaaaattgttagaagacattcttataagatatagagaagcaacaattttgatccactaacccttcatgttctttccctctgcatttctcagacactttgaagcttgcagagagcttaaaatctaaacagcctgtgcttgtgctgacttatggccaccaccctgaaccacttcctggcttcctggctttgctagctgttgaaacagtggaacttgcctcatgtgtgtgtatgtgtgtgtgtgtgattgtgggtgtgggtagtttaacctttttatatcttagctgcctgtaaactcagtgattgctacgttcagatcaaaccttgaacttttttttttctggtgccaggagccttcctgtgctccccattgcctgccagaaccaccaccgtttcccatggttactctacagcagcttcactgcctgaaaatgaaaactgaacaaagggattaaattgtgaggtaaaatttgcttttcaatttctttccttgaagttttgtcctatccccgcagaatattgtgtgcctcagaacaatttctgttttgaacatattttataattagaaagtcttttgcataattccaattttcttataggaaactttcattgtttatgctgtctaaaatctctcaagctttcaatgttcaattttatttttctacatttagtggaactgaagcatgcaaggaatggaggtcttctcaagaaactgtaagccacttaaagaaaaagaaatctttttcaagttttcgtttctctgctcccatccttcatccagtcctactcacatgcattcatgcacacatatgcacatacacacacctttaaggtgcactccagaatataaaatatgtcgtttaccacatttatttaagtagcttgatttgatgtgtatcagatagagctaaactttgtcagagtatgacaaatgaaagaaattgttttttctaattgatggaaaaatatagttttaatgtaaaatgactcagtttcttctaaaacaggcattgttttttatttttctcttttgttccattaatattccttaaagtcaattttagacattttaattttcagcctatggctcatcttaaataggaagtcttgagatcccatgtataatttacaactactttaaatagcctgttcctttccaatagggtttaaaatattttatgaactaatttttagattttaaagtaaatgtcattcataaatcatctttcagcatatctagtttaattatattaattatttgacatcttccagtcctcctctccatactcttctccccatataattcagaactcatcatttatccactggtcatgacgaggtaatgctgtttgatgcctaataccctgtagcttcctgaattggacacacccacttcccagaggtgactagcatatattcacaaacagctgccttattttcatcttcctactcattccatccttctccggcaacaattttacagcatgaagtgcctgacctttttgtcacgggggattttcattgtcaaagcaaaaatcccttccaatttgtaaatactcttgtttgaatgagataaatcacggacatttttgactctgggttgggcctacggtaaattttcagtatgatcacatgaacagagctgggcaaactaaagtccattcctgggttgccactccctttctgtgtttctttgagcagacgctctgaagatctgtttcctaatcttatccacaaaatgcaagtaagacttatcatttcagggtaggtaatgattagagatcatatacatgaagcacaatcagtacaatttgttttaaaagaccctgaattcattttgattaaatcatttacttacaccctgtatcattagataattaaaggtagtttaaagtcatttgctcaagttttaagtgcaaacaaattagttgaggatcttactaaaatgtagattctgattctgggttgaaacctgagattccacatttccaacaagctctccgttaaggccaataacacatggggcttgtacatggactgtaatttgaatagaaactgtaaatcaattttatgcatataaaagaatagtacaaattaaattaagatgaataaataaagaaaaggcaaaggatgaaccaagacatgaaatggaaccagaaatgatgctataaatatataatataagctacttgctacatggggaatcaatttgtctatataattttagcagacagtatgaaaagggtatcagctccctcaatattcattcacttttgcataatatgtgtgcattataggagttggtaagtaaagttatactgctactaaacattacattctggagccgatgaatagagactcatttatttttctcaattaattcagaatagacaatttttgaaatgaggtgtgccattgatatttccctttagataatttgggaagaaacaacttgctaagaagttaataaaataaaatgtttcagaaagagctatttcattcatcatgtggaaatcaagtctaacatctgaatgtactatgttgacttctgtggactctgattcctttatatccaaactgagaaggggcactattctcaagatatcaaaagattctgggtgagaagtggaaatctcatcattcattcatttcttcattcaatttattcaataccaacttcatcccaagtacactgcttacagacttactttcttttctttcaacttcctccttctgctgacttcttgaccatccacattaattgttcctttcttgagctgctaacatgttccacagtatttcatgctggagaatcttttctacaagactatctccactaacaaagtattgcaaagactacctgacattttactggaaatggaggataactgagaagcatatagaagataaatattgaatataattttcctaaaatgctccattcactcagctgtcattggcatccttgccccagggtctcacatgctctaaacttgattgtgtctaatctattttgagactgctyctccattaatatcctctatttcaggtttttgaggcctgcaactccattactcaataaacagtatgaaaatgcaaaattcaacttattttattaattttcactctatttgtagcataagatgctacatgtttcaggacaaacgtattgttgaataatgacttttactggaaaaacaaaatgacacagcatttttmtgtaaaacccatgaatgataacatataaaaatatgttacgtaatacacatcttacaatataaaatgaaaaaatatttgcccaaatttctccctcctagattttgtgtgtgtgtgtgtagatgggggtagtgatggtggaggagttggctttgagatacaaggctgttatactaacatgtttttcctagtcaaaagcatacctctttctatacaaattaacattaggtaaactagtttaagctccagctagctgttaaattattgatttttgtttgtgggtccacaaattacttacaaaatatttaccagaaactattatacttaatcaattaagaacctctgattggcaatctttaaagttattttactagaagcaatgcgatttcatctaagatattatgcaatttatgctgcaattagttcaaattctatctatacaatagtaaacatgttatatgttattaaattaacagatcttaagaaataaatggaacatcgattatgaaggaatctataaattgtaaaataaataaagttgatgtaaaatgaaaaaacattattaaaagcaaggctatggttttacttacaaagttcagtggaaatagtggaaaaaataaataataagtagctctttgtgatgccaattttatgtgtccaattgatggggccacaggaaacccagatgtctgatgaaaaattactttgtgtgtgtgtgtgtgtgtctgtgtgtgtgtgtgtgtgtgtctgtgagggtgttttcagatgagattaaaatttaaattggcagattgagtacagcagattgccttccctaatgtgaatgggactcacgcaatcagttgaaggcctgaatagaaccaaaagggtgactctcctggaagtaaagaggaattcttcctgtctgactgcctttgaacacatacatatatgacattattttagaggcaggtatgcaggcatattccaggatatgtagggtgacctggaaaactggagacccagtagagctgatggtttagctctagtcaaaaggctggcaggctggagatccaggaagagcaatgcttcagtttgagtctgcaggcaggaataaagaaacaaacaaaaaacaacgatgttttgattaaagctcaaaggcaattaggtagaaggaatactcctaggagcatcaccctttttgttctactcagacttcaactaattggctgaagatcacccacttaggcaggacaatcactcagtctaccaatttaaatattaatctagtcctaaaacaccaatacagaaacactctgagtagtgtttggccaaatgtctggggactccttggcacagtcaggttgacacaaaaaattatcaatgacagcttctaatcaagaagaagttaacaggaacaccaagcatccaataaaaaattatcagacatgtaaacaaggagaaaaagcctaccataatgagaaaaaaatcaatcaattgaaaacaacatagaattacccagatgttaaacaaagaaaaaaatcattataaccgtacttagtatgcttaaaaagttgagaacaaaaaaataaacatattgaaattgaacagccagagattaaaactacaaagccagagataaaaatacactggataggagtaaagacagattaaacattgcagaagaaaaggttagtaattacaaagacatagcaatagagaatatcccaaatgaaacacacacagagaaaagctttttaaaaaactaaatagataatctctcagctgtgggcaacttcatatggcctaatatacatgtaattatagtctcagaaggagagagagatggaaaaaatatttgaagaaataatggctgaaaattatccaaatttgatggaaaccgtaaactcacaatttcaagaagctcaataaagctaaaatgtatacgcgcgtgcacacacacacacatgaaaataaccacacctaggaacattataatctacttgctcaaaataagtgataaagaaagaaaccttagaagcacacaaagaaaaaggatgaattacaaactgaaaatcaaaggtcagaatgacagcaaattttctgtaaggaaaaatgacgtgtagctgaagtcttaataatgagcagtggatttattttgccttaagtcagattgttcagattgtttttgccatatttctgtgaaacacgctttttaattcaaagagagatatgcagtttcatttctttccaaaacttccactagagacctttgtcctgcttgtcacagagccagttactgctcttgcaatctactgcacctaatgcccacaaaatatgccctttgtacttagatctccatgtgcgcagaaygttaaaggccaattttactttgtgacaaattgcagtgtcttaagaccaacattagttactcagattctgatttttattctctatatttctccagaacaactgtcaatctattatatatttgtacaatctggtattaaaatgctttccccaaaagatattctgcgaaaagatctgaagttggtccatggttatcccatgacctgtgcttttgcaagcaactgggaaaaaattgaacagttccatagcagaccagatgacattgtgatagccacttatcctaaatcaggtgagttctgtggcctgacaaattcaagtccgacctcattttttgtttcctggaaatcaacttgtccataaaatcattancattctaaataaagttaatattcattttgtgcagccatctattttagtatattaaaattggcatttggtgcatagaaaggggaattaagtttgtaatagaatgtgttaagatggtagtgtttccaataaattcttctccctctcccgtgcaatttgggtaattattttgaaaatgttgccttttgtcacaggtactacttgggttagtgaaattatagacatgattctaaatgatggagatattgaaaaatgtaagcgaggttttattactgaaaaagttccaatgttggaaatgactctccctggattaagaacatcaggtaaatttaacccacttggaattattattttgtaatattatttagacagcatatgcattattgtatgtgtgactttcactgaaaccggagtagatttggtgacataaaatggaaggtggcaaacaatataaaactgaagaataagaagaaactttatttttatctgttgtacatccaggtatgatatcaaagatgaaagagtcttactgtacaaaacaattaaaaatttgattgataaaataaacaatatttttaagacttttatttggtagaatttgtctgattagattagtaagttcctaatttaggactttgttgtaattaataaataagaagcaacttttcttaaaacataaaattcactaatactattaatttttcttccacaaaatatttatggaatgcttgtaaagaattattcactgtgctatggtatagatatataagattagaaattgtatattgtatcacagggagcttacagcaatattgtgacgtcaaaaagtaaataacaatatgtcaatgttcatartcttacatagtcaaataatagggttctgtggaagcgaacaataggaaagcttactttaagtgggtaataaaggaaaaaaacttagacaaattaaatgagtttaattgagcaaaggacaattcacaaatcaggcagcctcttgagccaaaatagcctcagagattccagaatagctacatggtttatggaaggaaggaatgtgacatacagagaacagacttgagatatagaaacagctggyttagttaaagtttagtgtctgacttatttgaacacagtctgaagagctggccacctttsattggccaaaacttggtgattcgcacaagggtagaatgtaatatgtttacacatccagttaggttacaattcactatgtatagagaaacctttaagccaaacttaaaatgtgtaagatgacagctttagtctaaacttaatttaacaaggggtatctactccaaattgagattaaaaagttgtacatacttggggaaagaatatcccaggatacagtcctggaaagcatattccaggaagatcttgatatagtccggagactaaaatgatccatgaaagaaggaaaaagtgggatgcaaaacaattggaaattaggctaggatagaccatgtaggacttgtaattcttaaaacattttctcattttattccaagaacattgaggaagatattgaagggttttatgcaaagaaaaattatatagagtttttgttttttgttgttgttttaaatacaaagactccacaggttgcttggtagaggtggaattgaggatgctagataagacatatttktgasttgttgatggactgtaaaagaaatatgaagaaaatgaaagaaaaatgacagttttatttttcatcaagcaagtggactatggaaccattcgcttgcaaggaaaagtacttggagaggaacacatttgggtgtagggttattaataattcaattgtgaaatgttagctttgtgacattggagaaaattataatgaattaaaatgatggtatttggagcttgtaaaaatatattcattaggcaatgctcagcataattggacattggaatcaatgtgactgcccaaggaaagcctgtggagctatatgagaagagaagcaatgagctgtgaaaaacatcaacatgcagaagttaggtgagaaagagaagctagcaaaggaaactgaaaaaaaatgagctaacagggaatgcaagagtatggtgttctgtaagtaaatgagaggggtattcaagaagtgaagcttgactttcaaatgctgctggaatcctgggaaacaaataagtagtaggatagtgatagacctgtatgccaatgtgaagagaaatatccaaatcctcttctataatggaggtgcccctcagcaggctgactgaactagttacttccgtaggcagagacggatcaactggcaagatgtcagtccttctatgtcattgccagaattcagacagcaaatgccaatttttgttttgttttgtttaaaaaatatattcaatttttcaaagttacaaatataaaatcccagttgtttcctaagccattaagttcagcttataaatattattattttacttatataacaaaaggagtttaatattcaatccaagttttatttaattaagctcctttaaacacttaagtggcatttatatattaatatatttcatttccttgagtacttaatttatctgaccaagacaaaccttcccaagtacttatagtccaataaattaagctcataaatacagcaaatcttagccattttaaatgttccaaaactacatagaaacttagcaatgattccaccactgtactccagcctgggcgaaagagcaagactctgtctctaaacaaatttaaaaaagaaaattagacacttagcaagatttcaacttaaaattcaagtataaatactcaacattttttacttagcattacaaagcaaatctgttactctcacaaagttgttaatcttacatttgtcaaggacttaaaatgcaaactgcaaagtttcttaaaacaaatggttatgataagatgttcttaaacatgactatgttatgtcttgatgttcttaaacatgcctatccttggaaagcttggaactgagggattatgctggggcaaggaaccaaaatgagttcaagagggaggcaagacttcagaaccatagaaagtatgaaatgaaaaagtgacagaaccaaagtaatcagagacatgggagtcagggataacagatggaaggcaggattggggatagagagggaggatatgcagcattgcctgacagtgaatggctgaagttcatcaggtagatgagggtaaactgcagcatttaaatctactctaggccgggcgcggtggctcacgcctgtaatcccagcactttgggaggtcgaggcgggtggatcacgaggtcaggagatcgagacagtcctggctaacacggtgaaaccccgtctctactaaaatatacaaaaaattagccgggcgtggtggygggcgccggtagtctcaactactcgggaggctgaggcaggagaatggcgtgaacccgggaggcagagcttgcagtgaactgagatcgcgccactgcactccagcctgggcgacagagtgagactccgtctcaaataaacaaacaaacaaactccagagcctgaatgtggataattttgttgtctttatacattgctaacactcatacttgtggatataaagggttcattaaaagactcacttggcaaaatgattgcaaaataggggaaattgagaaatctttcagggaagctgaatgcggaacaaggaacaacagatgtgagaaaaacttcttaaaagaaacagacataagttcatctaatggrcattaagtaataacgagttgtggaggattacaatttctcatttttatatgctgggtaaagtgactgtagctgctagatcagtagaggcatagtaaaatccctgatggagttgtatagtaatttatgtttacagtcatttatattggcaaataaaatacaggacaattaattaatttcaaattcagataaataaccattttattaagtatgtaagtactttccaaatgttgtaagggaaatattcttgctaaaaacaacctatttatctgataattcaaatttaacttggattttcacattttttaatttcctgtatgccaaacctgtgtctactgacattaaataggcttcttcatattaaccatgtgctagtcacggttctcgatggacatttatttatgaacaaaacaagttacatctctgttcttatgaaatctccattttagtctaagtttaggagtgaggttggggaagggacatggggacatacagtaagcaaacaaataagtaaataaactatgaagtcaaaatgtgtttcatagaacattaagagaaaaatgtaataggctgaatgacttcttagcatatgcagtgaattactgtgaacatttaaaacaaagcattgttttcaaygagtgagtcagatgcaattttgtgtgggtttgcctttctattcagagatggcaagattatgtaagattatcaggtattctagagtttagactgtatataagtaatactgtggaacataaaagaatgcataagaagtttatgtatcatctatcttaagaccttaatttgaaatcaagttctaccacatatttgttgtatgactttagagagttaagctaatatctaaagattacacatttttactgtctatacatatatggagagacatatgacacatataggatataatgaaaatatagataaaacagctgatattatatacaaagttaacatcatctatgctacagtacctaatacaacacgatagccagttttagacttactagttattgatacctctttggcatgaagaaaacatttaaatagtcatttatagcaatgcacaggtataataaaactccaaattattaaagagggtattattatctctccttttggagatggagaaagtgaagtacagagattctgagatactttcaaagtgtctcacaatgcttaagtgatagagttagcatttgaactcagggtggctaacctcagaatgtgtatccttgaatgttacacaatactgactctagtaatgtggtgaaatgcctgtgattgtttcagaatttatctgcattacataatgctcaaaaatgtcttgaaaaactggttggcaaaataaggaaacgtagcctttctggagactctaatatttccctatacttaactaaatttctcaggtatagaacaattggagaagaatccatcaccccggattgtgaaaacacrtctaccgactgatcttcttcctaaatctttctgggaaaacaattgcaaggtatactccagactccatgtcagttttttagtatggccctatccctttacccactcacatagtttattttttaaaatattttttgtttctttaaccatatacttgcaacaatctatactatacccactcaygttgtacgtaaatcttcaaaagccattaagttttagtctgagtttatatactcaagttttccaaacttgagcagcaacagaatccaaacctcagcacaatattactacttttttttccaactctccctagatcttcaggccttctgtaaaaactgaacttaaggacgttagtccttatttgaagatttggtataattctttgttgtaacatttgttcctgcttatctgcttttggggaaattttatacttcaaattctatttatttaatagctacagtgctatgtagattatgtgtttttttcttatctgacttttgacaatttgtgatgtgtgagaaacttttctaagttgttgactttatgaatgaaaagttgttaatattatactcattattattttaacggctgcaggatttgttctgataccctgttttgttcctgatctcagttatttgtgccttctccttcttttttgtccctcttaagtatattaattttattgatattattaaagctagtttttcgttttatcaattatttctgttgtttatctgtttttagtatcatagatttctgctttttttctctatcgtttctctccatctacttactttggatttattttactcttctttttctaatctctttaagtaggaactgatattattgatttgtttctttcctattttctaaaataagcctttagtgttgtaaatatgtttcctcagtaaagctttagttgcatcccacacattttgatatgtcatgctttcaattgcactcaatgctatgcacatttttattttatctgaaatttcctcatttactgcaagattttgaagtgtatgatttaacttctaagtgtttgaggatttttatgttttcattctgttattgatttctaattttattccgttttagtcaaagatcatactctacataattgcaattcttttaaatttcttatggttcatcttgttctatcttgttaaatgttttctgagctcttgagcaggttgcatattcttctttgtaggtggatgtattcyctatatttttattacatcctcttgaccaataatgttgttcagttcttttatatcctttcttgttttatgtctagcagttctatcaattgcctgacagtggattgtaaacatgctcaactatgactaatgatgtgtctattcttacttcagctttactggttttcatttcatgtattttgaagttctgctgtttgctgtttggaattcagaattgctttatcttcttaacagattagtccttttgtcattatgtaatgtgccttgtaattttttttccactgacgtctatcttgtcttgtattgatatagccactcctagtttttactgattaatgtttgcattacatatattttttgctacccttttactctcaacgtatcattgtcattttgtttgaagtgtgtcttttgaacagcatacagctaagttctgttttcatacactctgccaatttttgtctttagattcatgtgtgtatattatatacatttaaagtagttatgggatagagccaagatggttgactagatgaattctggaagagcttctccccctgaaaaagaccagaatatcaagcaggctggcatactccaaaaaaatctttggataaaaggcattaagggtgaatagagggagaatgcagaccctggagctaaaaggggaggaagctaggaatccygcataggtttgctgagcaccatgactcattcctggccccgcacagctcctagagaaggagtgagtgaaacagacatggaacagcccactcttaccatggacctccaggatcctagctgcaggagactccttgatgcccagagacattttagctggcagggagaacttcccagagaattggcagagacagtactctacgctgtgtggagtccagagggtttggtgcaggaatagctgcagtggaacatggccatagatgcccatcccccaaggctctccatatttctttaggtggctttagcttttgctagctcccaggtctggagaaagcaggcctgttttgcacataggcctgggccagtctgatctgaccattcctctctgtgctggcttctactagggcccctgcatagccacactggcttagtgcacagcctcagctgccctgccgaagcacttgccagcagccgctgtcatagttcttcagccagcagcccctaacttccagttttttgcccagttttttgcttttgcatatggatccctactggtgcagattcactttcagtcttctcccaccagtgctcagtaacctgcagcctacccctgctaccctgtgatcaagtgtttgcccgtgactgctccatcgctacataagtgcctctggctccctgcttccatgttggattacactctcccatgtcatctccaatgctccgctgaagcacttttgccagcatccctgattggaatgttgttgccagtagattgggaacacatcagcacctctggtagagcaggtgcttgacctcaaggggccagagaacaaagcaaaggttctcgctctagccccgtagagacagagcayatagccctggagtgctgaattaagccttggtcccctaaaagcatccaaaaaggaaaacaatctaataaacccaaatttacactacagtcaaaacctcaagggcaacaaagaatataaaagcaaaaagcaccatccaaagaaaaggaattttaaagattaaagaaacattagctgccacagatgagaaagaaacagctcaagaattctggcaactctaaaagccagagtgtctttttgcctgcaaatgacctaactagcttgccagcaatggttgttagccagattgaaattgttgaaatgacagacataaaattcagaacctagatgtcaaggaaactcaatgaaatatagaaaaaggttgaaacccaatccaaggaatacagtaaaactgataaagagcagaaagaaaacatagacacrttgagaaagaacaaaactgaacttctggaaataaaaaatgcactaaaggaacttcataatacaatgggaaacattaataatagaatagaccaagctgagaaaagaatatcagagatggaagactgttcctttgaatcaacacaggcagacaaaaattttaaaaaggatataaaaaatgaacaaaacctccaagaaatatgggattatatagacaccaaacctgtgactcactggaatttctaaaagagatagagagaggcaattaacttggaaaacatatctgaggatattgtcaataaaaattttctcaaccttgatggagaagtcaacaygcaaattcagaaaattcagagaaccccaaaaagatattacataagacaacaattcccaaaatatagagtgaaagaggatcgccgaggtcaatgtgaaataagaaaccttaaagacagctagcgaaaggggcaggtcatgtacaaaggaaacctcaccaggctagcagtggactattcagcagaaatcttacaagttggaagagattgagggcccatattctgtattcctaaagaaaggaaattccaaccaagaatgtcatatccagtcaaactgcttcataagtgatgaacaaatgaaatcctttacagaaaaggaaatactaaaggaattcattctcatcagacttgccttcctagaggtccttaagggagtgctaaacatggaagcaaaagacataccaactaccacaaaaacatacctaaatacacagaacattaacactataaatcaattacataatcaagtctacataataaccatctgacagcacaattacaggatcaaatcttcacatatgaattttgatctggaatacaaatgggctaaatgagcaacttaaaaggcacagactggcaagttggataaagaagcaagacccaactctgctgccttcaaacttcaagagactcatctcacatgcaacracacccatagtctcaaagtaaagggatggagaaatatatatcaagcaaatagagaacaacaacaacaacaaagcaggagttgctatttttttcagacaaaagagactttaaaccaacaatcaaaaggacaaagaataatattatacaatgataaaagattcaattcaacaagaaggtgtaactgttctaaatacayatgcatccaactttagagcatctaaattcataaaactggttcttatagacctacaaagatacttacataaccacataatattagtgaaagacttcaacaccacactgacagtgtcagatcatcaaggcaagacactcaggacttaaactcaacacttgactaaatgtacctaacagacatctacccaacaacaaaatatacattcttctcatckgcagatggcacatattgtatgattgaccacatgctttactcagccataaagcaattctcaataaatacaagaaaaccaaaatcataccaaccatactctcgggccacagcataatakaaatataaattaatgccaaaaagccctatcaaaaccctacaattacacagaagttaaatgacctgcccctgaaacaatgtaaataatgaaattaaggcagaaaattttaaaaaagtctttgaaacaaatgaaaacagagatacaaagacacaacatatcagaatctttgagacatagctaaagcagtactaagaaggtttatagtgctaaatacctacatcaagaagttagaaaggtctcacattaacaacctaacattgcacctcaaggaaccaggaaaataagagcaaaccaatatcaaaagtagcagaagaaaagaaataacgaaaatcagagcagaactgaatgaaaytgagatgtgaaaatccagacaaaaaaatcaacaaaaacaaaagtttgttttttgaaagaataaataagatataccactagctagattcacaaagaaaaaaagagagaagatccaaataaacacaagcaagaataaccaccaacaccacaaaaatacaaggaacctgcagagactgctaggaacacctttatagtccagagtggctgctgccatcacatcggctgcagtggggagacatgggtggtggtggcaggagcggctgcaggaacagcaaaggcggcagtgggacccctgtgccccatgaccccatagcagcctactgcaccacccttacctttgcatggccgggcaggacccacttccaggtccagagcctccactgtgtcgggttcctttgtacaaagttggccagggccgctgcgcctccgctgaggggaaacacagagaggagacagtcagtccttagagtccacccctggcactcccccgagagcctgctgccctggtatcaccctgctaccgcaatgaggccgcacccagtcacccgccaatgggggagcagcgtggttagacatggagggaagggcatagaggggttccaaggcagagctgggcccagggtagtgccctgctccacgaagccagcggaagcagggagcaggcaggagccccaccctcctgggcacagttacagcagcgcaagtaatggctatggacccagggctccctgtgcttttgggggccaggagcaggcaggagcactgccttcctgggaacatctgcagccacccatgcgcagctgttgacccaggcatttctgcaatctaggaggccaaggaaggcccccaccttgttcccacaggctcagaggtgtctgctcccactatctggccactacccgctcgcggaacacactccaatctcggatcatggttgacaccaagcccgggtgctgtcatagcccagttggatgtgtgcacacttgggacagctctgacacaccagccccctgggtcccctctggactttgggcacccagaacacaggaggaaagccgagggactgctgagggcaggtcgaagctggcctgcaggcaacccttggcagtaacagccttggtgctatgaagtgtggtaggtggtagacaggctcctgggcagaagggggtgggtcccgggtgaagccccaccttcaagctggggagggcctgaagcctgggagctgggctgctggtcctgtggaccagaatgggaacttgtggtgctttttctgggcccacccatggctgcccatggaccaatgggactgcacttcttcccctctgaggcccataaaacgtcctagactcagaccagaagagatgacgggaggaccagctacagagagaagctactcrctccagggtgccctctttgctgagggctaaacactcatccagaaaccctgactaccatgctcaataaagctcctcttcatcttgctcaccctctatttgtttgtatacctcagtcttcctgaatgcaggacaagaacttgagacccgctgcatggcagaactgaaagrgctgtaacacaaacaggcctgaaacacacaccttgctcaccaccttgtgtgtgacaagaaagacagaagagagaaagagagaagacctgtggcccttcaaggagcccaaacctaggagctccctgagccagggttgtgacaccctctttagggctctgtggttcctggtgtctccaagcttctgggtgccactgtgttcctcggtatcagctgtggaagttgtttatggtgtgcctggtccagctgcagccttgcagagagctgaggccatgaggctggggccatgctggtgcctggagctgcccaccgcaccgcagctggcaggccgggctctgcgcaatggccagactacaggcttgctcacacacccattgctgctccacacatggctcaccctcggcaggcatgagatccaggctggtagcatgagccaagtgcagcctgcaaggctgagtgatcggagcaagcccagagggccagagcaaaccttggacaaaggcgccactggccacagaggtttccggctggtgaagcaaaaccccaaggatctcataacactaggattgaaacccccataaatttaaatcatgaacagaccagtagccagtcctgaaaatgaattagtaataacaaacctactaatctatcaaacccctgggccagacagattcacagctgaattctatcagatgtacaaaaaaagaactaataccaatcctactaaaattatttcaaaaagtcaaggaagaaggactcctcacaactcattctatgaggacatcatcattctcataccaaaacctggaagaggcacaacaaaaaagaaaacttcaggacaatattcctcattgacatagatgctaaaatcctcaacaaaatactagcaaactgaatccaggagtacatcaaaaatctaatccatcataatcaagtatgctttattcccagaatgcaaagttagctcaatacatgcaaattaataggtgtgattcatacagaaagtactaaaaacaaaaaccacaaaatcatttcaacaaattagaaaaaggcttttgataaaacttcacatcccttcatattaaaaaccttcagtaaactaggtattgaaggaccatacctcaaaataataagagcagtctatgacaaaccaacacactgaacaggaaaaagttaaaagcattccccatgagaactggaacaaaacaaggatgcccactttcatcactctttctcaacatagtacaggaagatctagctgaagcaatcagacaaaagaaagaaataaaaggcatgcaaatagaaagagaggaagtcacattatttctcttcatagtcaatatgattttttagctagaaaactccacagtttctgcccaaaagcacctaaaactgttaagcaacttcagcaaactttcaggataccaaatcagtgtataaaaatcagtagcatttatatatgccaataacgtccaacttgagagccaaatcaaaacgtaatctcattcacaatagtcacaaaaaaataaaatactaggaatatagctaatcaaagaggtaaaagatctctacaatgagaattacaaaacatggctaaaacaaaccagaaatgacaaaaactaatggaagaacatttcatgcccatgtataggaagaaccaatattgttaagatgaccatactgcccaaaggaatttacagattcaatgttattcctatcaaattactaattacattcttcacacaactagaaaaaaagctattttaaaattcatatggaacaaaaaaagaacccaaatagctaaggaaaccgtaagcaaaaagaacaaagccagtggcatcacaatatccaactttatactacaaggctgcagtaaccaacacagcatggtactggtacaaaaacagacacatataccaatggaacaggttagagagcctagaaataaagatgcacacctacctacaacctgctgatcttcaacaaagttgacaataataagcaatgaagaaataactctattcaatcaatgatgctgtgataaatgactagtaggatgaagaaaattgaaactggagcccttattaccatatacaaaaaattaactgaagattgattaaagacttgaatgtattaccaaaaactataaaaacccagaagaaaacttagaaaatatcattctcgctataggctttgaaaaaggtttcatgattaagactctaaaggcaattgcaacaaaaaccagaatgttgaagagggacctaattaaattaaatagtttctgcatagaaaatgcgagaaaatatttacaaactatacatctgacaaagatctaatatacagaattataargaacttaaatcaatgagcagaaaacaacccaattaaaaactggcaaaagacatgaacagcacttttcaaaataaggcaattaaaacagaattaccatgaatcccagcaatcctattactgagtagttacctgaaggcatataaattgttctaccaagaagacacatgtatttgtatgttcatcatagcactagtcacagtagcaaaggaatcaacctagatgcctaatatggttttgttctgtgtctctacccaaatctcaccttgaattgtaataatcctcatgtgacaagggcaggaccaggtggaggtaattgaatcattgggttggtttctctgtgctgttatcatgatagtgagtgagttctcacaagacctgatagttttataagtacctggcatttcccttgctaaaactccctctgtcctgccaccctataaagaagatacctgcttctcctttgccttccaccatgattgtaagtttcctggggcctygcaagcaataggaaactgtgagtcaactaaacttctttcctttataaataatccattctcaggcagttctttatagcagtgtgagaatgaactaatacagtaaattggtactgaggtagtggggcactactattaaacataccagaaaatctggaagtgactttggaactgggtaatgggctgaggttggaacagtttgaaggactcagaagacgacaggaaaatgtgggaaagtttggaacttcctagagacttggagggctcagaacactggaagatgtggaaaagtttggaacttcctagaaaattattgaatggttttgaccaaactgctgatagtgatatgtacaatgaagtccaggctgaggtggtcttagatggagaagaggaacttgttgggaactggagtaaaggtcactcttgctatgctttatcaaagagactggcagcattttgcctctgccctagatatcagtagaactttgaaatttctaagtggcaaagcattcaacagaaagcagagcataaaagttggaaaatttgcagcctgatgatgcagtagaaaagaaaaacctattttctggggagaaattcaagccagttgactgcagaaatttgcataagtaacaagaagccaaatgctaatcacctagacaatgtggtaaaggtctccaaggcatgtcagagacctttgcagtagcctctcccatcacaggcccagaggcctaggaagaaaaaatggtttcacaggccagacccagggccctcctgctatgtgcagtctagggacttggtgacctgtgtcccagaccttccaactgtggctaaaaggggccaatgtacagcttgggctgtgtggattctgagggtgcaagccccaagctttggcagcttccacatggtgttgagcttgtgggtgcactgaagtcaagaattgatgtttgggaacctctgcctagatttcaaagcatatgtggaaacacctggatctccaggcagaggtgtgcttcatgggcggasctctcatggagaacctctggtagggcagtgcagaagggaaatgtgggattggagcccccacacagagtccctactggggcatcacctagtggagctgtgagaagagggccaccatcccccasaccctagaatagtggatccactgagagttgcactttgcacttggaaaagctgtacacactcaacaccagctgtgaaagcagccaggagaggggctgtaccttgcaaagtcataggggtggagctgaccaaggtcgtgggagtctacctcttacatcagyctaatctggatgtgagccatggagtcaaaggagatcattttggaactttaaggtttattgactgccccattggatttgtcttgaatggagcctctagccccttttgyttcaaccatttttttcccatttggaatgggtgtctatacccaatgcctgtactcccactgtatctagtaagtaataactgactttcaattttacatgctcayaggcagaagggacttgccttatttcagatgagactttggacttggacttttgggttaatgctggattaagttaagactttgggggactgttggaagcacataattgtgttttgaaatgtgaggacatgagatatgggagggaccatggcagaatgatatggcttagctctgtgttccyacccaaatctcatcttcaattgtaataatccccatgtgtcatgggagggaacaggtggaggtaattggatcatgagggcagtttcccccatgatgttctcatgatagtgagtgagttctcagaagacctgatggttttataagtgtctggtgtttcccctgcttggactcactccatcctgtcaccctgtgaagaaggtacctgcttctcttttgcttctgccatgattgtaagtttcctgaggcttctccagcaatgcagaactgtgagtcagttaatcctctttcctttataaattatctagtctcacacagttctttatagcagagtgaaaacttattaatacaatactcattaatggtggagcacataaagaaaatgtggtgtgtatacaccacggaatactacacagccataaggaaaaggaaatcatgttttctgcagcaacatggatgcagctggaggccattattctaagcaaattaatttaggagcagaaaatcaaataccatatattctcacttatgcatggaaggtaaaccttgagtatacgtggacacaaagatgggagcaatagacaccagggtataattgagggtgaagggtggtaggagggtacaagtcaaaaaactgcctatcaggtaatatgctcactacctgggtgacgaaatcatttgtacacaaaaccccagtgacacacaaatatgcaacaaatctgcacatgcgcccactggacctaaaagttaaaaattataaataaataaagacattattggcattttaggacttatatttatcacgttatttgtttgttctttyrtatctcgtttattttctttttcttcctttccttggttgtacctaaacattttggagttcatttttatttatttataatatttttgaatatatttttgtatagttttcttagtgattgctttagctattgccataaatatacataattcatcacagtctaatggtgtcaacattttctcactttaagtgaagtgtaaataccttacttccatttaggcccctttactatctccgtattttcaacataatggtcccaagtgatcctgtacataaactgaacaccgcatcagataatgtaacttttgcctcaattgtaaaatatgacttaagaaatgcattgggtgagtgattagctactatgtttacttctatttttacccattctctttttctttttcttttctaaagttttcatctttctactgtcattttctttctgtttggagaacttcccttagctatttcataagataggtctgctagcaattgattctcttagttttcctttttctgagaatgtcttttttcccttcttgagtgagaacagttttactggatacaggatttggaattgacaatatattactttctgcacttgaaaaactattgtgctatttccctttggccttcatggttttagatgagaaacttgtcatttgaattggtgatttttattatrcaatgtgctgtatatctggcttttttttctaagagttttattcatctttaaattttagaagtacttttatgatgtttcttgacatagttttttttttcctttttttgagttcacacaacttcttagatatattgatttatttatttcaacacttatgggaagtttttggtcaccaattctccaaatactgtttcagttccttactcttccacctatcattgtgtaactctaaacatacaaatgttaggccttttgttattgtcccacaggttcctaagtttctctttattgtctttattctattttctctgtgttgttaacattgagtaaattctattgatatacctttatgtttgctgattctgtcctctaacactgccattacactattcggtccatctagtgatttatttatttatttcagttattatacattgcagatctataatttccatatatttaactttacaaatataactccaatttcttttctattttttcatttattttaaattttttttcaatttttaacttttgtgggtataccatatgtatatatatatttgtgtgaataggagcctcataactcagactggtaccttatcccactgtcgctgagctggtatccaagatgtaagacgaagtcctctttgctcttccctctcctctgctcaagtggaaagtagggatctcttttgaatccaccaactgtgcagcctggagtctggggaagggtggcacaagcagtcccttagtcttgtatgtctcagtgtgtcttgtaccctccaagtccactggctctgaggccatctcagcactagaacatgtctagaagtatgtggtttagactgtctttcaagtttatttacaggtgcagagcactttagcctatggtggtgaggcttgctggaactcatatttctaccactgggacgtgtgattcccctctagataggattggtctatatgcttccttcatggaaggctgtcagctgagttcagtctagttttgctttccactgtgacagggcagcactgagttcaatgcaatgtctcataattgctgtgctctccctctcccaagtgcacagattctcaccatgccacacggctgctactaagggttgggggaggcatggaaatagcaattctaagactgtctttcctatcatcttcagtggctgttttagtgatatgaagttaaaactaggtactgtgagtgctcacctgatttttggttctcatgaaggtactttctgtgtgtaggtagttggcaaatttgatattccttttgaggtgtgggggatgattggtccaccctccaagacaacttgtaatggaatgttgacgcttttttatgatagctactttaaatctttgtcagataacttaacatttgattcatctcagttttgtttttcttgcttatttgatttctggggctgctggacatactgtaccatccctgctgatgccacataaaaggagtataaggtactttcctggacttcccrctcttgttagctgactttttgaaaattggagagaagccttcrggcctgggagaaacagggcttctctgatgtcatcactgtgaatgggtgggactgcttataaagccccgtttatatcgcaggagtttgaatgkcccagtacttcattgccattactggcagtgagttagctcacctacagagacccgggtgtggagcagagtttggaattctccactatgtctctgttgggcttcctctttcctaatcctttgaccagggagagcaggtttttctagatatttttttgtttcgtgtatgcctgtaaatggttccaggtcacagtcctttttgctgcccaatccaagagtatataggagataaaaaggacacctaggaggaactcaccacattggcattactcagctctttgtccagtatgcttttggagttcttgtatcattgtaagttgaataatttccagggctttagtgacattaagaatacaaaaggccgggcacgatggttcatgcctgtaatcccagcactttgggaggccgaggagggcggatcatgagctcaggagatcgagaccatcctggctaacayggtgaaaccccgtctctactaaaaatacaaaaaattagccaggcgtggtggcgggcgcctgtagtcacagctactccggaggctgaggcaggaggatggcctgaacctgggaggcggagcttgcagtgagctgagatcgcaccactgcactccagcctgggcgacagggcgtctcaaaaaaaaaaaaaaaagagtagcgaagtagaaaatagtgagtctataccttctagtttctgaactggatgcccccaaacttattttaatgccttttaatatctttaccttcttttcctttctatatatttttatcagcacctaatatttttctcggtatttcactggtagaagtgaaaagtgaaaacttttatttttttcccacaattttgttattttcaatttgctggtattctctttagtcacagtgtcattttcttgataatgtgtgttctaggaccttgcagatcttccagaagccacagtggtctattaatgcttcacagtgtcaagtggccagaaactgaaatctttttttcaaaacstctatagctcgatggttctaatctcaaaaatgcattgctgtattgaaaatcacttgaattgattctatattttagctgttaatagaagggcctccctggcccacaatttctatttgaaaaagtactctgcttttttacatgcgtataggttaattttttcctaaacaaaatgtcttttatcttatttttttctcctacccccaccccccactgcagatgatttatctggctcgtaatgccaaggatgtttcagtctcatattaccattttgacttaatgaataatttacagccttttcctggtacctgggaagaatatctggagaaattcttaactggaaaaggtatgtggactttatcttaaaattgataagtattttttattttaataatactattaacaataacttttatgactttcaaaatacttatttttccaatctagtgaaaagtatgttcaaatattatctaaaaaactaaatctaatgcatctaatatttttactatgaccttcaatttataaaactagtattaatcattggcatacaaaagtattctataatctgttctcagttgctagaagtccattatcagtctctcctcacaatagacattgtttaacttgcttaagcaattagttagatctgttaatgcatatgtcatatttatagtacttaggtaaatagttgatatgagtactttgtaagataatagttttcttctttatgagactaagtataactttttggaggtcagtgtatttttgtctgaaatgctttctttgtacttgacattaaaaaatayctgatgtttrtatatccataaatagctaattttactttttaagattgtcctcatattcttacttcctttggttactaaattcaaaatgttttcacaatttgatttactattcagacagaaatatttaatttgatgaatgtttatgaaaatagacttttatctggttttagtggcctatggttcctggtttactcatgttaaaaactggtggaagaaaaaggaagaacacccaatactttttttgtactatgaagatatgaaagaggtaaaatggtagatatggattctggataatttccccactgcatcatgctgtaaaaggrttgatatttgctttccaacttagtctatcgagtccaaaatgatgattgctttgcctatccaccatgtgtttttacccaaatcttgctataattaatgagtttctaattgtgaaaagaattatttatttttattcctcttatttcttagccactgcgttatatctgaccactctttcttctgcaattatttcctatatttaccaggatatcacatgcttacagttatccttagatatctactcattaatattttaacattgtttttaaaaattgtttgctatattcgagttaccccttccacgcttattgttttcacaactatttatgtgctaatcatcccttatctgtgcctgcattttcacttctacctcgattttctagcccatgcttgtattaaatttaacatgctcaaaactaaacttattttctttctctccaacatgtaatatttttactattttgttctctttcaacaataaaagttattcttactgtctttgtttcctatattttgcacattcaattggttcagatagtgtatctattgtatctttcaaaacattccctcctttacttccttactatctcactgttagtgtagaaacttgtaatcatctatctagtatgaagtagtattaattaaatacaactacaaattttcatgccacattatggaactcttctacttaaattgccaaatacacacagacatacacacaacaggtaaacatgttgaaattagttccttacttataaaagcctgaacatacaagttagaatactttcagatctacaatgaaaattacgaagtttgtcttctttgtaactacatcccagtacttaatacagtgcatacaacataaacaggggctcaagattacttgcatggatcactgattgtttcaataaataaatgagtgagtggtaatatccaaaactttaatggcattaatcctactttatataacacagaaatttggccccatgtgaaatattacttgctttargtagttttgggaaactcccaggggtttctcgtatcttagcacaaagaatcctctgagattttattcactgcccaagtattcattctccatcacagttgtccacatcccataaagaatctgtgatctatgtcttatcattgtccctttacacagggtttgagagtattaatgttaatttgctcataccacacagctgcaaaaccttgcatggtttatgaaactactgtaacaaagtgatatgtctcttgagagtttgtttagccggaggtaagttataaattcctcataagagagaaaattattccagctctctaacaaataactctcttcatgttttggacagcagagcaccacttaaaagctttatgaaaagaacaattttagcttctggcaatagtcccttttctccataagactaagaaatacattctctctgtttggctgttattcaaattccaaatcaaccattacactgtttcccacataacatttgagaccatttctgtctttatttagctaaaatgctttattcaaataaacttactcattttgatttatagtctaaccggttacctttttaagcatatccatatatttacaatttccttcaaacttgcaacatacattgcattaacagacaatatttttcttctaccatacaatcatttgtagataatattatagaraagtttaatgcaacaacaataatggaagaaaattatagaatatacatcaataataaaatttgaaaaaaagtccagtaatttacaacatgtttatgagtatctacatgcattcctaataagtgaggtaaaagaataacagatcagaggaagattcagccagagccaggactctgctttaacttctactggtctatagactaacacagatgttcccagcatttttggcaccagggacgggrtttgtggaagacaatttttccatgaacagggtgcaagggggctgtatatggatggtttccagatgaaactgtttcatcagatcattgggcattagttagattctcataaggagtgtgcaacttagatccctcacatactcaattcacaataaggttcatgctcytatgagaatctaatggcaccactgatctaacaggaggcagagctcaggcagtagtgcttgctcttccaccactcacatcttcctgtgtggcccagttcctaacaggccactgattggtactgatctgaagccagtgggttggcgatccctggactactatcatcattaatattttaggattagccaaattattctccaaatatttttgaccccaaaaagaaaatgttctctatttgcctgtccatctatrtgttttcctagcacaactactatctttaattttgggcttctctctactatcatcatgtctgctygtttacycattctaaccactgacacaccttaagttctgatcttattcttctgtcagagaggactgacacagaaaatataacagatattcttgatttttaatattttatgattagtttatttaaaaattgagaaaaacccaaacaaatatggatttcctatactattcagagtcaacatttaaaaaaacggattataaatgttttataaatattcacattgtgtgagttacttgtttattgtcttgggttttacccactaatagaatccaaaggaggaaatcaagaagatcattagatttctagagaagaacctgaatgatgagatcttggataggatcatccatcacacctcatttgaagtgatgaaggacaatcctttggtaaattatacacatctaccaactacagtgatggatcatagcaaatccccttttatgcgtaaaggtaaatactttgctgggtttaatttccctttcgtactttcttatgaattatcatgagctaaggattagttctgtgatctctactaagtttcttagcctgtttaagctttatagcaaatacctaccaccaaaagttgctgagattcaaaattattaaatgaaacaatgcatgtaaagctattactagaataccttgaatatatgataaatatttattcttctatttactrctgtgctaaatgagagtggttttggcaactctgatgtgagcaattccaaatttgtcattcttactcccttcaatctttgtctaagatggcatagataagcttccttccttctgctcctcagtgaaatactaatttcacttagtacagtaccatagtctttaaagtccccatatcacttagaaaaccatggtaattgtattaaaaataattcaccaaaaggagaaactgctatttgaccttataagaagttttagccctctgcaaatactgtctaaactattagtaacatagagtctaaatttaacttagaagaatatggcatttactgttgaaatacattacttccatttaartagtctgtttattgtggcttattacacataatatatgtcaaaaatgtgttaataataacaatacatttaaccaattactaacttaaataactttgagaagttatccacttaataatgccacgatctgttttcaatatctttgattgaattggagggagatgggtagaatttcaatttgtatgctaggaagtgagcatagccttaggaatgtattatgcatattaacagatgaaacaaaaccgccaattttgagtaatatgattaattttttgaaaagttgtttgttaacttattaaggtagcaaatagtcctagtgttttcaaattgtgctctttcttttctaaaaacaatatatttaacctattaaaaataacttctagagtaagaaagcaggtatatttttcatcaaaaattgtatgcattataagtttgagcaaagaagactgatgtgtrtatatcttatctgtatgcttatacacagatgtaaatgtatgtgtatggacagtcatcccttgctatatgtgggggattggttccaggaactctgcctctgaatatactagaacctgcctatatgaaaattggcactcaaaacatgtgggtgggtttctcatcatgcaaatactgtattttttattgcttttagttggaaaaaaactgcatataagtgaacctggccagcgcaagtctgtattgttcaagggtcagttgtgtacatgtacatatatattctttttcctggtagaagaatcagaaaataaatctttattaaacaaggcaaattctcattgtgatagatacgtgaatataatttcccagaaattttatctcaaatcatatgaaaattgatgccatttcatgacatctaattatgatgtagacataaagaagacaagctcaatatctggattctatggcttctccaacctcaatagaaaaaaagcacttgctgttctaatattgaaggtagtctttatatcccctctctagggggttaagaacatacttttgtggtcagattgatctgaggtttatccaggctacaccattccctgaatacattaattaacctgccaaagctctgattacatcactggcaaaatagataatataataacacctgtggcaaaagtttctggggaggattatggtaaattatatgtaagcatttaggatattttctcacaataaataatgcatacagaagtaaaaagcattattagtctaaatagtttgaccttccttccttccttccattcttccgttcttccttccttccttccctgatgtatccagtaaacatttagagtactcattcgttaatttgcatatagaaaaacttcttcatgaataactatatacagcacatattctttaaaagattcaaaggtaaatgatacatatctttgactcaagaagctcacaatgtagtgcaaggggcatgtacatgaatgaatgctgaaagaagttaagtatgaacaaatgtgccaggcacactgaatcttgaaagatgccatattagataaatcaatgttattattatgagggtgggatagattatgtccaatgtttggtcgtatgtcctaaattataacaaatagaaaaacctggcctttggccagcatttatcaaaagttcttttttgaagtaaatgtgtttgcgtatattataaaatttatatgcagatcagatcactggaatgatttatatataacttttaattgcttaaatctgtgttctcctctgtttttaatgacatccttacggatgcattagccccagtatgtttatgttgaacccttattcaaccctatgttgaattccagagctattgacatctggtgaacatagaacaaaatgtaacaactagggaaaaaagcatatctataggaatgtttttcttttaaaagacttggaagttttatcaaaccactgtggattaatatagcttgtaatttaatatgatgtattactatttcataaaatagtgagatgtttttctctaaaaatattggcagtacattaaaagtttattcattttccaaacacatatttataaatacccaagtatgagagactaaatttaaatytttatcctcaaagatttactttaaaaaacatggttccaggatgttatatatttgatattaatgttattattcccacctaaattacaaataaagaacaagcctagtgaatttaggaaaaacaactgtcatctccatatcatagcatccttgtttataaattctaggaaatgatacttatcaactttttatttcacagttttgctgtgctgatgactaattttttgtctagtttccaaaaattactttgtgaaataaaatatgcctgactattgatccaagtgctcagtgataatctcatgacctacgaccattagaaacagtaaaattatcactcttgggaaactattgtaaagcccaggaatttaaacaagaaaattagtctttctcagaatgcctcttcaaatgtcagactctatttaattataaaccacctttccagatgtaaaaaattattcaawttttaaaagcctgaaaaatttaaaggttaatacaatttaaagactgtttgaattcattcaaataaaaggaaggtctttctttaggccttctaatcttttcctttggtatatactgatttcttcttatggaaatattttattctttcctatgtttttttatttacctttagggayggctggtgactggaagaattacttcaccgtggcccaaaatgagaaatttgatgctatttatgagacagaaatgtccaaaactgcacttcaattccgcacagagatttaaagtgtctaaatcacamatctgaagaaataagagattgtctgtagttgattgaaacgagggcagttatgaattgatttgggcaatcaaatgaatttataaaggagaataatatgcttttaatatgttgattcttttcaatgttattaatcagatcccagttttgttcckttgattctgagtttccaaattctctaaggctaawgttcattgttaactttttgtaacaaaggaacaatgtaaccacaggctcttcctgcctttttctacactagtactgataagaaagaagggatttattttacttaatctcccatatattatgatttagaattaagttcccctccctagtaccatggtccaagaaatgctgttttcataatgagactatatttcctaactctgccccaatttccctttgccgaaaatttgacccaggacactgtgttccactgctgtctaccgagtttcaagttgttctctgagtcatagctcatcttcctgcagtgcctctatttggataacaaagttcatgtccccgatcatgtagttcagattttggaaatmttttttctatatcatacctaatgtctaagtctccgaaaggcaaacgcctacaatagtctctgtaggattggttacctgggaactggagctctgttctgaaaagcagccctgagggctgtgacctacttcttatggggagtcctctttttcccaacagacccgtttgaacttcagagaaatcacctactgctgtgttctggtcaccatttgggaacttcagttacttaatcttatatttggatagatttggataccttaatagcacctttaatatcctagacatgatcataacctctgcaaaatatttcccaatctggtgcccaaggaagactctctaggctgaatctccactctgccctcttgacccaatgttccttctacttattattacatgcttatatctatttgtgtggtctctgatctatgttttcttggaacatttatatatatatatatatatatatatatatatatatatatatatatatatgtacattttattattatactttaagttccaggttacatgtgcacaatgtgcaggtttgttatatatgcatacatgtgccatgttggtgtgctgcatccattaactcgtcatttacattaggtatacctcctaatgctatccttcccccctccctccaccccacaacaggccccagtgtgtgatgttacctttcctgtgtccaagtgttctcatcgttcaattcccaccaatgactaagaacatgaggtgtttggtttttttgttcttgcaatagtttgctgaaaagtatggtttccagctttatccatgtccctacaaaggacatgaactcatcattttttatggctgcacagtattctatggtgtatatgtgccacattttcttaatccagtctatcattgatggacatttgggttggttccaagtctttgctattgtgaatagtgccgcaataaatatacgtgtgcatgtgtctttatagcagcatgatttataatcctttgggtatatacccagtaatgggatggctgggtcaaatggtatttctagttctagatctctgaggaattgccacactgtcttccacaatggttgaactagtttacactcccaccaaaagtgtaaaagtgttcctatttctccacatcctttccagcacctgttgtttcctgactttttaatgattgccattctaactggtgtgagatggtatctcattgtggttttgatttgcatttccctgatggccagtgatgatgagcattttttcatgtgtctgttggctgcataaatgtcttcttttgagaagtatctgttcatattctttgcacacttgttgatggggttgttttttttttcttgtaaatttgtttgagttctttgtagattctggatattagccctttgtcagatgagtagattgcaaaaattttctcccattctgtaggttgcctgttcacgctgatggtagtttcttttgctgtgcagaagctctttagtttaattagatcccatttgtcaattttggcttttgttgccattgcttttggtgttttagacatgaagtccttgcccatgcctatgtcctgaatgatattgcctaggttttcttctagggtttttatggttttaggtcttacatttaagtctttaatccatcttgaattaatttttgtataaggtgtaaggaagggatccaggttctgctttctacatatggctagccagttttcccagcaccatttattaaatagggaatcctttccccattgcttgttttcgtcaggtttgtcaaagatcagataattgtagatgtgtagtattatttctgagggctctgttctgttccattggtctatatctctgttttggtccagtaccatgctgttttggttactgtagccttgtagtatagtttgaagtcaggtagtatgatgcttccagctttgctcttttggcttaggattgacttggcaatgcgggctcttttttggtttcttatgaactttaaagtagttttttccaattctgtgaagaaagtcattggtagcttaatggggatggcattgaatctataaatgaccttgggcagtatggccattttcatgatattaattcttcctatccatgagcatggaatgttcttctatttgtttgtatcctcttttatttcattgagcagtggtttgtagttctccttgaagtgatccttcacatcccttgtaagttggattcctaggtattttattctctttgaagcaattgtgaatgggagttcactcctgatttggctctctgtctgttattggtgtataagaatgcttgtgatttttgtacattgattttgtatcctgagactttgctgaagttgcttatcagcttaaggagattttgggctgagacaatggggttttctacatatacaatcatgtcatctgcaaacagggacaatttgacttcctcttctcctaattgaataccctttatttctttctcctgcctgattgccctggccagaacttccaacactatgttgaataggagtggtgagagacggcatccctgtcttgtgccagttttcaaagggaatgcttccaggttttgcccatgcagtatgatattggctggtggtttgtcatagagggctctccttattttgagatacattccatcaatacctaatttattgagagtttttagcatgaaggctgttgaattttgtcaaaggccttttctgcatctattgagataatcatgtggtttttgtctttggttctgtttatatgctggattacatttattgatttgcatatgttgaaccagccttgcatcccagggatgaagcccacttgatcatggtggataagctttttgatgtgctgctggattcggtttgccagtattttattgaggatttttgcatcaatgttcatcagggttattggtctaaaattctctttttttgttgtgtctctgccaggctttggtatcaggatgatgctggcctcataaaatgagttagggaggattccctccttttctgttcattggaatagtttcagaaggaatggtaccagctcctccttggacctctggtagaattcagctgtgaatctatctggtcctggacttcttttggttggtaagctattaattattgcctctatttcagagcatgttatttttctattcagagattcaacttcttcctggtttattcttgggagggtgtatgtgtcgaggaatttatccatttcttctagattttctagtttatttgcgtagaggtgtttttagtattctctgacggtagtttgtatttctgtgggatcatcggtggtgatatcccctttatctttttttattgcatctatttgattcttctctcttttcttctttattagtcttgctggtggtctatcaattttgttgatcttttcgaaaaaccagctcctgaattcactgattttttgaaggggtttttgtgtctttgtctccttcagttatgctctgatcttaactccagcttggcattagaagtagttgtttatatccccatgtgcagcaaagtctttttcctgagatcatatcacatgtgccaagttatatgccaagccatggttctcaagctgaaggtacagtaccctgggcccttacttgttctgaaaggggtgggggtggtggttttggacatactgttagactttctgagccacaactgaggtagctatggcttatcgtattttgacttcacaggtgaatctccgctgtcagccaggaatagccaggaatagctaaaatagctccttaagctgtaacatttctcttttccaaccccagcaaaggattggtctagtggtaacaacaaacctcatagaagtagtacacctattattctggagatacttgcttctatagatttattacaatatgttttataaagtattttagagtatataatttgtgtttatgttccacagaaacatattttataggagttaatcttgactatctaaaggtattgtgaactagttccagctttctccaatacccttgtccacgagaagtaaactaaatcatgtatctatttcctctattatctttattaaataataagttaatgtggcctgaatatatacggatttctgatactatggtctattactgagggaaaaaacaccactaaactatcctctaatctgtgtaatagattagctacactttcttcactagcaagataaaataatttccacattttctagttttactttgtagaaataactctctgtaattggactgtattcaacgaaaacttagtaagttgtaattatgcctcaggtatgtttctatgcactgagtgaagagtggagataaaaatagaatttagattttcctttactttttaaataggttgttgcctcttatatatttattctatgatgcaaatgtcactatcctaattcctcagtttatgtttaacagcacacagtggcacttctatgattcaaatacatttgataccctttgaaatcaatcagaatactgcaaaattaatttttctaaaacaatgcttttatcgttatttctcctgttgaatcatcagtacaatttccaaatgaaaacacttaaaataatctcatattacaatctttctctaacagaaccatgatgtaaggacagtgataacaaatatctgacaatgatatgattatttcctcatccatggaaattttccttaataaactaaagggctattttctaaaaagccaaagcattgcttacaagaacttttcatcatgacatggatagacactcagattcatacattcaaagggaagtgtcatgtattccctttcaatccaccctattctattgtgttatcttcctaaattattttctatctacattcttcattctctttcccattgaccctatgttctgtgtgataaaaattgcgtcattggaggcttttgaaggttaagtattatgccccatttcaccattaatcaacatacaacccttctccatattttgtaattcctttcatatacagaaaaaaagatactataatttcttcaaaatgcttgatattaatgatatatgggaaaacaattattttgtgcagcaatcttcagataactgggaaaggccggggaaaaagagagatactggtggttatcaatgacccatgtataaattgtttttattatgtaagctgtcttcacaaatgtcttcttatgtatgatcattagaactgttttatatatatatgtaaaatttccacattatcgagacattactttcagcagtgaagtaatccttttttaactgccacttaatgaattcaataaaatataatttattgtattttgctataataaactattgatgactatttgatgacaatttgcttgccactatgacatttaactggcttatattttgaaatctcatttctgttttctgtggctattttaattttccaccctcaaaatatagatgagtatctttgtagtaggaaaatcataaaaattaacagcttcttccctagttaataactctgcatattgtttttgtgcatggagcaggggctaaatcaggaggggatttgaggcaacattgaagaccaagcagtatagaacaaaagataagagcacaaaatctgtaattataaagcctttttagaattaggtctttgccactttctaaccctgaaaacttgagcaagtcacaacttttctgcgctcaattccttatctgtacaatgtagacaatgagtatttattgcaaagatgaaataatacataaaacaattaaaacagtgcctagcatacttcagtgtgctcatttaatatcagctgccatgaaggtaatcattgtgaaaatcttgaaattttatttatctaaatgggattgaggcatcggatttcttgttccacactgctagctggcttcaaaatgtagaaatatgtcgcaaattactgggaggcaaggaggtttctggcttcattactgttaccattgttcttttgttgtttgctaccaagttaaatttttcacgtgtgtcaagtactcctgcttaaggcattattctcgagtacttaatattttcaacgtgtgtcaatgatcatcattcaatagaaaagcacagcaaggctataaagattggaataacactgcaaatgatacataggttgtaataatccagctattgcaaaaataaagataagttagatactgtgacaaaggtggattgaaatttctcagtgggaatttgattacatggggaagcctattttttaaattttaaatttttatttatgtatttttatagagcaggttcttgccatgtcgtccaggctgctctcaaactcatggcctcaagtgatcctccagtctcggcctcccaaagcactgggattataggcatgagccaccatgcccagccataaagtccacactgtcaaacgtagcatttgggtgtcatgtaaattcacatatatattctctcagt

SEQ ID NO: 94729 - DNA, 14614 bp, Homo sapiens
  misc_feature (1)...(14614): n = A,T,C or G
tgtattgcatccatgactttccaatataggtccaaactctttgtttaaaaaaatatattaagaatttcaagatggcaacagcaggacattaaaccaagtacaaggtccttcttagcgtaggccctgggtgactgcacatgtacccatgatgctgaccctgcccagaggtgattcaatcctaagatatttggtccaattaaagtgcacaggaaactgagatgggtacccacatgtcactctgctaatttgtaggacaagagaacagtcacatagagtagagccctaactttcaggagtctcctctagactaatgccaaggcacagtatgcccttgggaaagccatttaactgctgcaaactcttcagaaaaggaagggactaggctttctctaaaagggcctgtaaggctccgattcctcattttgttgtttttttttgaagtgactttcttttttttttaaattttattattattatactttaagttttagggtacatgtacacaacgccaattcctcattttggattgggcaggaactcattttgttttaaacctattacccacaggaactgaaatggttaattttacatgtcaatttggctaggccatagtgccaaaacatttggtcaaaaattattctggccaggcactgtggctcacacctgtgatcccaacacttgagagacccaggtgagagaattgcttgagcccaggaactcaggaccagtctaggcaacatagtgagacctcatctctactaaaaattcaaaaattagctgagaataatggcatatgcctgtggtctcagctacttgggaggctgaagtgggaggattgcttgagcccccgaggttgaggctttgtgagccatggtcatgccactgcactccagcctgggtgacagagtgagaccctgtctcaaaaaaacaaacaataaacctctcatcttttttatggtggccagaagaatgaattacaatgactgacaaggctttggaaacaagacaacccctccccacatcacaaggactgaaaaaggtaatcaaatagattttgcagtatgttcgaaggtggtaagtggtatggagaaaagaagagtaacagggaaaagtagggacaggctgtatgtatacttaaatatggtaattggggtggtaggacagccctgatctcactttctcaaagacttgaaggagataagggagtagctatgagagatctgagggaagaatatcactagatactcttagagggatgtctagtgcaagggccctaagatgggagcaagcttgaagtgttttcttaataagagcaaggaggccagtgtggatagagtagagtgagcaaaagggagagagatcagggatgagagcagagaggactagggaccaggttgtgtggggtcttacataccgtggtaaggactttggcttttctctaagtgaaataagagggagccattggaggattgtgaacagaacagagacatgacctgacttctattttattttattttcctctcatagttcttgtctcatactgacttatattttaaataattactctcaatactgggttgagagtaaactgtaggcaagcagtgagataagtagggatattagttaagaggcttatgaagctcaggttggtagcttacacttgtcatctcaacattttgggaagctgaggcaggattgcttgagcccaggagttcaagaccagtctgtgcaacaaagtgagacctcatcgctacaaaaatctttaaaaaaattagctgggcttggtggtgcactcctttagtcccagctgctcaggaggctgaggtaggaggatcacttgagcccgagcggtcaaggttgcagtgcacaccactgcattctggcctaggtgacagagcaagaccctgtctcaaaaaaactagacaagtaaaccattattctggttgtttctatgaaggtgtgatatggtttggctgtgtccccatccaaatctcattttgaattgtagcctccataaattcccatctgtcatgggagggacccagtgggaggtaattgaatcatggggacaggtctttcccatgctgttcttaagatagtgaacaagtctcacaagatctgatggttttataaaggggagttcccctacacaagttctcttgcctgctgccacgttaagatgtgcctttgctcctccttcaacttcatgattgtgatgcctccccagccatgtggaactgtaagtcacttaaatctctttcctttataagttactcagtctcaggtatgtctttattagcagcatcagaacagactaatacagtaaattggtactggtatagtggggtgctgatgtaaagatacccgaaaatgtgaaagcaactttggaactggataacagacagtttggagggctcagaaggcaggaagatgtgggaaagtttggaacttcctagagatttgttgaatggctttgaccaaaatgctgacagtgatatggacagtaaagtccaggctgaggtagtctcagatggagatgaggaacttgggaactagagcaaaggtgactcttgctatattttagcaaaaagactggtggcattttgcctctgccctagagatttgtgaaactttgaacttgaaagagatgatttagggcatctggcagaagaaatttgtaagcaacaaagcattccagaggtaacttgggtactgttaaaagcatttagttttatgtattcacaaagatatggtttggaattggaacttgtgttcaaaagggaagcacaacataaaagttcagaaaatttgcagcctgatgatacgatagaaaggaaaaacccattttctgaggagaaattcaagggggctgcagaaatttgcataagtaatgaggagccaaatgtgaatcaccaagacaatggggaaaatgtctcagggcatgtcagaggtcttcatggcagcccctcccatcacaagccaggaggcctaggaaggaaaaatggttttgtgggccaggcccagggccttgctgctttgtgcagtcttgggacttggtgtcctgcatcccagctgtggcaaaaagaggccaacgtacagctcaacccattgcatcagagggtgcgagccccaaaccttggtggcttacatgtgttgttgtgcctgagggtgcacagaagtcaagaagtgatgtttggggacctctgcctagatttcagaggttgtatggaaatgcctggatgtccaggcaaaggtctgctacaggggcagagccctcataagagaacttctgctagggcaatgcagaagggaaatgtgtggtgtggacccccacacagagtccccactggggcactgcatagtggagctgtgagaagagagccaccatccttcagaccccagaatggtagatacactgacagcttgcattgcacacctggaaaagctttagtcagttaatgccagctcatgaaagcagtcaggagaggggctgcaccctgcaaagccacaggctggggctgcccaagaccatgggaacccaccttttgcatcagtgtgacctggatgtaagacatggagtcaaaggagatcattttggagctttaagatttggctgccctgctggatttcagatttgtatgggacctgtagccccttcgttttggccaattcctttcatttggaacaggtgtgtttatccaatgcctgtacctccattgtatctaggaagtaactaatttgcttttgattttataggctcatagggggaagggacttaccttgtctcagatgagactttggactgtggacttttgagttaatgctgaaatgagttaacactttggaggactgtgggaaggtatgattgattttgaaatgtgaggacatgagatttgggaggggccaagggcggaatgatactgtttttctgtgtccccacccaaatctcatcttgaactgtagctcccataattcccacatgttgtgggagggacccagtgggaggtaattgaataatgggggtgggtctttcctgtgttgttctcatgatagtgaatacgtctcatgagaactgatggttttataaaggggagttccccagcacaagctctcttgcctgccaccatgtaagatgtgcctttgctcctccttcaacttctgccatgattgtgaggcctctcaagccatgtggaattgtaagttaattaaagctctttcctttataaattacccagtctgaagtatgtctttattagctgcatgagggcagactaatacagggtgttttaggatgaaattaacatttaaattggcggattttgagtaaagcagattgccctccataatgtgggtgggcttcatccaatctgctgaaggcctgaatagaacaaaagactgacctacctcaggcaagaaggaattctcccagcaaatggcctttggacttggacttcaactgcaacatcggtcctttcctgggtctccagcctgccagctagcctaccctgcagattttggattcagcagcctccataattgcttgaactaattccttaaaataaatcagctgggcgcagtgactcacacctgtaatcccagcactttgggaggctgaggtgggcggatcaccaggtcaggagattgagaccatcctggctaacatggtgaaaccccatctctactaaaaatacaaaaaaattagccgggcttggtggcggacgcctgtagtcccagctactggggaggctgaggcaggagaatggtgtgaacccgggaggcagagcttgcagtgagccgagattacgccactgcactccagcctgggtgacagagcaagactctgtctccaaaaaaaaaaaaaaaaactctttatatctttatatatatcctactggtactgtttctcttctctagagaacgctaatgcagaaatgttgcacctagtggatggagaataaattcattcatcccacaaatatttgtttaaatggtgcgtcaaccagaacattcattccactttacatgtacccttcattttagcagatttacatgtttgaagcacttctacattcatatttttcgtctctactatgtttcatctgatttttgtggttggccctagagaaggtgttttaggtttaaacaatatttattggtcaggtgtggtggcttatgcctgtaatcccaatactatgggaggctgaggcaggcagatcacttgagccatggagttcaagaccagcctgagcaacatatcaaaacactgtctttacaaaaaatacaaaaatgcatggtggcatgcacttgtagtcccagctactagggaggctgaggtgggttgagcccaggaggcctaggctgcagtgagccatgagcatgccataccactgcactccagactgggtgacagagtgagaccctttctcaaaaaaagagagaatagaaaagaaaatatttatcgtttgactcccaaatgagacgttaaagtgactttcaagcttaacaaatacaatcattaactataattgcttccggccttaaaataattttatgtgaaactggtgttctttgtagaaattgtaattgacaataatgtgactataaaatgatagctgatgagaaataagagaataataagagacaaattttgggaggcatcccctacaattcttggtagtgctggtggaactgaacgctcattgcccacagcagcaaactcaacagcaaaaattaatattggttttttcttcacttccctctcacactccctgttctttcattccttattcccaaataacccacctgacccaagtccttgtctcagactgtgcattggaaaacccccacttctgatcctgatagtataacaaggggtgaaacaacacactagtggttctatatcctgtttccaggtataaacaaagcagtgaaggaaaacaaggcttccaaatgtaggagtctgtaggctttacattactaaaagaatagtcatacaatatcaagrttataaaaattactttatttcaaatgtgaaaatataaaaaccacttacatataaaatttaagagtattgaaagatctaaaatttaattttcagctttagctccttacaaatatacttaaattgaatgaaattgaatggaattaacctaagtgtccatcaactgataagtggataaagaaaatgtggtatatatgtaccatggactattactcagccataaagaagaataatgtattttgcagcaacttggacggaactgggggctgttatcctaagggaagtaactcaggaatggaaaaccaaatactgcatgttctcacttataagtggaagcttagctgtaggtacacaagaacatacacagtggtataagggatgttggagactcagaagggaagagggcggaaggagggtaatggatgaaaaattacctattgggtacaatgtacatcactcaggtgacaagtacattaaaagccgagtcttcaccactacacaattcacccctgtaagcaaaaagtgtgtacccctaaagctattaaaataaaaaattttaaagatactatatccataacaggcatacatttgaagaatattaatccttaagaggggaaaataattacattttttcactggtaaaaagcgcagaactgcagtgttcagtttgtagactgaccaacaccctctccattccaaagggttactcagagacaattataggaacctcgttgttgttggcagtgactggtgaaatggccacattacccatttctgaacaataagacatgaggagacatgaggagaggtttgctgtgagaagctctgaaaaagagttattcaagtctatgaaggagactcaaaaaatggctcattttcttcctctggttgctatgaggtttgaaggggcccatgaaacagctacagccatcatgctaccagagtctgagaatgaagccagcgctaaagatggcagagcagagagctgggaagaacccagatccctggtgacgtactgaagtgctggagcctggcctgtttgaacgtctagttatgtgggaatatacatttccttattgcttaagccatttgaattaggagtttctgttacttgcagccaaaagcttcccaactgaaacaaggaagaaaggtagagaaaaagcaagcattaacagacagttataaggtattgggtgttttctaaaatttatcctcttgacaaatcaatttcatttatagtaattttaagtttacagaatctcctcgcctctgaattgtcattaaccattttttatactatcatatctaacaatctgtcctctcacatattattgctgacaaagaaaaccgaaagaagaaaatcagcaaaatctagctgtcttttaaggtgcaaatagatagtttctcttttacaaccagtttcacggtaacggcagtatgctttttctgatgggtgcctgtagagatggcacatgaaggaaagaattctaaaatcttctaatacattttgaaagataaatatacagctaagcaccttcttaaaactcataatatatccttcgcttccttgcttcctgaccatattaggagcattcatatacatttttaataacttgtttttttgagatgnnnnnnnnnnnnnnnnnnnntttttgagatggaatctctctctgtcacccaggctggagtgcagtggcacaatctcggctcactgcaacctctgcctcctgggttcaagtaattctcctgccccagcctcccaagtagctgggactacaggaccacacccagctaatttttgtattttttagtagagatggggtttcaccatgttggccaggctggtctcaaattcctcacgtcaggtgatccatctgcctcggcctcccaaagtgctaggattacaggtgtgagccactgcgcccagccatttttaataactttaaataaagactggttgtggtggctaatcgctgtccccacaggtattatagtctttcgctgactagcaacactgcacagaggtaacatcaaatgatctcctgctgtaccatgctgtactcccaaagaaatcccagcacctggaaggccaaggtgggaggatcaattgagtccaggagttcaggaccagtttgggtaacatagcgagaccccatctctacaaaaaattttttaaaaatagccaagtgtgatggcatgtgtctgtggtcctagctacttgggaggctaagcaggaggatgacttgagcccaggagttaaaaggctgcagtgatctatgattgcaccactgcactcaagcctgggcaacagaatgataccctgtctcaaaaataaaacactgctgggtgtggtggctcacacctgtaatcccarcactttgagaggctgaggcgggtggatcacttgaggacaggagttcgaggacaggagttcgagaccagcttggccaatatggcgaaactccatctctacaaaaaatatagaaagtagctgggcgtggtggcacacgcctataatcccagctactcaggaagctgaggcaggagaattgcttaaagttgcagtgagccaagatcgcaccatggcactccagcctgggtgacagagagagattctgtctcaaaataaataaataaataaataataaaacaaaacaaaactttagataaaagtaaaacatgcaaaatgctaagcagtatttggaacaaggtattattagctattattattagcagtgttctacctagcgagatcaaaatactgtgctaaatctagcactgacagtgtcccagtgtctctcaagcacccactagttgctttgcaaggtatctgcttcctttcctataacttgagttgctttactcttagtatacttgaaaaattcagtgtcaggactagtatattttattttcagatgcaagcagcaactttggcatttcttatcacaaaaaaactatatgagaaagctggcaagcccagtgaacttcctggccggagaggtttttccattaaaggtggcaaggtttgatcatccaccatctttagagttagaccattgagttggacagatctgcaaaggagaaagatacaccgagttaaccaagtggtgcatgccccacccatgctgctacaaaagtcatgaaatcttttttagaccaaataaatttttttttgtggcagcctatattatataacttgtatttcaacactatatcacttaggcatttgacctagataatctttaagctacaatggcagagatgagtagttatgatagagaccatatggactccaaagccagaaatacttactgtctggcccattacagaaaatggaacacacacaatctatataataggcaatatgatggtggtataaaaaggataaacatgacacaacttctggaatggtggctattttatttaatggccaataattgaaaccttttttatgtaaagaaaatagatatatagaattgaatgcagtttttatgaatttagcgtaaatggtagccaatgaaatttctcacttgtaactatgcccataaactgcctaactcccctctccctgcaggaggtatgcattcattttcttactgttattaagaaattttggtagaatgctgtggtgaaacaaaaacaatttggctaaactacagaaaattttatattttctatgtatttcactattggaattcaaattaaaaactgttgaacgttcttaaaaattaaggaaaagtgttatttcttatacatacttattatttaaatcaaattaatgcatattcacaggagcgaatcaatataggcaagagcttatgaagaaaagctttagtcggctgtaggtctattgatattttcataattctaaataagatgcttatatctctttttctcaaatatgttttatattgtcaacaaagttagcactctttaaatattgaaaacttgtaagattaggccgagcacagtggttcacacctgtaatcccagcactttgggaggctgaggcaggcagatcacttgaggccaggagttcaagatcagcctggccaacatggcaaaactccatctctacccaaaaatacaaaaattagccgggcatggtggtgtgtgcctgtagtcccagctactcaggaggctgagacatgagaatcgtttgaacctgggaggcggaggttgcagtgagccgagattgcaccactgcactccagcctggtagagcaagattctgtctaaaaaaagaaaaaaaaaaaaaagaaaagagaacgtataagattagttactgtcagagttatatttatatcatttaggtaatacatgtaaagtatgtagaacacttataacagtgtcttttatatagtaaacactataaaagtattatctatcatcattattattactaagataaataaaagtaacctaagtcattataaccattttaaatattttgatgtatattcattctttcatctattttttgtgtacatgtatacagtcatatgccacataaggatgttttggtccaccatggaccgcatatataagtgtggttccataaaatgataaaattataattcctattgcctagcaatgtcatagtcattgtaacattgtagcacaacacattagttttctatgttttagatatgtttagatacacaactacttaacacaatgatagcttgccattgtgttaagtatttgtatattcgctacagtaacatgctttacaggtttgtagcctaggagcaacaggctagtcatatagcctagatacatagtaggctagaccatctaggtttgtgtaagttcactctatgatgttcacacaaggatgaaatcacctatcgacacatttctcggaatgtatccccatcattaagcaacacatgactgtacatacctttttttttttttttacttaagtatgggtatactgtattttcttaaaacttgattcttccccccaccccagcacatcctaactttttctcacaccattaaacatccatccactacataattttaatgtctgcacaagattccatggtgtgagtatattagtttatttacttaattctctaatgttagatatttttccatgtagcattattatatatttgttttccttaaagaaatctctcacaccctgtcctcattaagcatcagtgagcagaaaaactggtttacattttgacctaatgagacgctcagccctgtgttctgtaacttaagacatatcaatagcacgcccatgattgtagcagaggttagcatgcctgcattgcagttgtactcagtctatatgagttggttttgtttaaaagcctgtatcacctcaatttttagatggagtgaagggggaaatgccatgaccatcatcaggaaaccacaaacaaaaataggtcttgaaaatatctccagctaacagtggtaagagcctgttctgcatgaaattaagaaacttgcaagagtacacacaaaagttttagatatgcttttggagaggatattttgctacaaagtttaaaggtaaatctgatcactgtgaattaatcctgctggagataagatgaggtacatgggcaagatattataccatcaggctatattgcttaatcagctgtatatttatctaaaagatgctacacatatatcaagggtaagcttaatgtatgctgattattttcacatcaggctgggcaatgagggtggggtttaatttgggtatagtgttttattttatattctgaagtcaataacatgacgacaaagaaatagaagatgtttgtcaaatttcagatgaaatgaagctggaaggaattagcaagcaacagattcggcggaaatggggatgctgggcaaaatgtatgagataaatataaaatacggcctttatgttaaaaatatgttcactcagcccagatgaggtgggtcatgcctgtaatcccagcactttgggcggctaaggcagcaggattgcgtgagtccaggagttcgagaccagcttgggcaatatagtgagaccttgtctctattttttttttaaaaaaaccagatgttcatttaaatatttattaaagtcttactatgcaggaccctaataatttttagggctgggtgcagtttttcatgcctgtaatcccagcactttgggaggctgaggaagatcacttgagcttaggagtttgagaccagcctgggcaacataatgagacatcgtctctacaaaaagttaaaaaattagccaggtgtggtagcataagcctgtggtctcagctactcagaaggctgaggaggaaggatcacttgagcccaggtagcggtggctgcagtgagctgtgaccgcaccactactctccagcctgggagacagaatgagacccccgcctcaaaaataatgataatgatagtaataatttttaaaggtgactgttgtttaactctccgaggtcattaatatgagtaagcgtacagactgtgcactcataaacttatctaggatactattttgcaaaattttaaagacagaagagtgtaagtaatatatactcatcaaagagaatttaggggaacaaaacattgtctataatttcaccagttttccaattataaaacatgaaatgtgtgatcagaatgtaataggggcagggcacggtggctcactcgtgtaatcctagcactttgggaggctaaggcaggtggatcacttgaggtcaggagttcaagaccagcctggcccacatggtgaaacctcatctctactaaaaatacaaaaattagccaggcgtggtgatgcatgcctctaatcccagctactagggaggctgaggtgggagaattgcttgaacccaggaggcggaggttgcagtgagcctagatcacgccactgcactctagcctggacaacagagtgagactctgtctcagaaaaaaaaaaaaaaaaaaaaagaagaaagaaaaaatgtctacagaggctatgtggaaaggctcttgggaagannnnnnnnnnnnnnnnnnnnnnnnnnnnnnnnnnnnnnnnnnnnnnnnnnnnnnnnnnnnnnnnnnnnnnnnnnnnnnnnnnnnnnnnnnnnnnnnnnnnnnnnnnnnnnnnnnnnnnnnnnnnnnnnnnnnnnnnnnnnnnnnnnnnnnnnnnnnnnnnnnnnnnnnnnnnnnnnnnnnnnnnnnnnnnnnnnnnnnnnnnnnnnnnnnnnnnnnnnnnnnnnnnnnnnnnnnnnnnnnnnnnnnnnnnnnnnnnnnnnnnnnnnnnnnnnnnnnnnnnnnnnnnnnnnnnnnnnnnnnnnnnnnnnnnnnnnnnnnnnnnnnnnnnnnnnnnnnnnnnnnnnnnnnnnnnnnnnnnnnnnnnnnnnnnnnnnnnnnnnnnnnnnnnnnnnnnnnnnnnnnnnnnnnnnnnnnnnnnnnnnnnnnnnnnnnnnnnnnnnnnnnnnnnnnnnnnnnnnnnnnnnnnnnnnnnnnnnnnnnnnnnnnnnnnnnnnnnnnnnnnnnnnnnnnnnnnnnnnnnnnnnnnnnnnnnnnnnnnnnnnnnnnnnnnnnnnnnnnnnnnnnnnnnnnnnnnnnnnnnnnnnnnnnnnnnnnnnnnnnnnnnnnnnnnnnnnnnnnnnnnnnnnnnnnnnnnnnnnnnnnnnnnnnnnnnnnnnnnnnnnnnnnnnnnnnnnnnnnnnnnnnnnnnnnnnnnnnnnnnnnnnnnnnnnnnnnnnnnnnnnnnnnnnnnnnnnnnnnnnnnnnnnnnnnnnnnnnnnnnnnnnnnnnnnnnnnnnnnnnnnnnnnnnnnnnnnnnnnnnnnnnnnnnnnnnnnnnnnnnnnnnnnnnnnnnnnnnnnnnnnnnnnnnnnnnnnnnnnnnnnnnnnnnnnnnnnnnnnnnnnnnnnnnnnnnnnnnnnnnnnnnnnnnnnnnnnnnnnnnnnnnnnnnnnnnnnnnnnnnnnnnnnnnnnnnnnnnnnnnnnnnnnnnnnnnnnnnnnnnnnnnnnnnnnnnnnnnnnnnnnnnnnnnnnnnnnnnnnnnnnnnnnnnnnnnnnnnnnnnnnnnnnnnnnnnnnnnnnnntgaaagtttggaatgaacaaggaaaattacttacttggaaagtaatccatgaggtcccaaaggtcttagaaggtatttatccacttgcttgttagaaaaaggatagggtaaccgcaagtacttggtgacattatggaggtttatggcatacagagttaaatctccttctttataccttggactaaaagcaaagaggttaacttaatagaaatatgtatctaatttaagcaattaaaaactcaattacaaatgtgatcctaagtattagtatccataatgacaatccataatgcatcctaagtattaggatccataatgacagtgggccctcttagtatccttcttttatgatcgttttagaccgctagtgtgctcctattttgaaaacacaattaaaaatgttgccgttcatgctaccaatgtctgggctagagcacactgagatcctcacagctctgccagctgggttgttaagaggccagccagactatccattttcagacataggaaggtaaaaggcaaattttgtgggttcatgtgaattcaaa

SEQ ID NO: 94730 - DNA, 60508 bp, Homo sapiens
taattattacacaactataacacaacacaaacagtaatctctcccctagtttagagtcctttgcatgaaatttagcaaatctatcattttgaatacagtacaagcctggtaatccagtgtatttgggataggccagtggaactcagaactgatacatatatacatgtatgtctatcatattcaatgtctattaggtgtaaatcatctcttcatgtaaaagacactactggtttgaggatagactcgtctaggaatattttgtccttctgtgacagcaccactatccatcccaatgtaacatttctacaaagggaagatatcttaaccaggcatacttatatttgctagttggaaaatcattctgaacagttttaattccattctattgaatggattattgtatgagctatttggggatcagatataaatgacaatcacacagaaccacttttattcaacatagataaaatgtgatgagtgttaacattttaaataagcaatctgcttaatggacattggtatgaaggggaagtgtcattctttacctcactcctcaaacacttttctatccaaaggttggtttgagtcagtattggcatcatacaaccacttactgtaaaataagtttattagtggtaacgtgatagaatttattcccgatatctgatgttacaaactttagggtccttgagatatgcaggatccttgtatgtaactggcataaaccctgtaaagagataattaaagttcttgacaaaacataatgagcaaaatttcagctagctcaattcagttgttgaggtattctttcttacccattatttgagctctcttaattgcttttgtgatttctttctgtttcttcccacaaagacctgtaaaataaaaagctttcttattcataaaaaatgtcaatatttaaagtttgcaattttttttttgagatggagtctccctgtgtcacccaggctggagtacagtggtgctctctcgcctcactgcaacctccgccacccaggctcaatcgattatcttgcctcagcctccttagtaactggaattacaggcatgcaccgccacacccggataatttttttgtatttgtagtagaaacggggtttcaccatattggccaggctggtcctgaactcctggcctcaggtgatctgcccacctcagcctcccaaagtgctgggattacaggtgtgagccaacatgcccagcctcaacaagtttttaagtcaaggattggtaaatcatttttgtcaagggccacaataataatctaggttttgtgggccatacagtctccatcactgccactcaactctgctgttgtagctcgaaaacaaccatatggcactacgtaaacaaaactacaaaaacaagtggggttgggtgcagtggctcacacctgtaatcccagcactttgggaggcctaggcaggtggatcacctgaggtcaggaattcaagaccagcctggccaacatggagaaacccaatctctaaaaatacaaaaattagccaggcgtggtggtgcatgcctgtaatcccagctattcgggaggctgaagcatgagaatcacttgaacccaggaggcagaggttgcagtgagccgagattgtgccacagcactccagcctgggtgacagtgagattccatctcaaaaaaaaaaaaaagtggcatttgtatatgatgaacctaatcaagataaaaagggagcaggtcgaatttggcctatgggccatagtttgctgacaccaagtttaagtatcaatctaggaatgattatagtatattccaaaacatcaacaacagttttttaaagcccagtttttctatatagttaactctgcataagacagcaaaataataatcctcttggcctaagagactttttcatagtaactagctctagtccctgtagtatctgatctagtagtaatttatagcacaattgaaaatttgagttttcttaaatgatagaaatagattgatataattcgtatctacatttatattcccataataaaaaagaamatacctgtaatgtgccttccataaatgcatccagtaaatggagaaacaaactgggacaaaagctgttttggagttttatgtggaggggaaaaaaaagtatctgttatttatttctgaatgtgtaaatttcaaaaaacaaccttcaggttatataaagctttactaaatttcagacacatttcataaaatataagaaaaaaatattgttatcctcctgttaccttttaaatattttctatccagtgtgtcaagtctatatataattaaacagcagattaatcagcatattcattcaatggtaaatctgttttcttgacttccacagatacctttctaaaatattgcttgaaacaagctactaaaaaatttcatctatcctgacaagctatcacattaccctctgataatcattaagataaattatcagggggtaatgagattttcaagaggtacaagtacaccaggcatttgctataatttatgttttatttaaatacttctttagaacctttctaggtgctagtcattattcttggcactttgcataatcttcctagtatgtgtgtttttgtaatttcttggttcttcctcaaaggcagctatcactttatactattgtcaatatatggaattcttttttttttttttttttttttttgacagagttttactcttgtcacccaggctggagtgcaatggcacgatctcagctcactgcaacttccgcctcctgggttcaagcaaatctcctgcctcagcctcccaagtagctgggattacaggcatgcaccaccacactcagctaatttttgtatttttaatagagacggggtttcaccacattggccaggctggtctcaaactcctgacctcaggtgatccgcccgccttggcctcccaaagtgctgggattacaggcgtgagccaccacacccagccaacatacagaattctagcgctattcacttgccccaaatttgcaacttctaacttgctgagagttagacaagagataagtaatatgtgaatcagtgatatgggtggtgagataaagagatcagcttcaccagatgagctttttccaaagttctgaccctcaccaattgagaattactgccacagggagctattaagatgtttggggtagtgaaaaaaacagagtggaaataacagtaagtgggggaaagccaaggtgcttttacttgaataaagcagagataagcttatacatagaattataaccaaatttgaaattatgaagttgctaaaacagttacctctacaaaagcctgctataaactgacttgattctctttaagcagatctatcagaagcaaaaccctaaaatatagtgaagtaaaaccagatctcacctgtacattcttataatctacatgctttccacacaagatacatttcttaagaggttctttataaggattttccattgaaatgggctagggaaaaaaacgaaaagtctgataataggatgtgttaattctgaattttaaaaggttactattctacattcaaatccattcaaaggattagttatacctttcttactgtgtacatattttgtataagcactttattttgttttagtttagcctacggattaacgcatgggaagattctggaataaagtacaatcttcatagaataaaattttatggcagaacaaaaatgatgtctgataagaaagtgttccaatgctttgctcagattgtagataatgaaaaaatttttagatttaaggaaacttacaacacaatagataacatatgccattcttaaatgagtacaatccctaatttatccatccccatgtctctatcaagtattttatcactatttttatacacagataatggcccatgacttactgtaataaaaggttctttgactttatcaccccaggctactatataagtttgtatcagtctttttggcttttctgttaccaccactgcctctaatgcttttgtcacagtgcctccttcctacagtcagtatggctgtctccaggatagaggttcttaatctagaaatggctttgaagcccatgactccctgtaatcgtatgcaaaacttcaaatgaatgggactgtgtgcctttttctgtggagagggtccataactttgattagagacaaagtgggatttatgaactaaaaaagaaataatgtccctttactttcttaaagtatggtgcatggattagattaccaagacagatgctcagagaaactagacaagttcttttgttttttccaattcctcaaactttccaatttacattcagctcacgtaactactcttcagctctgtgccaagtgctttgtatggtctaattagtgtcaaaatacctttgcatgtagcaagaacctgtgctttcagaaagtccatgttaatactatagccaacctatagctaagctttgtacagtctcttttcagttatctaaaattctgctcacccaaactaccttttaaaattcccatatcatttgcttacaaagggctatgtaaaaaaaaaaaaaacaattcccaaatcacatatccttaaatttaagatctaggaagaaaaatatggtattatagcagctttgcttctaatctaggaattcccctacttcaaaactcagctgactacatgactacaatcaattcatcatcatttctgaactcagagtaattatcaaattgttttgtcctacggcagaactctattcaagtagctaaaataaaagatgttagagtctaataccagatctcgttttaaaaagaaaaacattttggtcatatttgcaaaggccttactaatagaaaaaaaaattcttaccaggtcctcattgctggatacctgttgtgaacaacctcttctccaaagcactgcgattaaacagaaacagcaattaaccatttctttttcttagctgaatagctaaagatttttgtttttatggagacaggatgaattaagggacacgatattaaagaaaggttttgtattatattcagaatggttaaaaacttttatatttgggacagagtaagactcaacatgggtgtgctttccagggcttagggggaaaagaacatattttcccgcccatacctgctctttctgacatttattttcccttcattccatggttagagaaaattcttaatgcaaattcttataggagaagcaacagaaaggcactgtcataccaaaaagaaagtaacagacccgtcccagaaagaatttatagagaagcacagagaagataaaattgcaaaaattatgcaattttgttctgtttggggaccttagacatctggaatttgctgctgggcgactctggaaatgtcccttcctcactaagattatccagagatcttaggaaagtctctgctttttaagaaccactccaacttcctcatacgtttaaatactttaaaggagtggattagacgacactaaaacagtcaaaggcaattacagattcccacccatcttggagaaacttaatcgcctagaaaccagagtcgttttgctaacagggacgactctaaccattaggactaaggttaatgcctgcagcgctacaatggagcataggatatggagactttacccgtgtgagtcccgggatgtgtaaggctgacagcagccgttaccaagtgtgtcaacttcttcctccctagaccaccgcaaamagcaaccacagcggccatggttccgcgtttcttccacttcctttcrttccaaatcgttccgaaaggccccttccgctgctcttcccctgtgggctcgagtaccccgttcaaaggttccgcaggagaacgctgaggacccgcgagagtaggtgaggtttttcaatacgcatgcgcagcacctttctgttcgtgccctccctacgcggcaggtcacgtgaggcttatgattggacagggtagaagtttatgcgtgcttccggtccgcgagccctgagagctaacttggggtcttttcccaaggtggatgtagaagcgggctccggcgtcccactctcccttccatatgggcttagcgtctgggtcactgagaacgacgtctgaatagggccctgggtccttgccatggatgaatgtggttcccgcatccgccggcgggtgtctctccccaaaaggaaccgtccaagcttggggtgtatttttggcgctcccaccgcggccgagctcgagcccggagatgaggggaaagaggaggaggaaatggtggctgagaacaggaggcggaaaaccgcgggcgtactgccggttgaggtacagccccttctactctcagattccccggaatgtctcgtccttggaggtggtgatacaaacccggacctcctacgtcacatgcccactgacagaggggtgggagaccaggtacggaggacttggaacttgaaactgcaaacttttggcatccttcccagatgcaaagagttgaccagttttatcgccttcgtttacttctctcgtcttcgttaccrctgttaatcggcacttaggaggtattgattgccttgttatttacatttctatataaatatgaaatgtaaaccccgagacataaaagttgtgcacgcagcagttaagtggcatgactgagacacaaatctaggcttccagataactgcagctcctactgtacaaataaaatctgctgtttattgaagacccgttatgttaagctagttatattatctagattttacgacagtaatcaggccctgaaaagttgaratagtacagttcttgctccaaatcctgttgtcttaatcactttactatattgctgcctccaggtttgtgtgtcttctgtgtagcagaccactccaagtcagtattcagtttctcagtctcaattccaaattcctaggaactccttggagtgtctagtggtacaaccatgtttctgttagaggccagtcactgtagattgtagtctgggagggaagcgctgcagttatcagaaacttcgaatgcgctgacatttcagtagacgtctaccagtcttcctgctgttttagtacagctttaagaattacaatctggccgtgtgcagtggctcatgcctataatcccagtgctttaggaggcagagatgggaggatcacttaagcccagaagttcgckttcaaaaccagcctaggcaacagagacccagtctctacaaaaaaaaaaaaaaatttttttttyttaattagccgggtgtggtggcctgcacctgtagtcctagctacttgggaggctgaggcaggaggatcgcttgagcccaggatgtcaagactgcagtgagctgtgatcgtgcagtggctggagccactgtgctccagcctgggtgacagagccagaccctgtctcaaaaattagaatctcagtatcatcgtaacactcctgaacctgctgtttaggcaagtaatttaacctctttgggcctccatttcttcagctgtaagatatctatttacatataggtctgtgatccatatgtgaccatataattatatacttggtacagccctaggctgaagtgttttttgggggttttgtttgtttgtttgttttggtttttttgagacagagtcccactctgttgcccaggttggagtgcaatggcgcgatctgggcttaccgcaacctgcgcttcccaggttcaagcaattctcctgcctgagcctccgagtagctgggattacaggagcatgccactatgcccggctaatttttgtattttctgtagacacggggtttgaccatgttggccaggctggtgaagcttttattcttaatgaaactggaattgaccataagcgtttttgttctctttgcagcctaatgacagtgaagtggacatgtttggtgactatgatagctttactgaaaactcctttatagctcaagttgacgacctggaacaaaaatatatgcaactccctgaacataagaaacatgctacagactttgccactgaaaatctttgctcggaaagtatcaaaaacaaactcagcattactaccataggcaaccttactgaattacaaactgataagcacacagagaaccagagtggatatgaaggtgtcactattgaacctggagctgatcttttgtatgatgtaccttcctcacaggctatatactttgaaaatttgcagaactcttcaaatgatttgggtgatcattctatgaaagaaagggattggaagtcatcctctcacaacactgtgaatgaggaactgccccataattgcatagagcaaccccagcaaaatgatgagtcctcttccaaagtcagaactagttcagatatgaacaggagaaaaagtattaaagatcatctaaaaaatgccatgactggaaatgcgaaggcccagacaccaatattttctagaagtaaacagctcaaagacactctcctatctgaggaaattaatgttgctaagaaaacarttgagtcatcatcaaatgaccttggtcctttttattcattacccagcaaagtgagagacctttatgcccaattcaagggaattgaaaaattatatggtaatgctttttgctggaataaaaaaatttttttcctatcattaccataatattagtgcaagtaaatagaagcaaatgctttcatggtccatactgtttctcattttgaaaacaaaagatcagtgatctctcagccccttccattcctacctgtcctgctaccactgaacctctttccttccctcacagtcacacttatcaaaccagttatcctttctgtctgtttccttacctgacataattcctctaattcctcatctataagaaagggataataagttgttagcaagtcagattctggttcaaagacatgccaaattcaatgttggtaatgattttcaataattatattggtagcttctaagtaagaactttagtaaattaccccactctaattctgggttctgtgctctcattctctcacttaagatctgatgactgagacgtctaaacacagtgttacttttaatgtttaccttacctgacttctcaataacttacctgatgctattgactacacccttcttgaaattcttgtttctggatgtccttacaaccactcctgttttttgaccccgattgtctagtagagatcctcagctttcttagttgtatttccttggctggctctgtcttctctaccaaaacctagctgttgtggtatgtctttgacactcacatgtcttgagtgaaagaagtcagttattagtaatactgttgattaaaccaaacatctttccccccacaccagcagccgcagcyacctctccccacgggtgcatccctgccaccacccagatgctctgccttgtgctgcctttcccaaagctagacatctttaaagacagctgcaattaagttttaagtcagggatgtccaatcttttggcttccttgggccactttggaaaaagtattgtcttgagccacaataaaatacagtaacacgatagctgatgagccaagaaaaaaaattgcaaaaaaaaaaatctcataatgttttaagaaagtttacaaatttgtgttgggccacattcaaagccattctgggcctcatgagggccgtgggttggacaaacttgttttaagtgcaaagaagcaataatattaagaaggtatcttgtaatgtttttcaaaaatccagggtccttgcatatatttcagatatgtgtcattttagaccaagaagggacagttgctgccatactggagggtcagccccatcaaccttccacttcgtaagttttctggaactcctgttaggatcttatgaatgatatgaaaacttgggttcttgcagagaagacaatcaggttggagaagcagaactacaggaaacaaagtctaataaaagactctacaagaatccaaattgtgaggttcatggcttaagagctaatggtgtgtgttgccctggaagtagacgttaactttcttccctctgttcttccctctgtttttctgctagcaccttgctttttgtttagtctgccagaatgaatatcctgaggacaaggctctatctaactcatctttttgtttttgtttttgtttttttgtttttttttgagacggagtctcgcgtgttgcccaggctggagtgcagtggcgcatctcagctcactgcaagctccgcctcctgggttcgcgccattttcctgcatcagactccccagtagctgggactacaggcgcccgccaccacgcccggctaattttttttttgtatttttagtagagacaaggtttcaccgtgttagccaggatggtctcgatctcctgaccttgtgatccgcctgcctcagcctcccaaagtgctgggattacaggcgtgagccaccgagcccggcctaactcatctttttcttaactagcactgtgcctggtatactctggtaggttctcaactgctggggattgtcacttaaaaatgcaaccttagcactttgggcctagttcctcatctataaaaagggataatttttttttgcaagttagagtctgtgttaaggacatgccaaattagatgttggtaatgattgtcagtaattacattggtagcttctaagtaagaacttcagtaaataacaactttttaaatctttttacctctaaatctggcttaataacatgaccagattaaagcataaatgcatgtgctactttttattaagctaaagcrgtggttctcaagtgtggttcctggactgcagcatcaacatcacctggaaayttgttgaagtgcatgttctcagacacttccctagacctactgcgtcagaacctctaggaatacgacctggcaatctgtgatcgtggctcactacagcgtcaacctcccaggctcaagcaatcctcccacttcagcctcccaagtcgtggggactataggcatgcgccaccatacccagctaatttttttatattttgtagagatagggtctcattttgttgcctaggctggtcctgaactcctgggcttaagcagtcctgctgtctcagcctcccaaagggttggaattacagatatgagccattgtacccggctagtttttttttttttttttgatgtgaagattgtattcataaatattagttattttgtcatgttatgcttaaaaatctgaattggataaaatgtggctatggttaagttatactttggcataaacatctaatttgataactcgggtgataccaatctgaagtatttttcaatatttattgaatattaaatttaagtatttttgaaatatttttaaagaaaatattcacagtcacttgtagtatttgggaatcacccaaaagcacaataagttaaagttacttgtaactgtcattcagatataactttcttttttttttttaatagagatgggctcatcttgaaatcctggtctcaagtgatcctcttgccttaggctcccaaagtgctgggattacagacatgatccaccactccggggcaatgatctgcttttttttttttttttttttttttttttttttaaacttaactgtatattgaacatacatagatccatctattcttcatttttaaactgcaaagaatctcattggttgattgtacaataattcattcggcctttacccccaccaccatggcactttgttacctacaaacaatgctgtgttttatatgctttggcttccgttctatagatgtagaatcccaaaagtaatactaccagatcaaaggcaatgtgcagttctattttatactaggttactttccacaaggattctagcagtttatgttctcacaaccgtacatgaaaatggctgtttttccccacattagtcagctctggattttgcatgtgtggggctttttttttttttgatagttatttgttttttattttaaaaatttattttgccaacccagtagagaacagctgagcatcttctcatgtatttattggccatttgcatttctgctgcttattggccatgtatttattggccatttgccgtctgctgtgaaatgtcttaaattttttgcccatttttctagtgataaaacactgaagcacatttttaaagacttctgatgatttttattgtcagattatcctacagagtaattaatactagttttcacacggtatcttggatctgatctattttcatgaatcccgccttgccaaattgtgggaatcctaggcgtgtcagttaataatcctagtcttttgtggtttaaagagttttaacagtttaaaatggttttggacccattcgaagttcaggtctccatgagagctagttaaagtttttattagtttgtgtaaaacctaatagatttgtttccctccttcccctgcttctctctgagatggcttttggctgaatgaggaagggaagcttatataatctccttgcagaacataagaggaagacattcgaattcacataggtccttgtactgtccctttgttcctctgatatctcagatggcactccttgtccacgaggctgctacctgccctgctgtaatattggacccaagtctgcagctggtgaataaatgggctggttgcccaccttgctgcctaggcctgaactaggctctcactggctgtactacttgcacatttgggatttttgacatgtaacattggttataattaaatttatccttatgagaggattgctccacaggaagggatttgattttttttcttagaaaacttttgagtttcaaagtttggaaggggaaaataatgcctttttttttttaattccacagaatggcaacatacttgtttaacaytgaattctgtgcaagaaagaaaaaatttaatatattccttgccaacaagtggtggaaaaaccctcgtggctgagattttaatgctgcaagaactgctttgctgtcggaaagatgttttaatgattcttccatatgtggcaattgtccaagaaaaggtgtgtgtgtgtgtatgttttaaaacaaatgttatttgctagtactttgacgttaagatctgtaaatgtgataactttgtattgttgagaagtacctcttttttttttttttttgagatggagtcttgctctgtcacccaggttggagtgcagtggcaccatcttggctcactgcaacctccgcctcccaggttcaagcgattctcctgcctcagcctcctgagtagctgggattacaggcccatgccaccatacccagccaatttttgtgtttttagtagaggcggggtttcaccatattggccaggctggtctcaaactcctgatctccagtgatccacccgcctcagcctcccaaagtgctggtattacaggcatgagccactgcgcctggtgagaagtacctcttaatgatggagaattaatatttttagaatgtataaaagcagtatacactacctaaaatatcttcaaatactaattaccagttgttgaaagttttactttttctaaactggtggattaaacatcatcttaaatgttctattactatttaccctgctttttcttttttgagatgtagtctccctctgtcgcccaggctggagtgcagtggcacaatctctgctcactgcaacctccgcctcttgggttcaagtgattctcctgcctcagcttcccaagtagctaggattgcaggtgtgtgccaccatgcctggctaatttttgtatttttagtagagatgggttttcatcatgttggacaggctggtctcgaacttctgacctaaagtgatcctcccacctcggccccccaaagtgctgggattacaggtgtgagccactgtgcccggccttaccttgctttttcaagcagaaactattactaaaatgagttattctgatgcttttttttttttttttgagacagtcttgctctatcacccaggctggagtgcagtggcatgatctcagctcactgcaacccccacctcccagactcaagtaattctcatgccccacgaccccacccagcagccagaatcgcaagcacacgccaccacgcccggctaatttttttatttttggtagagatgatgtctcgccatgttggccaggctgatctcaaacgcctgtcctcaagtgatccacctgcctcagcctcctaaaatgctgagattacaggcatgagccaacacacccctgatgctttttggtatcaaaggcgccagttgaaatttattttcacatgtattttagaagttgcatttattttgcaaagatcgagacattacagcatttcttacgtatgtcttgcctgtgaccttgttcctgttgatgggtattaaacactactttagcttttttgaaccccatgagcacctaatggggggttttttacttgtgttttttggttttgtttatttatttatttttgagtcagggtcttgctctgtcgcccaggctggagtgcagtggcatgaccaaggcttactgcagcctcaattctctggactcaggcagtcctcccacctcagcttcccaagtagctgagactacaggcctgtgccaccacagccagcgaattttttattttttatagagatgaggtctcactgtgttgcccaggctggtctcaccttcctgggctcaagtgatcttcccgcctcagcctcccaaggtactgggattacaggcattggccacaatgcctggccaatttttctttattttaactaatattctagatttcaggtttgtcaagttttggtatagaactcggtttctttgttgaagaatatgctggaagcaaaggaagatttcctccaactaaaagaagggaaaagaaatcactctatattgccactattgaaaaaggacatagcttggtgaactccttgattgaaactggaagaattgacagtctgggtctggttgttgtagacgaggttggttaatacttttgtaatttgtcaatatttttattatactaaatatttattattctggttattgtgtggatctacttagtaccttagtacctctataaaaataaatttatttgaaaatatagacaatataggtgaagacattctatgcttgataatcttaaatttggttttgtgtcaagtgtttcttgaagtgtgaacacgtatgtgtgtagtatacaattttatwggctgggcgtggtggctcatgcctgtaatcctagcactttgggaggccgaggcaggtgaatcacttgatgttaggagttcaagaccagcctggccaacaggtgaaaccctgtctctactaaaaatacaaaaattagccgggcgtggtggtgggygcctgtaatcccagccactcgggaggctgaggcaggagaatcgctgtaacccaggaggtggaggttgcagtgagctaggatcacgccattgcactccagcctgggggtcaagagccaaactccgtttaaaaaaaaaatttttttagtagtacttatgaatcccagatttataaggattttgtaccaaaagctcattaacctaaataccagtgaaataatatacatgtattatagttgttatattcaaaatacttaaaagttataagcaactctttacaaacaaatttcatatgaatatatgcatgttttatatgagcaytatatgaagatttacttctctgtcctttttaaaaaaaatctcgaagttgcacatgattggtgaaggaagccgtggagctacactggaaatgaccctagcaaaaatcctctacactagcagtaagtattttttcaaatgaggtcatgaattgatttataatcaagagacttataaaatacttaattctatcactagctacagtatgtaacctaaagcaagatacttaagctttttgyctttgttttaaaatttctaatgaatagaattttgaaggtaaatgaaattggtatttgaagaagtcctctattattatccgccacttactagctatgtgtgcccaggcacatccctcaacctctatgtttctttatctgtaaaacaaggataataatggtaccagcctgatgggattgttgtaaggatagtgtgagttaacacatgtattgcattcagcagtgcttagcacactgcattcagtaagggtttgctgctgctactgtggccatcatcatcatcaccataataatacatataacataaatattataataataatattgtaaagcgatacatttaaataggtcagtttaaggagctattttgcagcatcaggtagtctttaaagtttatgaaaaatttattctaaatgtcataacctactattgatatgctattgcaatatttaccttatatatggaaaaattaactataaaggtcaaatcttaaaaagtatttaaaaaatttcaacagcaataatatttaagcaggttatagcattttataattgttcattcaaaaaaatattgatcacctactgtgtgctaggcactattttaagtgctagggatacagcagtgaataaaatagtccctgctttcatcaagcctgtattttagggcatccctatttgaatattctytgaacagctaagcctaactaaggcttagtctgagccaaactcatttccttcaaagccgttcttcagcctgaattctcagccaccactctccagccagccaagccagggtcctacatattctatcagcaaccaaatcctatctggtttacctcataaatatattgttacttctgtctctcctatccctcattaccactaagtctttagttcagtacctcatcctttctacctggattgccacagaaatcaccaagttcttctgtgtacccactgcccttcatccaccaaatccatctttctttagcgcaagaagaatgatctttcccaaatgcaaatccaattagtttattttactgtttaccattctttaatagctcccctttgctttctgcataaatccctaatttcttagcacagcctttcttgatttgaccccatgcccacctcttcagctttgtagtctatccttatggaatgagaaggatactcccacttattcctctttcagtgagtttcttgaatgatcatttcaagacataggagcaatgaagaaacatttgcaaagaaggcctatttgggttttcattcaatagttaagtctatagaaagcagccattttgtattgcccaggatgtcatatggcttcataagcttcactccacctttatttaaaacaacatcaacaaaaactatagtcccaactactcgggaggttggggcaaggagaactgcttgaacccaggaggtggaggttgcagtgagccgagatcatgccactgcactccagcctgggcaacagagcaagactctgtctcaaaaaaataaataaataaataaaattaaaagttagcttgatagcaagatctcatagaggacttttcatgggccaagagttcgagacgcatttagccctctatcctactacctctacatctgtctatagccatacctgtggaacatatcatagctcttcgtaaaggggatccagatagacagttataagcagatttatactcatttattattgtttagaagccttaatatcctagttcttgccaagtttgaaactctgtaaacttctaagtagtaactttcaggatacctgaaaaatttcattcttcaaatgccagattaatactctggtaatatatttgtagttttctttttttaagaggtcaggtctcactgttgcccaagctgcagtgcagtgacacaatcatggctcactgcagccttgacttcctgggctcaagcratcctcccacctcagcctcctaagtagctgggactacaggcgtgcactaccatgcccaggtaatttttaatttttttgtagagatgaggtcttactatgttgcccaggctagtgttgaagtcctgccctcaagcgatcttcccacctcagcctccgaaagtgttgagattacagatgtgagccaggcacccagctatttgtatttttcttacttacctctcccacccctttcccaaatcactcaggaagaattcagagcacaaaagacttgctaaaattactttatgatatattaaataacatrttttccttaacactttggcttttgtttgtttgtgttttagaaacgactcaaattatyggtatgagtgcaacattaaacaatgttgaagacctacaaaagtttcttcaagcagaatattataccagtcaatttagaccagtatgtacctaaggtttgcactgtattgatttgtttcgtattcatctaacttagaaatgaaagtagtaaacataggatttaaagaattctgtagagtagtgaaggggcatattttactcaccatgactatatgctaataagaggttgtgtatagagaatttaagagtttgtgtataggtcagggatcttgggttgggtcactaatgtatctatagcctggcccacaggctgtcaatgaacgttcattgaatgagttttcccaaacccccattttattttttcacttcttattctgtaaactaaatttttttatttggcaaaattttagtgagacatgttttgagttattggcacattaaaaaatatatcttaaaatttaaaatatttttaaatatttatatgttagtagttataatacttttttaataagttaaggcttcacatggatttacatataaactcctcaacagcagcattcccaaaatgcttgaagaaagtaaacaaatgtaatttgtggttatttgaaaatagcttgtaatgtatatatatttttgtgtgcastactagtgtgtatgttttgtgcctcaatagtttttcagtgtctaaataggttttcagaaaatatttttttaattgccaaattttaatttgaaatttgatgttttagctgggtgcagtggctcacacctgcaatgccaacactttaagaggccggggcatgagaattgcttgagtccaggagttcaagaccagcctgggcaacatggcgagacccctgtctctacaaaaaattaaaaaattagggcagccaggcrcggtggctcacacctgtaatcccagcactttgggaggccgaggtgggcagatcacgaggtcaagagatcgagaccatcctggccaacatggtgaaaccccgactctactaaaaaatacaaaaattagcagggcatggtgacgcacgcctgtagtcccagctactctggaggctgaggcaggagaatcgcttgaacccagtggggcgaaggttgcagcaagccgagattgcgccactgcactccagccttgcaagagagagaaaaaaaaaattagagcatattagcactcacatatagtcccagctacttgagagggtgagatgggaggatcacttaagcccagaaggttgaggatacagtaagctgtgtttgtgccgctacaccccagcctggactacagagtgagaccctgtctcaaaaaaaaaaaaaaaaaaaaaaaaaaattgatgtttttacatttgaaccagataggaacattttcaagagatattttttaacttaattgccacagtagacattgttattgttattataaaatgcaatgagctgtgtttacaaactgtttttgtcgacaaataaagaaaaatagtgtggtggtatttagaattaaaactgatgaataataagacagaaagttttggctggacacggtggctcatgcatgtaatcctagcactttgagaggctgtggcaagaggatcgcttgagcccaggagttcaagaccagcctcagcaacatagaggaaccccatctctataaaaattagcctggcgtggtagcgcatgcctgtcatcccagctactcaggaggctgaggtaggaggatagcatgagccctggaggttgaggctgcagtgggctgtgatcatgctactgcactccaagcctgggtgatagagtgagaccctgtctcaaaaaaaaaaaaaaaaaaaagacaaagttttagatcttgagacataaaacagatgataccttagtaaaagttaagaacaccaagactcacactttttgtgacaaatacagaagtgtgtggtttcttttttggatatgatgtttactgaattcaaacatatttcttcaaggatattgatctctattttgattttaagggaaaaagagaccaaaacagaagaagaagaaatggtaaagcaagaacttttaagttgaagcatgttttatgtatcttagaaaagctaaactcttttatagctgtcctttcttaacctattttacaatatttaaaacactggaaagatgaatttatatgtcgtattaattgcaaatgtccttttaattcaaggttgagttaaaagaatatctgaaaataaatgatacaatatatgaagttgacagcaaagctgagaatggcatgactttttcacgtcttcttaattataaggtaacattgataacmtttaaattccaggttaccagactttgtgtctggggcacaacaagagtttccaatggattccgtagaatagtctagatttttcagagaaacagctgatgcttgacatttgttggacaccatgcagactgccagttcaagatagctcgtttccagtttcaacattagatcacaccatattcttttctatgacatcatatctttgtgaagttggggtttttacagttgctgtaagcaagtaccgtgtgaaaatcaatctggaacagaagagaatagctgtgtccagtcttatttcagattttgaaagacagtaccaagttgtgcacacatcccattagtgagctgttgtggttatttaagaatgaaataaaaatattttttcactcaactratgtgtattatttattctaacagctactaaattgtgaggaagtacgtatttattaagttgtttggacctcactatttaattaacaaaactgtaaagtatttctttgggcmctggggctgtgaacaaagaaaatttggaaaactctcctgtaaatgtttattcatacaacaacaacaacaaaagaataatttatggaccatgtagttcagatattggtgtataaaatgttaatgtctactatgtaaattttagtgttttatgacttgtatgaaggatattaaaaaggggaagaagggattatacagtagttttagaattctgtgaagatgtgttattctacagctatgtctttagtaaagttgaagaaatagattttaaataacttcacattttttcttcatgttctttgtgttcctcatgtgactacaaaaattgtcataattcagtagtatgattgaatctgtgtttttgaaaacttaatggttgtaaagggcatgtcttatttacacagtccgttaactattattaggatcaatctgtgtttctctctgtggacttttttgttctgctgtggtggagatgggcatgtagtgaggctattaataacattaactattttcacttctttaattttctttaattcacttgtttaattctaggtttttttttagactaactagacctaagaaaatcataataacctaaaagaaaagtgagattgaacattttgatgtttaatatagatttcatcttttcttttaaatgatcagatttattaaattagaagtttagaattatagatggtttatttacctttcaaatcacactggtaaaaaattgacagggtttcatgtttactaaccactttgttcctacatcttgttgttttgcagtattctgataccctaaaaaagatggatcctgatcacttggtagcattggtgacagaagttattcccaattattcctgcttagttttttgtcctagtaagaagaactgtgaaaatgtagcagaaatgatatgcaaatttttaagcaagtatgttaatattttttaaatagcctgttttatttttattaggaattacagactatgtattaattttattgggcaaacactaattatgccttgcaaaacatcatattaagttgttttagtatactgaaggccttgaccttgaagaaagaaattttaactgtgaaaaatcacatgtgaaatagccagagaaacattctaaggtggctgggcaccatggctcatgcctgtaatcccagcactttgggaggccgaggtgggtggatcacttgaggtcaggagtttgagacgagcctggccaacacggtgaaaccccatctctactaaaaatacaaaaaattagctgggtgtggtgccttgcacctataatcccagctactggggaggctgagacatgagaatctgttggacccgggaggcggaggttgcagttagctgagatcgcactactgcactccagcctgcgtgacacagcgagactccatcaaaaaaaaaaaaagaagaccaggcacggtggctcatgcctgtaatcccagcactttgggaagccaaggtgtgcggatcatgaggtcaggagttcaagaccagcctggccaacatagtgaaatcctgtctctactgaaaataccaaattagctgggtgtggtggcgtgcacctgtagtcctagctactcgggaggctaaggcgggagaatcacttgaacctgggaggcagaggttgcagtgagctgagaccacaccattgcactccagcctgggtgacagagggagactcagtctcaaaaagaaaaggaaaaaaaaaagacaaaaccctaagactatatgtatgagaatgttaagtaatattaggtcagtgattcaaaaccttgggtgcatagtgaatcatcttggaggcttttaaaaattccaaagtccaggctacatcttagacaaatyagaatctctgggagtgacacccagatatcattttgtaaagctccccaggcaagtccaacatatagccaaggacaggaacaactggcttagtcagtcaaaggactaatcactgttaccactgtggaaatgaattgtatcttccattgcctttttttctcttttccttttttttttttttttttcctgagacagggtctcactctgtcacctatgctggaatgcagtagcacaaattcagctagctcactgcagcctctgtctcctgggctcaagtgatcctcctacctcagcctcccaagtagctgggactacaggcacacaccaccactcccaactaattttttgtaattttcatggagatagtatttcaccatgttgcccaggctggtttcgaactcctgagctcaagcaatccgccccccatagcctcccaaagtgctggaattacaggcgtgagccactgcgcctggcctgcctttgttttcttagtaaacttcacacttagttgtatggacatttggatataatttcctgagtaagaaatgtgttgtcttataattttgtagtatcttaatattggctctgtcgtattcatagagataagtatgaagttactttaactactaacagttcagttttttatacacctgtttgtcccatgtgtggttttatcattttctgagatttctttcagccccttagctaatgctgtatcactattcatagtctattaacctgaatgctaatctagtcaacctctacctcctctttcaatcctactatcatggattggtctaagatagacttaaatttattgaatagcaaaatataaaaatgtttggaataagatgaaggagttgctcattttggtaacagtctgcttttacaatgattttgattataaaagcttaaggaaattaaattatcattaaaaaaattctcagtaaatcattcattttcttagagtaattcaaggtaataagatggagacactggctaagtgatggaaacattgtaggatgtgaagtttctaaagtgcaagtgtttaggcagtgttttaccatggaagtatgatttaataatatgtatgtttccatcttcagaaaagaaaatttatgtctttaaaaaaactatcccctataaagatatatgttataaagaaaaaaacagttataacatccagagcaaaggtctaaacctggtgtccatggattcaaaggaagtacaggaatgaattttaggaaatccacgaaccctctgaaattatatgtaaagtgttgtatttatgtaaatagttatatttttccttttttttttttttttttttagacaaggctttgctctttcacccaggctggtaggttcatagctcattgcaacctcaaactcccgggttcaagcaatcatcccacctcatcctcccccatagcctggaactgcaggtgcatgcaccaccatgcccggctaatttttgttattttttgtagaggtggtcttgcttcactgcccaagctgatcttgaactcttgggctcaagcaatccttctgcctctacctcccaaagtgctgagattacaggcatgagccatcgcatttcgcctttccttagttttgataagattttcacagggttctgtaatccacaaaaagattgagagactgcctaatagttaatgaagtcagaatcaaaattctaagaacatttaatgtacttaactcaatggaaatagtacattaaagaatgtttacattagcatctactaaaatgaaaatggtagaaattttgtcactaaaagatcaagggctcatatttctaacagatctttttcatagggaatatctgaaacataaggagaaagaaaaatgtgaggtgattaagaacttgaagaatattggcaatggcaacctgtgtcctgttttaaagcgcactatcccatttggagttgcctatcaccacagtggcttaacaagtgatgaaaggaaactcttggaggaggcctactccacaggagtgctctgtctttttacctgcacatctaccctagcggcaggtgtcaacctaccagctcgaaggtaagagataagtaagtgttgaccaggctcagaacttttccatttctagcttgcgaggagttttgttgttttatgctttctcagtagtggatgagaatttatcaaatgttcttttagcatatgctgagttgattggttggtttattttctttaatattttaatgaatatgtaatgaaatatgtaatgaaaaataacgttaatagatttcttgatattagaattccatcctttctgctctttatatctggttttgatgttagggtctattaatctggttttgtagaaatagttggcaagtgttttaccttttttatgatatgaaagagtttatttaacatagagatttccttgaaatcttggagagctgatccataggcaatttgtgtctaatatatgtattttaaagcaggcccttgattacctttccagttattaccaaaggtgtaggcctgtgtaattgacttctmccctttataatttatgatcatggggtattttgctaataaatgatcaatttttataaactttccatgagtgtttaaaaaaatatgtattttcagttgaatatgcagttttgtacatctcagcgagatcacagaggttcattgtgttatcrgcttctctattttcttactatatttgattccttggtctatcaatttcagagaagtgtgttagtctcccactttaattatgtagttatcagtttctcctttttgcatctctagaagttattactttttatatttcaaaactatttagatatacaaaggtttacttcaaatatcttattgccgaattataccttttatcaatacaataaatacttgtttttctcatttaataattttgctttgaataccaggactcattttttttttttgccacgtatgtacctttttccattcttttattttcaatttctgtctctsattaagttttccatttttcagacaattgaagaaaaaaatgaaagttatatatcctgtttctattattccagtggttactcttaaaattttaagttgtaaccaaacattttttattactttagaattaatcaataactgtcctctcctgaacataaaaagaggcttagcatgtccttagtatattctactctgccccatgaatgttgcaattacttagaattttagtgccagatttaaacattttctttcatcttatgtagtatttaaacttacctgtaaatcatacttcttttttgcttaccactgcctcttatatcccacatctttcttctctgatttytttttttttaattttgccttccttgagtaatcctttttagaataccgctttagggggtaaaacattttgactctttgcatagttgaagatatctgtattttggcctcacacttttacacttcactagcaaaagaattctagattcaatttttttcctttagggattttgtaaatattgttccatattttctagaggccaatgttgctcatttttgtctctgcatggattttctgtttttcttttccagaaacttttagacttttctctttaacctcccaatttygtcatggtgtataataatagttgtaattactacattcccctcccyttcatgtagtaacaactttacatgcattgacttgatacagcttcacaayaactctgtgaggaaggtcatattttattacacacctattatagaaggggaaactgaggcactaaataattaaataattttcccaactttaaaaagttacataactttttcccaactcattttccaacaaatgagttttaaagccagtgtttgaacccaggaagtttgattttacaatcccaacagtactacttttcattcatagggcttrgcacttgggtggatgcttttaatctaagctttatgcctttcttctttgagtaattttttttctgttatttctttytcttcccattatctctgttccttgcttttataatttcacttaggcagggttgaggcctcttagattcagctttcgtatctcttttcttacacatttttcagaatgtggaagaatgtaagcacacgtttgtgccatgtaatttttttcaactttaccttccatatcaaaaaatcagtttttttgtaatcccagcactttgggaggcaaaggtaggaggattgcttgagcccaggagtttgagaccagtctggacaacatagcaagacctcatctctactaaaaaattaaaaacttagctgggcatggtggcatacacttgtgatcccagctgctcgagaggctgaggtgggaagattgcttgagcccaggacatcgaggctgcagttagctatgattgtaccactgcactccagcctgggcaacagtgagaccctgtctcaaaaaaaaaaatgagtttttaactgatatccattaactacattaactgtatccattaactattttcattcattattcagttcttcaattgaattttcttttttgtgagacagagtcttactctgttgcccagtggccaggctggagtgcagtggtgcggtctcggctcactgcaacctctgtctcctgggttcaagcgattctcctgcctcagcctcccaagtagctgggattacaggcgcccaccaccacacctggctaatttttatatttttagtagagtcggggtttcgccatgttggccaggctggtctcaaactcctgacctcaggtgatctgcccaccgtggcctcccgaagtgctagattgacaggtgtgagccaccacacctggcccttcaaattttttatgaatttttaaataaagttaatttttttttatttctaagaactctcttttgttgttctttccttataatagtctactccttttttttttttttttgagacagagtctcgctttgtctccaggttggagtgcagtggcatgatatctgctcactgcaacctctgcctcccgggttcaagtgattctcctgcctcagcctcccaagtagctgggattacaggcacacaacacaatgttttttagtttttgtgtttttagtagagacggggtttcaccatgttggccagggtggtcttaatctattgacctcgtgatcctcctgccttcgccttccaaagtgctgggatttacaggcatgagctaccacacacggccaatagtctactccttttttttttttttttttttttgagacggagtctcgctctgtcacccaggctggagtgcagtggcgcaatctccgctcactgcaagctccgcctcctgggttcacaccagtctcctgcctcagcctcctgagtagctgggactacaggcgcctgccaccacgaccagctaatttttttatttttagtagagacggggtttcactgtgttagccaggatggtctccatctcctgacctcgtgatccgcccccctcagcctctcaaagtgctgggattacaggcgtgagccaccacgccccgccaatagtctactcttatattgkggatataatactctttggaattttctgttaatgctaattaggatttttaaaagttctcttctgatccctatattatctggttttgtggtcacttattctgtatattcatgttatgtttcttttatgttattagttttcttcaagtatttggtaatcttttctgcatatgagatttataaataaagaggaagttgactagtataggtaaacaataggttttttcttccctttggataagaaagctgactaactgactatagacttctgtatatatgaacataattgaaattgctttttttttttaagagatggggtttcactctgttgcccaggctggagtgcagtgatgtaatcacgatttactgcagcctcaacctcctaggctcaagtgatcctcccaccttagcctcccaagtatctgggactacaggggcacactaccatgcccagccagttttttgttgttgttgttgttgtttttgtagagactgcatctcactatattgcccaagctggtctcaaactcctggactcaagcaaacctcccacatcagccctccaaagtgctgggattacaggcatgagccactgagcctggctgaaatcaccatttttgtaggtcaaaaacagttgacatctgcaattttatacagttcaaaataataaaaattcataaatagatatgtatatgttagtggtgtatggtcatattttttatttatggagtataaagtccaaacgctttggagactactgctacagattgatcataggcattgcagctgggcagacttgagttcaaatgatagctctggtaattactaattttttagtttaggataagtcagttaactgagttgtaattaattcctttataaaaatgaaataaaaaagtatattataactaagagttttgtaagaattatagataatatgtgtaaaaacctaagaaatcatagattcttggtaaacactagttacctattattttgtgttagtatgtcattaaatttaatatcacaaatatataatgaaattaagaattttttaaattggtgctgtttgctgtagagtatcatttttcattaattccacagagttattttaagagctccctatgttgctaaggaatttttaaagaggaatcaatataaacagatgattggcagagctggtcgtgctggaatagatactattggggagagtatcctcatattgcaagaaaaagacaaacaacaggtaatactcaatttggttggttggttgtttttgtctttttcttggttgttggtctagcccttttatgaaatcatcttttaaaaattaattattaattttctttaaatgatgctttctttcctatrtgattaagaattagagtggtttgaaaatgtatgtatttcagacaatgaaaaaatatttttcctatttgtttttcttccatttttaatgaagataaatgttaaattcttttgtctttacttttttggtctccttctggctccacaagatttatgtaaagtataaaatatttatattaaataccatttatttttaataataacacaaggcatggttttgctttaacctttataggtattggagttaataactaaaccattggaaaactgttacagccatcttgttcaggaattcaccaagggaatccaaacattatttctctctttgattggtttgaaggtatttttcttaaattttttatcttattactgttatctgagacaatagaggttaaaaagttatgcartaactttatatatgcaactgtgtagattttatactaattttttatttaataattttttcttttaatttttttctttttaattttgttttctcatccccttcagtgattaatgtaaataatttttaaaagatcatggaatggttaggtgcagtagctcacacctgtgatcccacctcttagggaggctgagacaggaggatcgtttgagcccwggagttcaagaccagcctgggcaacatagcaagaccccatctcaaaaaaaaaaagatcactgaatcctaatgcttggcaagtggttggcacttaataaatacttgaattaatgaaattggcttttttttttcttagagatggggtcttgctatgttggttagattggtcttgaactcttgtcctcaacagtcctcccaccttagcctcccaaagtgctaggattataggcatgagccactgcgcctggcctgttttgtttgtttgtttgtttgttttttctttaatctgggacatggtgatgaaattaactttggaactgagcgtgggtgaacttccaagttggggcatcagtggagaatctggatttgagaagccagaagcagaggctggcccagtgggtttcaattactatgtcaaaaactttttcagggaggaatagaaagataacatgatggtagatagagggatcaagtaaaggttcccctgcccccctgcactcttccacccccagtgttaactctaatcatttaggtaggaaacagtacaaaaacaaagtacattaataatccaaaaaccaagtatcagttcttaaatatcttaaaagtataattttagcttaattgaatactatattaataatgatttttattaaagtgggaagaagcaatagaaaatgtctgtgctccattatatttttcttaccccttatattggtttaatatgaaattacgacttaaattttccagttgaaatagcatcagaattgtaagagagagaaatatacttattgattgactatattttagtataacatgctgatttcattgaaattggctaataaaaattattctaattcagagtcagctctacatctgaatactaaatggagggttaagtattccttatgattgccattgtaagttataaatagtgaataacagtgaaagaacaagaaatggagataggaatgagagagacaaaaataggtagagatcaactatttttaggtaacattttaggcaaaatattgtctgacgctgttttagtggaaacttgtattttttttttcagttctttttttaatttattttgttttttgttttttttttattatactttaagttctagggtacatgtgcacaatgtgcaggtttgttacatatgtatacatgtgccatgttggtgtgctgcacccagaaactgttgtattttcctttttttttttttaatgcaacttttagagctaaaggatrtttttacagttgggtggaatgcagtgcagggaagatccctaaaggaggctgagtgagaattagtgaaaattggttggggagtaaatagcacagttctggagatattgtgaaaaattatttaaagatctatycaaaggagttttggaatgaaaaatgagtacatgttttcataaaaagcatgaatataataactatcatccccctaaattttttgttaatttttaattgccattataaatttatatatgcaactgtgtagatttaatactaattttttatttaaatagctttgaggtatggaaatgagttatcttgattaatatgcattcaaggtgatgccttgaattaaggaaaatgctccaatgatatcctgaattgtttcagattgcaacgaatcttgatgacatctatcatttcatgaatggtacattttttggtgttcagcaaaaggttttattgaaagaaaaaagtctctgggaaataactgttgaatcacttagatacctgacagaaaaaggactcctacaaaaagacactatttataagtctgaagaagaggtccaatataattttcatattacaaagttgggacgtgcttcatttaagggtaagagtttacctaaatcttattgatcataggaaacacattggaaaaaatgaaaattaaattatactttctttaagctgggcacagtggctcacgcctgtaatcccaacactctgggaggccaaggggagcggatcacttgaggttgggagtttgagaccagcctggccaatatagtaaaaccctgtctctactaaaatacaaaaaaaattagccaggcatggtgatacatgcctgtagtcccagctactcgggaggctgaggcacaggaattgtttgaacctgggaggcagaggttgcagtgagtcgagatcacaccactgcactccaggctgggcaacagagccgagactccatctcaaaaataaaaaaataaaaaattatactttctttaagttgtatttataattttatattaattacattaatcttattttataagctgataactccttcaactttcaaaagttgaaaaatgttttgaattataagtactgcagaagtatatagagaataaggtaggcatccctccttcatgcttccctcctagcaaccatacaaatcttaatattctaccaagaataacaatttggtgtatatctttccagacctttactgtacatttcatttcagtgcataatatgtacatatgtacagttttaagtttttgtctttaaacaaataatcatttatattattctgaaactttttataaattaaaaaaattttttttctttttttaaatatggaggcaaaatctcgctatgtttgccagggtggtctcaaacttctcacctaaagtaatcctcctgcctcccaaagtgctgagattacaggcatgagacaacacatttggcctgcaacttgctttttttcctgaatataatgtcttagagattgtttcatgacagtgaataaagtgttgtgggggttgttttggttggtttgtttgtttgcttgtttttgacagggtcttgctctgctgccgaggccaaaatgcagtggcgcaatctcagctcgctgcaaccttcgtctcctgggctcaaatgattctcccacctcagccccgcaagtagctgggactacaggtgcatgtcaccatgcctgactaatttttgtatttttagtggagatggggtttcacgatggtgcccaggctgaggctcttttttaatgaaaaataatacatgtctgttgttaaaaaaaaaaaacctaagaactcagaattatgttaaggaaagtgccatattcctgtcccatttcaggagctactactaccagtttgatatgtattcttccaaatatttttatgtgtgtatttatttttcaaatggaatgatcatttaaatatttttttccaaattacatttctcataagatatcatgaacatcttaacagatgagtctctttaaatctatctcatttttcttttaatactacagtcatctgtagtatggatgtaccataatttatttaaccattcgatgttgatggacacttgcattcttttttatttttctctgttataaacaaggcgcatggacatctctatgtattttggggtacatatggaaatgtttctctggattagattccccaaaatagttggttcagaaggtatgtacttataaagtgttgatgagtactatcaaaatgacctccaaaatagttatatagtaagatgttataagagattttgaagactttttgctatatttaagcaatttctacacaatatttaaagccatctctttgcccctctggtaattgtgaaagattgaatatttgtatctttcttttaggaactatagatttagcttattgtgacattctgtacagagacttgaagaaaggtcttgaaggacttgtgcttgaaagccttcttcatctaatctacctaacaaccccctatgatctggtttcacagtgtaaccctgattggatgatatacttcaggcaggtgagaatataacgtttttcaacttaggctacttcgtttatgaattattacatgctgttttgttttgttttttagagatgaggctttgccatgttgcccaggctggtctcaaactcctaggctcaagcagtcttcccacattgtcctcccaaagtgctaggattacaagtgtaagccactgtacccggcctattatatgctttttatgaagtgattattcactttttttctctattaaaatatatttggaattggatatttttttytttcagtttttaaaaattataatctggcaacagcatttatggttcgtttaactttaatgttacttttctcttaaatataaacatatttgttattgaaaaaagtaaaggttaaaaaaaagaaaaaaagattatccgtggtcctatttccccacagaaagttactgttatgatcactgcatttgataatgcctagaatgcaaagaaaacagtgaaaaccatctctgatgatttagagtttaattacatgaaagctcggtcagagccaagtatgataatacattaaacccaatgacgttaataactgaaaaggaatatttattttacaacccatcacaaagtagaactgtccatacttattataaagccaagtggtaacatacagtatattatgattttactgtgaacaggctagctgtataaatgtatattagggctgcatgtggtggctcatgcctgtaatcccagcactttgggaggccaaggtgggaggatcacttgagrtctggagtttgagaccagcctggscaacacggtgaaaccccgtctcttctaaaagaatacagaaattagttggtcatggtggcgcacaccagtagtcccagctactcaggaggctgaggcagtagaatcgcttgaacccaggaggcggaggttgcagtaagctgagatcatgccactgcactccagcctgggtgacagaatgagactgtctcaaaaaaaaaaacaaaaacagaaacaaaaacgtatattagacagaggtagtatacatcttttaatcacaggaaattagctttctttttaatgtcatatttttaaatcattactgtttttttttcttttctccatctcttctcaacttcctgagtttacattactcaggaagtaagttttttttaagtagcactatataatgcaattactctcaaacctttccttctccttcccctcagccatctggtattaaatatagtcatatagtccatggaaaccagtacttgtggctatgcctttaagtaattctaaagtrtgttatatccttgttatatcctaatgatgtaactttaaaacctgcaacatttacaaatayatttatcttgttttttgtatcctgaatcatgagaatgtgatatcaaaagaaatactggatttggttcacatgacagattttttgatgtttccatctatttgctctttttccatgtagtttagccaactcagtccagcagaacaaaatgtagctgccattcttggagtctctgaaagctttattgggaagaaagcatcaggccaagccatcggaaaggtaccacattctttttttcttcctaaataataagttcactcaacacttagttcactcactaagttcactcaacaaaattagtaccattatattgatcttttttggtttacattttttcctttaaattagtataacgttcattttactacttaaaacatacctgagcacccaaaatgtatgaatatttttaaacaacatttatttctgggtagtgtgatgacctttttttgggtagcatgaaatgttttcataatattacacaatcctgatataagttcaattcaaacgaggaaatacattttctagaaactatattaggctttctatttggtatcaaggattctaagataggacaggtctgggttttttgttactgcttttgtcatcctcaaagaactcctagtctagtacttatattacataaagcattttagaaggttaaaggggataagctaatactcgttggtgtgatatattttggtgttttaaaattcagtctgcaggcatgaagcaagttatcaaatgcatacactaactttaagagaaattgaagtaattctttcataaccataccttcgatttccttaagagaatgttattttcccccttgtaatacacttttttttttcattttaaattttatttggcaatccaatttacattgaaacctagttaccttccattttcccccacaccttttttttttttttttttgaggtgcagtctcactctgtcgcccaggctggaatgcagtggcatgatcttgggtcactgacacctccaccttccaggttcaagcaattctcctgcctcagcctcctgagtcactgggattacaggcgcctgccaccacgcctagctaatttttgtatttttaggagagacagggtttcaccatgttggccaggctggtctcaaactcctgacctcaggtgatccacccgcctcgttctcccaaagcattgggattacaggtggctctcaggttgggagccaccacacccaacctcctctataccttttaaatttacatagacagtacagatttcattttgtaaaatggaagatgatgtttacatacacttaaattgatggtgcagtgtcccatgcatcactgtgtcataaaatcaaaaatattgggcccggcacagtggctcatgcctgtaatcccagcactttgggaggccgaggtgggcgaccatgaggtcaggagttcaagaccagcctgaccaacatggtgaaaccctatctccactaaaaatacaaaaattagctatgtgtggtggtgggcacctgtaatcccagctactcaggaggctgaggcaggagactcacgtgatctgggaggcagaggttgcagtaagctgagatcacaccactgcactccagcttgggtgacagagcaagactctgtctcaaaaaaaaattccatgagcccagcacagtggcacacacctgtactcctagcttctcaggaagctgaggcaaaggatttgcttgtactcaggagtttcaggatagcatgggcaacatagtgagaccctgtctcaaaaataaaaataaaagtatctgtagtacttaagcattcatgttatcacaatttttagattgggtcttttactttggaaatggctatgctgtttagaccttcaaaatgctgaataaaaatatttcttaaaacaaaccttttatatcaaactctgaaatgtaaaataaaaacaatatcattaatttggaactaattatcaaataataataaacatgcaaaaatcttattagaataatatatctttttaagcttgaatccagaatttatttttgttacatttaatgtaatatagtcaacaaatatttgccaaattgatacatatttaaaatagtatggacatgaacttatcttaattacaaatggattaattactagtttaatgttttggaggtataattttttaaaactctggagaacatatttaaatacttaaaatctaattgatttctccacattgaaaaagaggccccccacctgaccttttttgaacattcttgatttcttgcaaaagattttttttttttttgatacagagtctcgctcttgtcgcccaggctccaggctgcagtgcaatggcacgatctcagctcactgcaacctccgcctcccaagttcaagtgattttcctgccttagcctcccaagtagctgggattgcaggtgcccgccatcatatacagctaatttttgtatttttagtagagatggagtttcaccatgttggccaggctgatcttaaactcctgacctcaggtgatacgcctacctcaacctccaaaagtgctgggattacaagcgtgagccaccgtgccctgccacaaaagatcttgacattggcataaagcattgtattttgccatataataattatatcatttttcttggcttaggaaatacattctaagaaaaaacctacattgactcaatttatagttagtactgaagatgcactaaaattgggaaattaaatagctctcttttcctacttgatgttcagctgtcatactttttcagcttaatgcttttaaaaaagtgatccagtatcaacatgcagaatatgtaactcatacatccttcaatttgtcaccgtaagttctcatttcattcttttactatggtggaggatataattttatattttattttattttttattattttacagttttttttaaaatagagacaggttttcaccatgttgcccaagctggtcttgaactcctgaacttaagagatcctcctgcctcagccttccaaagtgctgggattacaggtgtgagctaccactcccaacctctattttattttttatacctactttttcttttttaagttcatctttttgccctcaattttaagaattrattagtttctaagctagctatgaaatcctttatgcacaaatgtggtcatcaggcaccacaggccaaagcaggtatacagaatcgaaatcatcaactacaggaagcatttttcaatctctttcaggtgttttagcttggaccatgtggaaatcataggatctaatatttactcttagtttataatatagacaagcttattaacatatttatctaaagtacatttgtctaatttataataataatcacatacgtacacaatttacaaataccaactaactgtaaaagtctctctcaccaattccttcctttcctgtattcattttctacaaccgccataacaaattaccacaaatgggtggcttaaaacaacagaaatttattctcccacagttcaggagaccaaaagtccaaaatcaaggtattagcaatgttgattccttcaggagcctctgaggaaaaagccatccgtgcctctttcctagcttctgatggttactggcagtccttggtgttccttggcttatagatgcatccctccaatctcagcctccatcttcacattgctgccttctctgtgtctctctgtgtcttctcctcttataaggacactaatcattgaatttagagcctactgtaaatccagggtgatttcacctagagatccttaactgattgtatctgcaaatatcttgtttccaagtaagatcacattcacaggtaccaggggttaggatttgtacatttctttttgtggagtgatggagagggggtacaattccttccctgtagaaggaagtttaatttagattggaaataatttggtttatcttttaacttttatttatttttatttttatttttttgagacagggtctcactctgtctcccaggctgagtgcagtggtgctatctcggctccctgcaacctctgtctcctgggctcaagtgatccctcagcctcccaagtagccaggactacaggtgcgcgccaccacacccggccacgttttttgtttgtttttttgtggagacggagttttgccacgttgtccaggctgatctcaaactcctgggctcttgtgatccatctgccacagcctcccaaagtgctgggattacaggcatgagccactctgcctggccttatctttttattgtagttggaaaaatgataataaattttaattaatctgaagtacatctgttagaaattagttttgtttctatggaattattctatccttgctattctgtaatacaacttcagttttccttttgtccaattttaataacatacatttttagcaggtctagtaaacgaatttatttgattgtgtctttctagaaggtggacaagaacgttgtcaacaggctatatctgtcttttgttctttataccttgctcaaagagaccaacatttggactgtatctgaaaaatttaatatgcctcgaggatatatacaaaatcttctcactggaactgcctcattctcatcttgtgtgttacatttctgtgaggtaatttcattgaatatatgatatgtactttgtgcatcttctggttttaactgttactaaactaataagccagttagtcagtatgtcagcattttctccttgttgacatattctgttattacagagcactaaaaaactatttaaaatgtacgtttgtttttatctgtttatgaaactactattatgtacttatggtaacaatacaaaaattcctgagtcaactaaaacacataatgaaaagtgtctttttgacccaactcttaaagccaccattaatagtttcaggtattcagaattaactgttaaaaacaacctattgatgtagattccatgtgaatgtctttcacctgagtaataaaaatgtcaggtgtttggttagaaagttacctatatccaacagctaccatgtgactatttagtaccatattctctttttaaaaaaatttaattttgactggatgccatggctcccgcctgtaatcctagcactttgggaggctgaggcaggtggatcacttgagcccaggagttcgagatcagctgcttgagcaatgtgggaaaactccatctctacaaaaaataagaaaaattagccaggcgtggtggcacacgcctgtggtcccagctacttgggtctcactctgacgcccaggctggagtgtagtggtgtaatccaggctcactgcagctttgacctccagagctcaggcagtccttctgcctcagcctcctgagtagctgggatcacagacatgtgccaccacacctggctaattttttttgtttttttgagatggagtctcaggctggagtacagtggcgcaatcttagctaactgcaacccccgcctcccgagttcatgcaattctcctgcctcaacctctagagtagctgggattatagtcacacaacaccactcccagttaacttatgtatttttagtagagatagggtttcaccatattggccaggctgatctcgaactccggacctcaagtgatccacctgcctgggcttcgcaaagtgttgggattacaggcatgagccacagcgcccaaccaattttttaaattttttttgtgcaaagggtgggcgggggtggggggtctcactatgatgcccagcctggtcttgaacttcaggctgaagcgatcctccaggttgcccttccaaagtgctgggattacaggcatgagccgccacgcctggcccatattctcttgattgccactgtaatttagtatatttgcttccagtgtcaggcagctatttaaagcttttacatcaaatgtgtattttatagaacaatttaagaaggaaaccttatactggtcatatgcatttgtgatggatttaagactttattaaaataagctttcagaattcctttaaatagcacaataaagcttaccaggcttttacatccagatactttttttatgtgtttataatataagccatttttgctgcatttagatttcttcttattgggtggcataataatcctttccatatttgtttccaagtcaattttytaaaacttttttcccatgaattgttttctaaatttaaaakttacttcattttccctttcttaaaccttcatattctgtatatgtatatggcaattaattctatcatatgtgctaatgaaaggagtaaataattcaaaaatacttggctttcaattgaatgataattattttaacaaatttagctttctaaatatcttttacttgtgctgatttttaaaygttggtttataccccctgagcacatgctagttaaacagaagacaaaaattatgggtaataagaagaagctagcctttaaaatgtattttcttaagtcttctatatttgttgttttgtatatttaaagatgctttccctaatattttttccctttgttttcattgcgactatgaggacttgagccttatagaattgtttaagtaaaaaactctatgaagcatcaagaaaaacagcaataatttgatgactaatcctaagaaaaatctagctgacaatttgtactctaattaatttacttcatttatatatatcataattatataattacatataatataaatatataattatatgatatatattacatgtatataatttttcaaattattatcaatagaggcagggatcttgctgtgttgcccaggctggcctcaaactcctggactcaagcagtcctcccaccttggcctcccagagtgctgggattacaggcatgagccaccacacctggtctactttcaatatttcaaggcaggggtgttcaatcttttggcttccctgggccacattggaagaagaatcgtcttgagccacacataaaatacactaacaatagcttatgagctagaaaaaaaaaaaaaaaaaaatctcatggtgttgtaagaaagtttaccaatttgttttgggtgacattcaaagccatcctgggccgcatgtggcctgtgggccacaggttggacaagcttgttttaaggtattttttattttaaaaagttataaatggtatgaaatggtacattaattgtgttagttaagatgcttttaactacaagttacagaaaaacccatcaaggtttaaacaataagaaaaaataattattttatataacaggcatgccagaactaaggcagcttcaggattgattgattcaatagttctgttcaaggttttcttctttttactctgccatcttcattacgttgatttctttcttagtagtcacaagatggctagctaatgctgttccattcatcatgtacattcacagtgatatccaaaggctagaaagggaactttaaaataaaataaactactataatagaatattgcaaatatctatgacaaaatattatattgaattcccatttacccttctagctttaacagttattgactcatggcttccagtatttttattattgtattgttgcattgaacatcatgttacatttgaatatttccatatttaatattcatcttccagataaattccagatgtaggaattgtttttagtcacttgggaaagaaaaactatgcattttcttccaggtattttgattaaaatgaccagaactctttttattgacttatttttcaattttcaatcttttcctcatcctaaaaccagttcctcaaattcctcagggtcctccccatgtttcttcacatctgttttgcttagaatcatctttcatctctggcttaactcaagttccagaacttatgtaaggaacattctctctgagccccctatcacacaaaccaaactttgaaataacttacaaaatttaaattttatatatttctttgtgttctacaggagcttgaggagttttgggtttacagagcccttttggtagaacttaccaagaagctgacttactgtgtaaaggcagaattaatccctctcatggaagttactggagttttagaggtcagtagcttgttggtttcccaattgaaattatgttgaattaatacagaagccaggttttattattttctgaagtcttaatacagaggaagtgatagcaagagccttaattgctcatttgtcatgggaatcttttatttaaaacaaatagctgttatggccttccagaaatccgctgttactagatggcatacctgatgaaaaatctcagttgtgaaaaaaaaaacataacaggaagggtgggagtgactgtctccaagtatgttgtgctaccggttgtccttaacacttcttccttcctccactcctttgaagaattaccttctgtcagtttggactcagtgcttgtttaagataatggtgattcagtggcagaaagggtcatttgtattttttctaagagagtaagaagaaagggttcgcaactggttttccagctttctattttcagccaaccctcaacttcagtttattctctgttattcagttcttgagtcagaggagttctgcttaggacacacgcacacacacagagagagacaccagtggtcccctgagtagatggtgagaacactgaaagatattggacttggcctgatgatgtggctcatgctgcaatcacagcactttgggaggccaaggtgggtggatcaattgaggtcaggagttcaaaaccaacctggcccacatggtgaaaccccatctttactaaaaatacaaaaattagccaagtatggtgtcgtgcgcctgtaatcccagctacttgggaggctgaggcaagaaaattttgtgaacgtgagtggtgcaggttgccataagccaagatcgcaccattgcactccagcctgggcaacagagcaagactctttctcaaaaaaaaaaaaaagaaaagaaaagaaaaagaagaaagaaagaaagatactggactagaacattttacttgaggatatgagatgatgccaccaacctaagtgggtttcttttcttgattgcagcacacatcagttgactcaagctgcatagaactatagttaccttgtagtcagtttggaaccacccaaatgcatttttaaaaattcctcagtattctcatgtcttgtctcttcatatttactttattttatcccagtctcttacatgcagtttttgttcttttcagtaaagtgcttaattttcttttttctaatcccaaactattatcctactgatttttgtaacacttttcagggtcgagcaaaacagttatacagtgcaggttacaaaagtctaatgcacttagctaatgcaaatcctgaagtgctcgtaaggacaattgatcatttatcaagacgccaagccaagcaaattgtttcatcagcaaaggtaagcaaacaaaccattttttaaccttaataatcttgcgtagtgttatttccttgtattatagacatcagaacaaaaacatttcacattgcataactgtttatttctatagatacaaaagtacatactcttatttgtgagtaaaaataatgcatctgttgtgacacaagccttgcaaaacaaaaaaaggacctgctaaaaaataaagaaaatttcagtggtggctcatgcctgtaatcccagctctttggaaggtcaagatggggaggatggcttgaaatcaggagtttgagaccagcctgggcaacataatgagactctgtttctgcaaaaaaatttaaaaactaactgggtgtggtggtttgtgctgtagttctagctactccggagactgaggcaagaggatcgcttgagcccaggagttcaaggctgcactgagctaggatgacagattgagaccctgtccccccgccccaaaaaaaatgccaggcatggtgcctcatgcctgtaatcccagcactttgggaggccgaggcaggtggattacctgaggtcaggagttcgagaccagcctggccaacatggtgaaaccccatctccactaaaaatacaaaaatttagccagacttggtggcacacgcctataatcccagctactcgggaggctgaggcaggagaattgcttgagcccaggagacggagatggcagtgagccgagatcataccactgcactccagcctggctgacagagcgagattctgtctcaaaaaaaaaaaaaaaaatggctgggttcggtggctcacacctrtaatcccagcactttgggaggccaaggcaggtggatcacttgaagccaggaatttgagaccagcctggccaacatggtaaaaccctgtctctactaaaagtataaaaattagccaggcgtggtggcccacacctgtaggcccacacctgtaatcccagctactcaggaagctgaggcatgagaatcacttgaacccaggaggtggaggttgtagtgagccaagattatgccactgcactccaacctgggtgacagagtgagagtctgtcttaaaaaaaaaaaaaagacaatttcaagggttcattgaagtataaagaaccctggaagtcactgagctctgtctcccaaagttctcttcacaggaatcctttcctcagcatcccagcatctggtctctccacctttgagcaccagcactgacaaggagcctgcatcatcaaaaattaggttgtctatttttgtacactcttagtgttacaaaaattatcctgatatactgaggctaaattttgccttcttaaaatttctaccattgcatcagagtactacctctggaactggactctttttttgtttgtatgctgtttttcacatattcaaaaacagctcttattgcccccaagggtttctcttttctgttgcttttatctgtattaaataatcaagttttaggccattcactgtcctagttaccctttgctagatgcaacccagtttgccattgccttctgctccctgtgggtaaagccattccacagcaatttgagattgtttccttcttgatctcaactrtggttctaagtctgaaattgcttggcttctttgaagcttcattgttttactattttcatatataaatcagaattagctttccatcattttttaatggtgctcacattgcttacattaccttaattgttctttacaacaaacctatgaggtggacaaagtcagtgttacccccaatttatagatgaaaccactaagattgaccttgtcccgttaaattaggagttcttggggttggtagggatgaagttatagtcatttcctttgctatagcacctaaaaaaaaaaggttcattaaactttcacacacttgtttcagcatttactagtgatgtttgcctaactccattatttccatgatgcttatcaagaggtgattttctaacttcattatcccttctggatttatttactgatgttttactgtgaggaaaagcttttcctttatttattcatttatcagtatgtgctcataggttcaaacatattcaatgggttataacccattaataacattacttattttggtgctcaaatggcctcagatttggccagtggaagcccctgaaaactggtttgtgtggctttttgacctgtcatcatcattcttgaagtattttcttactttctggctgtgtctgtcagcatctaatcattaggaggcagaaaccacacagtaatttgaacaggcgtctaaggggtcaacagaactttaaagaattcaggaaggaatacatttgagagacggtccacccccaccccacagcacccctgtggatgggatccggacttcattgccactggatgckgggaagtttgttgtggtgctacagccaaggctaataagcagaaactgcccacggagtgctgacaaaactgcaaggaagctgcctacaatgtactgttgaacttgcccagaagtcagctctagggcccatggaactagggcactagctaggaccaccctagctgatgtatgtctatgtatttttctatacttatgtgtaaattactgaaggccatgagctcatactgataaccctaattctgatttttccacgtacatacgctacataacagagtctaactccaaaatttagtggcttaaaacagccatcttattttgctcatgtttttgtagattaggaattctggaggggtgcagctgggtgcttctcacttgggtctcaggcaactgtagtcagaagttgactggagctatagtcataaggcccagcagagctggatgacccaggtgactcactcacatgaccaacagctgataattggaggcaactggggcttttcagcttttgactggagcaactacatatggcctttccatgtggcttcagtctttatggcatagaaactaggttttgagagggaatgtccagaaaatgagcattttaagatatccaggcagaaaatgcaagaagtcttctgagccaacctcagaagttatacagtgtcatttccgctgcatactgttggttactagaaaaccgttaagacctagattgaaaggaaaggggatcagaccacctcttcatgagaagagtgtcaaataatttgtggtcatctttaaaatctgccctctggtcacaaattgtttctgttcctcccacatgcaaaatatattaacccccaaaaggcttttccattatagtttctattaggaaaaactcaaagtcttttttgttgttgttgttcccccactcaacactcaacaaacacaacacagacagaagatttctgtgaccaaatgtgagggatttctccccaaaaaaacaagcaatcatttctgtagcagacatcagctgggtgtcctgacactatctagctggagtctgggcttctaaaacttcttaccaattcaagttggggttccctcaacctcttctctgggttcagtcagctcacgaaactcaggaaaacatgcgtataataaaggatatcacaaagatacagatgaagagattcataggtcaaggtatgggggaagtggcacagagctttcatgccctccctgggcacagcaccctccatgtgttcagctgtctggaagctctgtgaatcctgtactcttagacctcttatggaaactttattgggttggcatgattgacaatcatgtagaaatgtgactggacagaaagggtatgatttattaataatactaacagattgagtggggaaacccagcaagacccgtctgttsagattcttctggcctctctgtgcagcattcctttcttcagagtatggggcaggacactctgggatgagggtctttttacttgtttttggagacagggtcttgctctgttgcccaggctggagtgcaatggcacaatcatagatcactgcagccttcccctcccaggctcaagcagttctcccatctcagcctcatgagtagctaggaatagagacaggtgccacgcctggctaatgtttttaatttttaatagagacaaggttttgctatgttgcccaggctggtcttgaactccgggcctcaagcaatccttccatcttggcttcccaaagtgttgggattacaacatgagccactgcacccagcctggaatgagggttttaagacccaatgatcagattagagttctgccttaggcaggcaaaaggagggcagaagaaggtcagagagagaaattctgttttctgaggtctaaagtgccccatcattgtaagaagggctgtgggagttatgagccaggaaccgtggatgaagaccaatatatgtctatcataatatcacagcatcagactcagatccagtattctaaatcaagtccgagtgtgagtgatacaccttcagtacagtttcacaagttacagttcttcttaatctgaagaccagtgaactaaagagacactacataaaacagtgaaactagaaataggataaccatagtatactctcattcataaagaaggaaaatgggtagtgcacagcagcagttctgaaatccagccagtcatatgtggccagttccttaattatgtcccagttcttctctctgggaatggtttttcttggctttgggttctctcatttgagtcattctcccttttccataagcaataaacccatgtttgctgctaggtagctttctcaatgtgcttcctatatgtagttcaagaatattgaagttcaagagttcaggctcaggtgtagtggctcacacctgtaatcccagcactttgagagaccagagtgggagaatcacttaaggccaggagtttgaggtcagcctgggcaacatagcaagaccctgttcctacaaaagaaatttttttttttaattagccaggcatggtgatgtgtgcctgtggtactcatgaggctgcaatgggaggatcatttgagcctgggagatgaaggctgcaatcagctatgatcatgccactgcactccaacctgggcaacaaagcgagaccttatctctattttatttttaatttaattaaattaattaattttatttatttatttatttattttgagacagggtctgactctgtcacccaggctggagtgcagtagcatgatcttggcttgctgcagccttaacctcccaggctcaagcaatcctcctacttcagcctcccaagtaactgcgaccacaggcgggcaccwctatgcctaactaaattacctttttaaatttatttttcaccatgctgcccaggctggtctccaactcctgagctcaagtgatccaccctcctcagcctcccaaaatgctgggattacgagtgagccaccatgcctgggggagaccctatctctaaatttaaaaaaaaaaaagttcaaaggcacttgatgttttgtattgtctgtctctttttattcaatctagtataatatcttttaaaacactgcagtttcttatttgtctatttataatctctatgttgcttgactttcttttttttttttttttttttgagacaaggtctccctctcactccaactggaatgcagtggcacaatcatgcctcactgcaaccttagcctcccaagctcaggtgatcctcccacttcagcctcccaagtagctgggaccacaggcatgcaccaccacacccagctaatttatgtaattttttttttttttttagagatggggtttctccatgttgcccggtttggtctcgaactcctgggctcaagcaatctgcccaccttggcctcccaaagtgctggggttacaagtgtgagccaccttgcctatcctagcttggctttcttacagtgtggatgctaggrtctgagggggaggattcacatgaccttggaatgatctcatttcaagaccccaaggcctttcttaaactgagacctgtcatgtggcatcatttcttctgcattctattagttataagtgaatcayaaaggctagcacagattcaagaggagaattagatcccgtctctcaatgaaggtgtcaaagaatttccaatcatctttaatttgccacactaatcccatacaggacttgctatatagtcttcctctttttcatatttgtacttcctttctccaataatgagaaacctcatccctgtgtttattaatatatttcygttttcctcaatcttagaatgcactgaaagtaactgcagaattgttaaattataccactccaaaaaaaacaaacattcagtatttatttacagcactttttgtcttcagtctgagagtatataattaaaataatgtgttaaaatgttacttggtttggggtttaaaaaaatctgcttcagtgtggctgttatacatttgaaacacaaattctactggtattccattttakttcctctccttccctcacagatatttttttagggggagtggggaggaactaggtctctgtcacccaggctagagtgcagtagcaccatcatagctcactgcagccttgaactcccaggctcaggtgatcccaccttagcctcctgagtggctgggactataggtatgggccaccattcctggctaattttttgttgttgttgtagaggcttggtctcactgcattgcccaggctggtytctaacttctggcctcaagcaatcctcctgcctcaacctcccaaagtgctgggattataggtctgagccaccatgcccggcctatctcgtttttattctctttattgttttcctgctttttaaattttttcagtggccctaattaggttttttatttaaatctgtttttctatggacacccagttatttagttatagttattagtttttatttctaatatgattttgcctttttcttttatttcattcctgagctcagtcaacttttgtatcatttcttccagtttttgtccatgtcggttcttagttttttaacttcttatttagagagcatttctactcctcctcatatctccagatttttatttgagaatatttaattttgtttggagtgttgtgttacagtttttctgcttcatggtttgctttcaggaagggaaatttttatgagatgaagagtttgggttcttattggttttcttttctctttttttttttgagacagagtatcgctctcttgcccaggctggagtgcagtggtgcaatcttggctcactgcaagctccgcctcccaggttcacgccattctcctgcctcagcctcctaagtagctcggactacaggcgccggccaccttgcctggctaaatttttttttgtatttttagtagagatggggtttcactgtgttagccaggatggtctcgatctcctgacctcatggtctgcccaccttggcctctcaaagtgctgggattacaggcatgagctaccatgcccagccttgttttctttttatatagtagttttgtatagatgagaactgcttgtgcctctgcatatcttggacaacacagtcatttggaatgatttatgagatcccagttcaagagtgttctcttctgtcagagtagcaaagtatttttctttaatggatgacttggggtgggagaggaatgcaagtttgtttgtttgtttgtttaatttccttttgccctacaagattgtaaattttgtccttttttcctcttcctctcatggctgagcttccaaaaggcacctcccttttcacccattctctcccctaaaagcattgcctttcgaagactgcctcctagagtcccacatgcattttaaatatcttcctataaacaatgctttaatcaaccaacattcttttttcagtatttttatatttgggtaggctttttctctctggaggtgatcttatttcattttagaccctctatttccctcttatcttgttcatgtgttttttttttctcaaccccatctggatctctgcaaacacttgggtgggagctcaagaaactggttttggctgagtgtagtggctcacactataatcccagcactttgggaggccaaggcaggaggatcgtttgagcccaagagtttgagaacagcctggacaacatagggagatccagtctctacaaaaaaagctttttaaattttttctaattaaaaaaaaaaaaagaggctgggcatggtggctcacacctgtaatcccagcactttgggaggctgaggcaggcagatgatgaggtcaagcagtggagaccatcctggccaacatggtgaaaccccatctctactaaaaatacaaaaattagctgggtgtggtggtgcatgcctgtagtcccagctactcagaaggctgaggccttctgaatcacttgaacctgggaggcggaggttgcagtgagctgagatcacgccaccgtgctccagccaggcgacagaacaagactccgtctaaaaaagaaaaaaaggcgggtgggggggagcggaatttattcttccacaaattggtgggcttttttaaacaagtratttgaggttcttgatattctctgtattatagtaatactaacacaagggttttgtgtagtttacttattattcttattgatctatatagcttattatttggtaaaaattcattgacatctttcatatgccatgtttggaaatactttttttgctcattatgttgcttttgaaattaacagttttaagtttaggaacttgaataaaacttttatttgaaatactggtagctttttaaagcatactaaattttgaggaataataaaatgcatatatataaaggataacatttttcaggagctaattaaatttttgcaaaattgtcttagattttatagattaaaagttaatttttaagtggctgagtcttcaataaaacaaatctttgggagaattaaagctcctttatttttggtatactaaaaggcagtgatcagctaaaatggttttaactaaatgcctcatcttcattgactataatcgtttattcttaagtggccatttttcaatctcattatagttttaatgtctagatttctgatgtgtaaggattcaggtgttcaatggacagtggtaaaattgttggcaattctctagcaatgcatattttggcctcacgtcttaattttttaatgtagatgctgttgcatgaaaaagcagaagccctgcaagaagaggtagaagagttactaagattgccttctgatttccctggtgctgtggcttcttccactgacaaagcatgaagctatctgatgagaattttcatatatgaattatttattgtacatgtgtgttattaaagataacttatactttataaatgaaaaaatacatttcagttatacattaagaactacgaataatgtttgaatatacctcttcccactaacaattcattctttggaatacttacacattatttctctgctaaacagactatagtgtccaccacaaaatgaaattcaacttcatcaacattgtgctcaacctttttatccagatctttcattattctcttacccatttctttcatcaaattggactatttgaaatccccagaatttttcttaggatttccaaaccctccatttcctaactgctttatattatttccaatgcatgaaaattatctttaaaatgcactaatacttcaaggattaactaaaaaatgctaaaatactgtctcttctatgaaattattccaggttcatcctcacccctaccccatatctgggtgctctttccctcctataagcatcatagaccccgcatttatacccaggtctttttgctgccgctactttataatctggatgtccaagtcctgcatgtgtgtatgcgaccagcacccacacacttcactgcacgaagtaggaatctcagagaagaatgaatactacccacaattaacaattggaagcttttctttaaacacaatttaaatattgcctctcccttttcacaatcatagctcaaatgtagatgacactagtgcaagaaagaaagtgttaactagcaatatttatgagtactgaacttgtttgattaatgattaacccacctaagaaacatcctttggaaactttgcaatagatccatagtctaagttatttgtgccttaacattttaggccattataatctgctagtcatttacctagagtactaggtaaatacacagaaaatatctatgtgccaggaactcttgtaagtgctttatatgaattaactaatttaattcttatattacctgtacctgtaagacaggtactattattatcctcattttacagatgaataaactgacacacagagaaactaaagtaactttcccaaggtcataaactagttagtcacagagcgaggattcagacccatgcagccccagtgtaacatccacacacttaatcattatacaatagtgtcttggtaaatttgtccattttattccttcctaagtgttccttacacctgtccttgattttatctttagcattacattccatcatgcttgccccactcccatccctgcatttccttacatatgtcaaagtatggcatcctaatgtcctagtagaattctgggcttcgccgcacatgttacatttgttgcagctaaaaagattgtgaaacagcagctggctagcctgctggctgtttggaccagcctctgagttgcattcacaatgggccatagtccagtcttgaggatttttttaaagtctagaaaccccaggtttactagttaagtaaagctctgattctttttttttttttttttttttttttgagatgttagggtcttgctttgtcacctagttcgaggctcactcccgggctcaagtgattttcccacctcagcctcccaagtagctgggactacaggtgcgtgtcaccgcccagctaatttttgtagagaaggaattttgccatgttgcccatgctgttctcaaactcctgggctcaagtgatctgcccgtcttggcccccaaagtggtgggattatagacgtgagccactgtgccaggccaaaggtctgattcttgctaaccaatttgtaaaaaactgatttataatccaagattaatgtattaatttaagattagaggtgagggggcagggagaagggtacctttacagtaacttgaatacctgtatctgcagttcaggacaatctacacacacacacacacacacacacacacacacacacacacactcttctatcagtgtttctccaggtcaatctcaataaaagattgtatcacgtgtaatggtgggtgattagccctaaaagatattaaaatgtaaagaaactgaaacagtttagttctagagaagtagataagtgggaaggaacaaagtggggaatagaaacagacctaaatatgtttaagaatttaatgtaatagactgggcaaggtggctcatgcctgtaatcccagcaatttgggaggccgaggtgggaagattgcctgagttcagtagtttgagaccagcctgggcaacatggcaaaaccccgtctctactaaaaatacaaaaaattagcctggcgtggtggcacatgcctgtagtcccagctactcgggagactgaggcacgagaatcatttgaacccgggaggcagaggaggcagtgagccgagatggcaccactgcactccaacctgggcgacagaacaagactccatctcaaaaaaaaaatagtaataataataaacatggtttttcagtttttagtaatagaaatgcaagcatatgtagcttaagcgaaaagggacatttagtggccatgctctcaaacagtaggcagcaatagaattggccttagggcagctagaaccagagaatcctaacaccgtccatactcaccatctcttctttgtggggcagcaccagacttgcttccttatggcttcaagatgaaagcaaaaagagctctctgctgtcaactctagttagaaaaatccccaggaagggttctcattagtcccttgtgggtccatttctcacccctatgagcaggatatagggtttaggtttgggttttggttcttcagaagacagagaagtggggtaagcagagaaaacagctaatacagatgacacttcaagtcacagtggaaaagatggataactcagtgaatggaattgagacaaatggctaccacgccatttagaaaaatattaagcttagcgtggacagcatggcaagaccccgtctctacaaaaaattaaaaaattagctaggcttggtggcgcatacttgtggtcccagctccttaggaggctgtggtgggaggatcacttgagcctgggagtatgaggctagagtgagctgagatcacatgctactgcactccagcctgggcaatagagcaagaccctctctctctctctctacatatatgtatattgagcactctatctataatatatattttatattataaatataaatagagagctgatttctagctattgctttaaaccaaattaaactttaggcaaatcaaagattcaaatgtggaatttttgaaggtgtcatctgactatgctgaagcatcaaagaatgtatctgcagtttcttcttataaggctttaaaacagtaaaatgtcagtaattccagtgtggtgtcaggttttattattttttcttttttttttaattatgctttaacttttagggtacatgtgcacaacgtgcaggttaattacatatgtatacatgtgccatactggtgtgctgcacccatcaactcatcatttaacattaggtatatctcctaatgctatccctccccacttccccaaccccacaacaggccccggtgtgtgatgttccccttcctgtgtccatgtgttctcattgttcaattcccacctatgagtgagaacatgcggtgtttggttttttgtccttgcgatagtttgctgagaatgatggtttccatcttcatccatgtccctacaaaggacatgaactcatcattttttatggctgcgtagtattgcatggtgtatatgtgccacattttcttaatccaggctatcattgttggacatttggcttggctccaagtctttgctattgtgaatagtgccacaataaacatacgtgtgtatgtgtctttatagtagcatgatttataatcctttgggtatatacccagtaatgggattgctgggtcaaatggtatttctagttcaagatccctgaggaatcgccacaccgacttccacaatggttgaactagtttacagtcccaccaacagtgtaaaagtgttcttatttctccacatcctctccagcacctgttgtttcctgactttttaatgattaccattctaactggtgtgagatggtatctcattgtggttttgatttgcatttctctgagggccagtgatgatgagcattttttcatgtgtcttttggctgcataaatgtcttcttttgagaagtgtctgttcatatccttctcccactttttgatggggctgtttgtttttttcttatagatttgtttgagttcattggagattctggatattagccctttgtcagatgagtagattgcaaaaatgttctcccattctgcaggttgcctgttcattctgatggtagtttcttttgctgtgcagaagctctttagtttaattagatcccatttgtcaattttggcttttgttgccattgcttttggtgttttagacatgaagtccttgcccatgtctatgtcctgaatggtattgcctgggttttcttctagggtttttatggttttaggtctaacatttaagtctttaatctatcttgaattaatttttgtataaggtgtatggaagggatccagtttcagctttctacatatggctagccagttttcccagcaccatttattaaatagggaatcctttccccattgcttgtttttgtcaggtttgtcaaagatcagatggttgtagatatgcagtgttatttctgagggctctgttctgttccattgatctatatctctgttttggtaccagtaccatgctgttttggttactgtggccttgtagtatagtttgaagtcaggtagcgtgatgcctccagctttgttcttttggcttaggattgacttggtgatttgggctcttttttggttccatatgaactttaaagtagttttttccaattctgtgaagaaagtcattggtagcttgatggggatggcattgaatctataaattaccttgggcagtatggccattttcacaatattgattcttcctacccatgagcatggaatgttcttccatttgtttgtatcctcctttatttcattgagcagtggtttgtagttctccttgaagaggtccttcacgtctcttgtaagttggattcctaggtattttattctctttgaagcaattgtgaatgggagttcacttatgatttggctctctgtttgtctgttattggtgtataggaatgcttgtgatttttgcacattgattttgtatcctgagacttgctgaagtttcctatcagcttaaggagattttgggctgagacgatgggttttctagatatacaatcacgtcatctgcaaatagggacaatttgacttcctcttttcctaattgaataccctttatttctttctcttgccagattgccctggacagaacttccaacactatgttgaataggagtggtgagagagggcatccctgtcttgtgccagtttcaaagggaatgcttccagcttttgcccattcagtatgatattggctgtgggtttgtcatagatagctcttattatcttgagatacgtcccatcaatacctaatttattgagagtttttagcatgaagggttgttgaattttgtcaaaggccttttctgcatctattgagataatcatgtgatttttgtgtttggttctgtttatatgctagattacgtttattgatttgtgtatgttgaaccagccttgcatcccagggatgaagcccacttgatcatggtggataagcttcttgatatgctgctggattcggtttgccagtattttattgaggacttttgcattgatgttcatcgaggatattggtctaaaattctctttttttgttgtgtctctgccaggctttggtatcaggatgatgctggcctcataaaatgaattagggaggattccctcttgttctactgattggaatagtttcagaaggaatggtaccagctcctccttgtacttctggtagaattcggctgtgaatccatctggaccttttttttggttggtaaactattaattattgcctcgatttcagagcctgttattggcctattcagacat

SEQ ID NO: 94731 - DNA, 54434 bp, Homo sapiens
  misc_feature (1)...(54434): n = A,T,C or G
aaaccacacacacctgtggtcacagaagtggtcttatgttgatgattgttgtggtttgagagtagaggaaaaagcatggttagagagagagttttccatacacacatatgccctgtgtttatactgtatataccatttacagagcctgagagcaacataaacaatgtccccctcaattcacttgattatgctttttttggaatgagtataattaacatcttgcagggccttcatatgccagagacaggtgaccaaactcgggcagtcagctctttagggacttttgaataacccctcagcctacaggataataatctatctggttagagtgtgtggtcactgagtttattagttcttgctctagggatgcttcctgctttctctgtcatcctctagttcacttgctgattcccagtacccagttgcccacaggcacagagagaaataaatattaattgtgtgtgtataagcttatgtgtatacatgtgtatgtaggtatatatatatatatatatatacataaaagcataatttaaaaaatagagactctatatctatagagaaatgcacatccatgttctatgaacaggcatctgtatagcagaggaaacagaacatttatagtttacccttttaaaatatgaatctgaggcagagtatgatggctcacacctgtaatcctagtactttgggaagccaaggtgggtggattgcttgagtccaggagttcaagaccagcctgggcaacatggcaagaccatgtctctacaaaaaacacaaaaattagccaggtatggtggcatatgcctgtggttgcagctactctggaggctgtggcaggaggatcatttcctctcgagaggtggaggttgcagtgagctgagatcatgacactgtattccagcctgggtgacaaagtaagagcctgtctcaaataaataaataatttaatttaatttaattaaacattaatctgatcctatcacagcacccaccccaggcttgaagccctttcaatggcttctcattgctctaaaaatattgcaaggctcagcaatgtttgttcctacatcctcagctgtccccttgctctctctaatccagacaccccagccttctctcagtcccctcactatccatgctctcacacaccacaggacctttccacaggccattcccctagccttgaatgatttccctctacctagttgtctactcatctttcagatcttaagtgtcacatcctcaatggcccctccccccaaatcgaaattctacctcatacacacgtaaagcaccatgatcacctttggagcacctaccacacttgcaatttcacttttgcgtgatatttttaaattcattattattattattattattattattattattattattattattttgaaacagagtctgtctctgttgcctaggctggagtgcaatggcgcaatcttgggtcactgcaaactctgcctctcgggctcaagcaatactcctgacttagcctcctgagtagctgggaccacaggcacatgccaccatgccagctaattttttgtattttgggaagatacggggtttcactatgttgctaacgctggtcttgaactcttggagtcaagtgatccacttgcctcagcagtgagattacaggcgtgagccaccaccatcctgtgatttttaaaataccttctacttccccagtaagacttcagagcacaggaacaatccctgcttgctgcttacagttgcctagctcagtgcttggtacatagtaggtgcccaataactacttgaatgaatagatgaataaacgaatatgtgaaagcacattgtagaacaccatgcatgcaatagatgttaacttccttcctttcaccattcagcaaaaattttctcttaatttctccttgctttgaaatacagtttgattggcaaataattaaaagcaaaacttaactttagaaagtcataacccaataactcaaaacaacacatttgtaactatttatttgcccggagataactacaaatgcctaaaagtttgcccacattcagagatttctacattagaaaagtcttaattttctaaacagacaagtgataagattatcattttctgaaaatatcctgaaatcagtctgttgttttacaagtgtttgtaattgttgaccaggtaaaccttgtgtgaatccctaaaaacccaatgccagtactgaaaatcaatccacagaccacatggaaatgagatcacatgataattattttttgtatttttatgcatttattttttatttattaatattttttgagacagagtctcacattgttgtccaggctggagtgcagtggcatgatcatggctcactgcagtctctatctcctgggctcaagcaagcttcccaccttagcctgtgaagtagctggtactacaagtgcatgccaccacatccagctaattaaaaaacattttttttttttttagagatgggatcttgctatgttgccctggctggtttcaaactcctgggcccaagcgattctccctcctcagcctcccaaagcactgggattacaggtgtgagccactgcacccagccccataattaataaagcgttcacataaactttctagttcatttaaagttttttatttctaaatcattttcatcacataatttgtgagtccctaaatctgcgtgaggtagtggaaaaactctgggcttggaatcagaaagctgtaaatctactttacaaggttattgcaaagattaagtgggggtaataattttttaaaaaataatctctcatctgttaaacacatacctcacattgtagatggagctagctgtgttacattattgtcaattaattctttaaaaaaagactatgggccaggcatggtggctcatgcctataatcccagcactttgggaagcataagtgggtggatctctgagctcagcaatttgagaccagcctgggcaacatggaggaaccccatctctaccaaaaatgcaaaaaattaacagggcatggtggggcacacctgtggtcccagctacttgggaggctgaggtgggaggattgcttgagtgtggaggtggaggtttcagtgagccaagatcacatcactgtattccaacctgggtgacagagtgagaccctgtttcaaaaaaaaaaaatcttatgaaatatgtattattacccctactatatagatgaagaaattgaggctcttggaaattgacgatctggcccaagattgtacatcccatcaagctgcagggctaagatgtatgaaaaagggctctagctaggatgtatgtagctgtaacttgctataaaaattaaggtgtcttattataaaatatctctgaaatgatagttcctattaatattcctatatgttcctccttcctatgtatccatatcatacatccttatcagacattgtaaatcaaaccaaattagaagcaggagcaagatctcagccaacagatcatcatgtgtgcaaattgcttctctgccccctcgtttttgttttcccagtttcttttctttttcttttttttcttttttttttgacagggtcttgctctgtctcccattgtgcagcggcatgatcttggctcactgcaatctctgcctcccatgcaattcttatgcatcagcctcctgagtagcttggattataggtctgcgccaccactcctggctacaccatgttgcccaggctggtcttgaactcttgggctctagtgatccacccgccttggcctcccaaagtgctgggattacaggtgtgagccatcacacccggccccccgtttccatattagtaactcacatgtagaccacaaggatgcactatttagaaaacttgcaatggtccacttttcaaatcacccaaacatgttaaagaaattggtatgactgggcatggcacagtggctcatgcctgcaatcctagcattttgtgaggctgagacgggcagatcacgaggtcaggagattgagaccatcctgacagacatggtgaaatcccatctctactaaaaatacaaaacaattagccgggggtgatggcaggcccctgtagtcccagctactcgggaggctgaggcaggagaatggcgtgaatccaggaggcagagcttgcagtgagccgagatggtgccactgcactccagcctgggcgacagagcgagactccgtctcaaaaaaaaaaaaaaagaaagaaattggtatgactgttgactcacaacaggaggcaggggcatggggtggggtgtaagattaatgtcatgacaaatgtggaaaagaaacttctgtttttccaactccacgtctgctaccatattattacactcttctggtagtgtggtgtttatgtgtgaattttttttcatatgtatacagtaattgtaggatatgaacctgattctagttgcaaaactcactatgagcttagcttttaagttgcttaagaataggtagatctatgcaaataatgataattattattattattttaagagagggtctcactttgtcacccaggctggagtgcagtggtgtgattaagggtcactgcaacctccacctcccaggctcaaataaacctcccacctcagcctccccagtagctggaaccacaggcacgggccaccacgcctggctaattttttgtattttttgtagagatggggtttcatcatgttgcccaggctgttcttgaattcctcggctcaagcaatcctcccaccttggcctcccaaaatgctggcatcacaggcatgatggcatcactggcatcacataccatgcctggcctgatttatgcaaattagatatgcatttcaaaataatctatttttatttgttgccttattggtggtacaatctcaagtggaaaaatctaagggttttggtgttatttgcttactcaaccaatatttattagactcttactaagcaccaacatgatcacatgcctgagctatggctagcatagcgtgtgagacaaacttaatctctgttttggtggagcatataatctagtagatgaagccaatgttgagcaacatcacaatactaacaaattgaggatgctacgagagtgtctaacaaattgaggatgctacgagagtgtctaacaaattgaggatgctatgagagtgtgtcatggagagctgcctggagattgagagaaagcttccttgagggaagttacatttcagctgaaacacactgccatctgctcgaggttttgtaactgcattcacatcccgattctgacacttcacatcccgattctgacacttcacccagttactgtctcagagcttgggtccgcatgtgtaaaacaaggacagtatgcacttggcagggttgtgagaagggaagagaacacaagtaaagcacctgtatcaggcatacagtaggcactaagcgtgcgatgcttgctatgattatacatcagtgtaagcatcaaggaaaagctgaagaaaagtctgaccaacagcgaaagataaatgcgcagaggagaaatttggcaaaggctccaaattcaggggcagtccgtactctacactttgtatgggggcttcaggtcctgagttccagacattggagcaactaaccctttaagattgctaaatattgtcttaatgagaagttgataaagaattttgggtggttgatctctttccagctgcagtttagcgtatgctgaggccagattttttcaagcaaaagtaaaatacctgagaaactgcctggccagaggacaatcagattttggctggctcaagtgacaagcaagtgtttataagctagatgggagaggaagggatgaatactccattggaggttttactcgagggtcagagggatacccggcgccatcagaatgggatctgggagtcggaaacgctgggttcccacgagagcgcgcagaacacgtgcgtcaggaagcctggtccgggatgcccagcgctgctccccgggcgctcctccccgggcgctcctccccaggcctcccgggcgcttggatcccggccatctccgcacccttcaagtgggtgtgggtgatttcgtaagtgaacgtgaccgccaccgaggggaaagcgagcaaggaagtaggagagagccgggcaggcggggcggggttggattgggagcagtgggagggatgcagaagaggagtgggagggatggagggcgcagtgggaggggtgaggaggcgtaacggggcggaggaaaggagaaaagggcgctggggctcggcgggaggaagtgctagagctctcgactctccgctgcgcggcagctggcggggggagcagccaggtgagcccaagatgctgctgcgctcgaagcctgcgctgccgccgccgctgatgctgctgctcctggggccgctgggtcccctctcccctggcgccctgccccgacctgcgcaagcacaggacgtcgtggacctggacttcttcacccaggagccgctgcacctggtgagcccctcgttcctgtccgtcaccattgacgccaacctggccacggacccgcggttcctcatcctcctggggtaagcgccagcctcctggtcctgtcccctttcctgtcctcctgacacctatgtctgccccgccagccgctctccttcttttgcgcggaaacaacttcacaccggaacctccccgcctgtctctccccaccccacttcccgcctctcattctccctctccctcccttactctcagaccccaaactgctttttggggggtatcatttaaaaaatagatttaggggttacaagtgcagttctgttccatgggtatattgcattgtggtggcatctgggctcttagtgtaactgtcacccgaatgttgtacattgtatctaataggtaatttctcatccctcatccctctcccaccctcccaccttttggagtctccagtgtctactattccactaagtccatgtgtacacattgtttagcgcccactctaaatgagcctttttgtttcattcattctgtaagtgttgaataggcaccacctaaggtcaggtataagtggaaatttgaaaaagaaactgcccacttgccccagtacttccctagccaagaggagggaaaccaggcaggtgcacctgaaggcctgtgagtgcttgatttgctgtgcagtgtaggacaagtaagattgtgcatagccttctgtatttaagactgtgttaggaagatttctctttcttttcttttctttttcttttttcttttcttttttttttttaggcagatgaaaagggcgtcacagaacaggaataaaaatctaaatattcaataaatgagacctaggagactactgcagtgacttacaaagtcctaataaaaagatgtctctccaaaatggggctgcaaaatgtggtgctgccttatcagctctaagttttttccttacctgagaaagaaggaacctgatgcaggttcagggctcctgccccatgaatgcaggctgactccaagatggggagctacagggacaatcccaggtcttctaggcctcttatttaggccctgggagcctccagagatggccacatcttgaccagcccagatagagggaaagatcaccattatctcacctctgtgtcaaatacctagatgctgtcctccctgagcccacactatagttgccagcgctaatttaatgggtagtgtactggttaagagatggacagaccatcctggcttgactctcagctctggcaaagatgagtgacttggtttttccatrtctcttggccacaccaaccttgatttcttcagctgtagaatggaatttctcaagcttgcctcaaggattattgcccgaggatttgatgatatggtaagagcttctcagtgtttgacccatagtaagtgtttgacgtttcaaacgaattgtttctttctaggacatggtgagcatttggtagccattcaccggttttctgtttctttggatcatagttaacctctccttttccttstggcactacaattttctggtggggaagaatccttactttctgcccttccccttaaggataggaagctgatactaggcagcaactagttgggggataggaagattgttccagagaaatgctgaaccatagggctccagatcacaggaccccagtcttagcttgctggggtgtggggtgggggggggcggttactgaacatgggtatgaagtagatgtccatttactgaaatgtgaggacctgaggcctcttctattgctgtagccagcatattccccaacctctccccaagaaaggacagatgggggttcccccctggagtaacaggtccaaaagaaaaaacatacagtgggacttccaggatctgggcctgatcacccagcagtcaagctccccgcaattgactaacacccccctaacacgtagaaattccaatctgcaatttagtgaggatgatacctttattcttcttaaatacatctcttcatttcccagagcacccttttttcccctcctctgcacctttttgttaaagactggagtataatgaaataccaagagagcataacatgtgatacataaaactttttttctggtttacaaaacagttcattcttgtccatacgtgcttctctccaaggctggctgctgtctgttccagcccgcttcgcttggagaggccatctgccatacctgctccccagacgcatcgacaagcacacccagagtgttatctgctaagacctaaaagagggaggaaccccctctcctcatctaagacctagcttctaaattagagtgtgagggtccatctccccaggaggggcacagggcccaaacagcccagccatctcagaagacaacactaagctttgtaggggtccacagtagaggagagtaagacgcctgttgtttaatttattacagttcctcaaaagtgaagatgtgtgggcgggatggcaagagctgagcagacgaaagctgaaggaataaggaaagagaggaggacacaaacagctgacacttcctcagttcttgtcatttgcctggccctgttctaagcaccttctaggtattaatccatttagtcttggctacaacactgtgagtractagttttgtcacccccattttaaaaatgaagaaagtgaggctcagggaggttaagtaacttggccacagtttgaaactagactctgatcacatgagataatagtgcccataaaaagggaaagcagattatattttttaaaggaaagagagtaggatatggtagaaaaagattgtttggaaaggaattgagagattgatataatgaaaagaagcattcacatgagagtaacagtatcagggcccaaaccttcatctaaggtacttcaaagaggcctaagcaaacttagtcactggcgtggttctagtctccatgatggcaaatacattgtgtacagcccaactccacacaaaacttaaataccaatgatagagcaatctaaaatttgaaagaaaaaatctttcaatttgtcgtcttcccagagggacttaatcaagaaaccaatcaaaatacttcctaagcctaactgtgtgcagaactccaaagagagcccagccctaaatcaacactgtccaatggaaatataatataatgtgggcctcatatgcaaggtcatatgtaattttaaattttctagtagccatattaaaaaggtaaaaagaaacaagtgaaattaattttaataattttatttagttcaatagatccaaaatgttttctcagcatgtaatcaatataaaaatattaatgaggtatttattattccttttctcaaaccaagtctattctataatctggcgtgtattatttacagcacttctcagactatatttctttctttcttttttttttccgagacaattttgctcttgtcacccaagctagagtacaatggcgttacctcggctcactgcaacctccgcctcccgggttcaagttattctcctgcctcagtctcccaagtagctgggactagaggcatgcaccaccacgcctggctaattgtgtatttttagtagagacagggtttcaccatgttggccaggctaatctcaaactcctgagctcaggtgatatgcccacctcggcctcccaaagtgttgggattacaggcgtgagccactgcacccggcctcagattaactatatttcaagcgttcagtagccacatgtagctagtgctatggtagtggacagtacagatctgcatttcaattaagacacgtatacaagcatagttcactaatgcacggtaaaaaaaagtatagtgctgagtcggtggtagaaatcctaaatactgcagagcaaaagtggtacgaacagcaatctcagtgataatgcaaccatgcttgcttttcattgcaatttgcttattttccttcagcaaagttcatccatttttgccaattcaataaatatttactgataaaaactttcaatattagattcttgcatcttcatagacagagttgcttttcacatttagaaaattacttatcaatgttaaacacacgttttgataaccagtgttggaaagaggtgcagactccccatgtgcctattgatggcagaaatattcacagccaaagggaaacaaagggctggggacaatcacacacctcatgtctcctaactcctgggaagtgctgtccctctgattgagctcttattattgccttccccactaaccctgtccactgtgccctggagccctttgcagggttacctgctctgtcctcctcacagaatatctcctctacctccttgtccaagctacaacttggctattctctgatgacactgtcttccctgtagcccttttgagtaatggctgcatattctcccatagtccagttcttttcctgttctccagtctggcttctggatgacagcccactagtttgaactccatactgctatagttcaagtcccttttgacttgttaccttgggcaaattacctccttttgttcaggttccttgtttgtaaaatgacgataataatgccatttgcttcagtgggttattttgaaattgagtgaaagaaggcgggtagcttccctacacgctcagtgtagactagcctgatgtgcattacgggtgatgccatgactcagtgtgttttcctcatctccacatctggctctcatccagtgctcctgcttacggcactctgtccccctcttacttactcccccttattaactgaagactggcactgatctcacagtttcctctccacttcctagtctcaccatcatcctagatgacttcaagtcacctagataaactgtctcagtttcttcactcacatttttttataacagataatgttacactcaagttgtaacagaaccagcttatccagctcatgaaatgtatgcatttcatctcaactctgtattcagtgacatcctgtgggtatctggaaatcagccatggtgagaatatttaccatggaaattggcaaatactaaaaagcagagcacctttttttctgagagccagaccatagctcttctactccatagcacccatcataacaatttttaaatacctccactgaacagcttcttcctctctctacttcttccatatctgatttgagcttcttaatttatcatgtgaaccactcttgtaataataaccccaaatccctgttccattgttcttcctgctaaaatactaaacctggtttagtccaaccatattttctctctttggaatctacagggtggcccaaaaacctggaaatggaaaaatattacttattaattttaatgtatattaataagccattttaatgcttcatttccagtctcagtggccaccctgtatagctgggctattgagctcttgcgggaggagggagtggacagtctcccagccacacagactgatgttgcaccaaacattttttagcttccagacttccctggcccttagtgttacccttaactctccatttctctgcctttcacattctctactttttaaaaatctctgactccaccttcaccttatcattcttagcacatgaccatacttctgcttcccaaagaaaatgagcaattacttccttttccttttcctcctgtcatcaaatctgcagacatgtcatgcctaagtccagctttcctcctttctctgatctcagtctgcttcttccatttctgccctgaatcccgtcccctccccaacccccaaggacttcgctctatcagtcacctcttccctctcctgtatcttcaactcctcccattttactggcttcttcctcaagcctttccccaagcctttcccatctcaattacctcctcgcacatgcctctgcagaaaccaccccgtttcttccctcccctcggcagcctgttcttcctgttctgccctcatgatggcaccatcattgtgtcactaaaatcaatctctccgacatcatcaatggccttcctttgttgggaaacctaataaacactttatcttatttggtctttgttatgggttgaatgaggttaccccgaaatccatattagaagtcctaacccccagtacctcagaatgtgactttatttgggaatagggtcattgcagacgttattagttaggatgaggtcatactggaatgtgatgggctgcttatctaatatgactgatgtccttataacaaggagaaatttggagacagacacgcacatagggagaataccatgtgatgacaggagttatggagttggagtcaaaaagctatgggaacttaggagaaagacctggaacaaatcctttcctgcgcctagagagggagtatggccctgccactaccttgaattcaacgtttcggcttttcaaaactgtaagacaatacatttctgttgttcaaaccaattagtttgcagtactctgcgactgcagccctaacaaactaatacagtctcttggaggcatttggcaaggttgacaatggaagcactttcttacccctttaggtctgtcgcctttcttgttggggggtgttttctaacaattcctctccatctctctctctctagtttgtcttaaacattggtgttcttcagacttctgacctaggccttcttttcacttcacatattcccctgggtggtctcacccacttccagaaattacttaaattactgctcatgcagtactgtgctggaaactgtttaacaactggctctctgggaagaggggagactggttgatggtttttgctgatttctgtggtgtaaatactccctccatggccaattccaaactgccaacagtttaacaactggctcacaaattttctccaaatttaacatttggctttcacaggccaacaacgtggtacagccaactccagcacacctctgcttttgtgtcagagagaagtaacttatttttgtacaaaaggtaaaataaaaacacctgcaggccccctttttttccttaacaaactgctctagaaatagaatagctgaagcttcttttatgcattcatctgttatttccatgtcactgtggtggtgggattatttttcctttatttttcttgtatatggttgaaatactgtacctttgatcagttttagttttatggcatgttttgcacccatattaaatctagtttttgtcagagggcgtcaatattattttctcaaaacaagaaaatatttcattgcaaaggagacaaacaaaaaggtccttaataccaaaactttgaaatgtgatttcttgtacttggcagtgtccaagtggtaaacccaaacagtattgggttttcattttgttcaggaaagtctttgtctggcagcgacttacccttacatcaggcgggccttgctcattcattcacttaagtatttattaaacaccagcggtgtgccaagtacttatctaggtatcgggtagattctgataagtcagtcaggtccctgctctcagggagcttgcagcagagatgggggctgcaatagagagtaagccaaggaaatgaaaaaggaagttgatttcagagagtgatgaatgctatgaagaaaatgaaggcagcgcagtgtgatggagagtgacccaaggtggtacagtttgtacctctaaggaccagactgtgacccaggtcactcacagatgcccgtcatgtgatgccacagcaacttttccaggtgctcgtttcctcccacttcccagtctcttgcccagccgcgactgcttacaaatacagctagaggaatctaaatgaggttcctctatcatcaaacccaatcaaaatgccaaggaacagaatcagtgcctggctgaaggcagtggaacagggccagcctggagtggttctctctgaggaagttcctcatcttggttttagggccataccttgtgacctgtgagctaggggttgccagtccctgacatttctactgaggactcgcctgtctatattcccggcctgtatgtgtctcctgagttccagacacacagggcgaagcgcctgatggatggaagtatgttttttggtgttccattggtatctcaaattctacaaaacttagtgccccttctcctaccctgttcctccccatcttcagtctatcacctgttcctcatccagcaaatgatattaccatcttccaaggagcttcccaggagtaatcccttgactcctgcctcaacatccaattaataatcaannnnnnnnnnnnnnnnnnnnnnnnnnnnnnnnnnnnnnnnnnnnnnnnnnnnnnnnnnnnnnnnnnnnnnnnnnnnnnnnnnnnnnnnnnnnnnnnnnnnnnnnnnnnnnnnnnnnnnnnnnnnnnnnnnnnnnnnnnnnnnnnnnnnnnnnnnnnnnnnnnnnnnnnnnnnnnnnnnnnnnnnnnnnnnnnnnnnnnnnnnnnnnnnnnnnnnnnnnnnnnnnnnnnnnnnnnnnnnnnnnnnnnnnnnnnnnnnnnnnnnnnnnnnnnnnnnnnnnnnnnnnnnnnnnnnnnnnnnnnnnnnnnnnnnnnnnnnnnnnnnnnnnnnnnnnnnnnnnnnnnnnnnnnnnnnnnnnnnnnnnnnnnnnnnnnnnnnnnnnnnnnnnnnnnnnnnnnnnnnnnnnnnnnnnnnnnnnnnnnnnnnnnnnnnnnnnnnnnnnnnnccctcatataaagttggcactccctggacatgtggcttacggggccctccgtgatgtggccctatttgcttgtccattctgttctctcccagcctctctgcccccatctctaggcaccaaccacacccttctgctcgtcagtggtgccagcttctcttctatctctggtctttggacagacttttcccttcacctggaatgctttcttcaatcctaccccactctctttaatctagataaggtttattctttttgaatgtctagcagtgaaaccatttcccctgaaaaaccttctctawccaaccccctaccctcagcccaaggtctagattaggagtccctctgaatgtttccatagcatttttaaagaattgcctatttacttgttcgtatctatcactaaactacaaattgtatgagaacagccactatctctgcctggttcaccattcatctccagcaactagcataatgcctggcagagtcagcctgcaacaaatatttgttgaataaattaacagatggctttatctccttaagtaaatcttgcttttttcacctattaaaacagacgcacaggccaggtgtggtggcccatgcctgtaatcccagcactttggcaggctgaggtgggcggatcacctgaggtcaggagttcaagaccagcctggccaacatggtgaaaccccatctctaataaaaatacaaaaattagctgggcatggtggtgggtgcgtatagtcccagctactagggaggctgaggcaagagaatcgcttgaacccaggaggcagaggtggcagtgagccgagatcatgccactgtactccagcctggatgacagagaccctgtctcaaaacacacacacacacacacacacacacacacacacacacacacacacaccaagttgtataatttaaaatataacgtgcttgttatggaacacttgtaaaatacaggaaagtaatgaaaaagtctaccatctagctcaccacataatgaccattgctatcatcctggcataattctctcctgtatataaatatatattcttttattgttaaaattacactatgagtactatttatttattttactgtggcaaaatgcgcaaaacataaaatcttgccattttaaggtatgcagtttggtgcattcaccacactcacattgttgtgcaaatatcaccactatctatctcagaacttcttcgtcttcccaaactgaaactctgtacccattaaacaatagtgcatcctctgttttcccctccctacaatttatttttatttgggtttgtaccaaactgaaaatagctgcttcttccttacttagttcagattagcatttccatttatttagccgtggttttgaggatgccatgacagatgccatccttcctagagctctttggggctgtcaggtatttcagtcagggtgaattcgggttgataacattttaaaatctcactttattctgaggttcctagtgtcagagcccaccgtatttttagggactcccaagttacaaacaaaaatatggtgaggaggaatcactgaagttttaacacaagagacttacattttgttcaatttctatcttttagtttatttcctaagcataaagaaatactttgaaaattttacatagcattatacatatttaattaagcatgagcacatcttaaaactttaaattttagatcagatctttaattcctaggatattaagaggtactggcaatttgsccaggtgtggtggttcacgcctataatcccaacactttgggagggtgaagtgggcgaattgctagagcccaggaggtggaggctgcaatggcctgagatcacgccatcgtactccagcctggatgatgagaatgaaatcctgtctcaaaaaaaaaaaaaaaaaaaaaaagaagaagaagaagtattggcaatcagtgctccaggaataatttcctgacttgaaataaacctacatgtagacaaactaattaggccattccaagagttgctagcattggtttaatatgttttcagagcattccaggaagcagtgtggccagcattgcatgtttgatacttcagaaatgtatgacaggtgtttctcttacccaggtcttctgttttcttagttttgctcatgtaaatatttatgaacatcctcatctttttgagggaagggattatagatcattctaattccattttctagcatttggtaccattctaagcacatgataggcacccatttggagcatttttggcttgacagaatatgcatttagaattgttcaaattagaggtgtcagtgatgggaattagaatactatataattctaagtcatttgacttaaatacaaaagaatgattttccttggtggggaatggtgaagggaggcaggagttaagaagaggagaagagatcctaagtcatttataaacttctctggaaagacaggtgtgtgaagactttttaaaaagtcattnnnnnnnnnnnnnnnnnnnnnnnnnnnnnnnnnnnnnnnnnnnnnnnnnnnnnnnnnnnnnnnnnnnnnnnnnnnnnnnnnnnnnnnnnnnnnnnnnnnnnnnnnnnnnnnnnnnnnnnnnnnnnnnnnnnnnnnnnnnnnnnnnnnnnnnnnnnnnnnnnnnnnnnnnnnnnnnnnnnnnnnnnnnnnnnnnnnnnnnnnnnnnnnnnnnnnnnnnnnnnnnnnnnnnnnnnnnnnnnnnnnnnnnnnnnnnnnnnnnnnnnnnnnnnnnnnnnnnnnnnnnnnnnnnnnnnnnnnnnnnnnnnnnnnnnnnnnnnnnnnnnnnnnnnnnnnnnnnnnnnnnnnnnnnnnnnnnnnnnnnnnnnnnnnnnnnnnnnnnnnnnnnnnnnnnnnnnnnnnnnnnnnnnnnnnnnnnnnnnnnnnnnnnnnnnnnnnnnnnnnnnnnnnnnnnnnnnnnnnnnnnnnnnnnnnnnnnnnnnnnnnnnnnnnnnnnnnnnnnnnnnnnnnnnnnnnnnnnnnnnnnnnnnnnnnnnnnnnnnnnnnnnnnnnnnnnnnnnnnnnnnnnnnnnnnnnnnnnnnnnnnnnnnnnnnnnnnnnnnnnnnnnnnnnnnnnnnnnnnnnnnnnnnnnnnnnnnnnnnnnnnnnnnnnnnnnnnnnnnnnnnnnnnnnnnnnnnnnnnnnnnnnnnnnnnnnnnnnnnnnnnnnnnnnnnnnnnnnnnnnnnnnnnnnnnnnnnnggcaacatagcaagaccccatccctccacacacaaacacacacacacacacacacacacacacacacacacacacacacacacaaaaacaagctcttgccagaattagagctacaaattgccctcaggttcctagaagatcagtccttcaattagattcagattgagatgcttcctcttttaaacaatgattccctttctatcatgcccaataagaaaacaaataaaaattaaacaatactgcctgtaatctcagctacccaggaggcagaagcagaactgcttcaacccggcaagcagaagttgcagtgaagtgagatcgcgccactgcactccagcctgggaaacagagcaagattctgtctcaaaaacaaaacaatgtgatttcctcctctaagtcctgcacagggaaatgttaagaaataggtccaccaggaaagaaggaagtaagaatgtttgactagattgtcttggaaaaaayagttatactttcttgcttgtcttcctaacagttctccaaagcttcgtaccttggccagaggcttgtctcctgcgtacctgaggtttggtggcaccaagacagacttcctaattttcgatcccaagaaggaatcaacctttgaagagagaagttactggcaatctcaagtcaaccagggtgaaaatttttaaagattcactctatattttaattaacgtcagtccgtcatgagaatgctttgagaaaactgttatttctcacacctaacaattaatgagattaacttcctctcccctcatctgacctgtggaggaatctgaacaagaggaggaggcagtgggcaggtttccttatcatgatgtttgtcatgttcagtgtgaggcctcacaaaaaaaaaaaaaaaaaaaaaaggcgtcctggatataactgagagctcattgtacagtaaatattaataaaacagtgattgtagctgaaggatagaactgcttggagggagcaagtgggtagaatcgcgtcaaactaaagagcatttctagccaaagacacaatgatagattgaaggatatttattctaaatatagaatatgggtgaacgagatctgtggacttctgggctccaacgttagattctgattttagcaagcttgtcaggggattctgatattgaaaggctgtggccttcacctgagaaacctgccctagggggccatgaaaatttgtcctgtctttcagaagtgctatcagacatcaaatggaagttaaatcgtatcttaacaattactaggatgggcgcagtgactcacacctgtaatcccaacactttgggaggctgaggcaggaggatcacttgagcccaggagttcgggaccagcctgggcaacatagagagacgttgtctctattttttaataatttaaagagaaaaaaatactgaaaatattgtatacaccactgaattataataatgtgtatataatgtatatattcattatgaggaatatttgattatttcatatattatatcttttccttctgtttattttatccagttatgaagtatttagaacaattcatcagtaattggggctaaattgacagaatagtaatnnnnnnnnnnnnnnnnnnnnaaaatagaaaaagacagatgggttatctttgaataccaggttggagttgtttatgggtttgttttttgttttgggggcgtttttttagacagagtcccactctgttgcccaggctggagtgcagtggcacaagcatggcccactgcatccttgacctcttgggctcaagcaatcttcccaccttagcctcctgagtagctgggaccacaggtgcatgtcaccacacccagctaatttttttattttttgtagagacagtctttctatgttatccaggctgatctcaaactcctgcactcaagtgatccccctgccttggcgtcccaaagtattgggattataggcatagccaccacacccaacctagtttctatttagacttggccctttcccaccagtcatttgtgtccaaaagatctcataaatgtagacaggaaactgtcctttgctcatcagttttcttcatcctgtgtctagggggatggtcggtgggggaaactggggttatgcaagttcctctgaaacatcctctgtgagcccagggatggatgaggcaccagccgccagcgagtcagtgtgcagctttccagaaaggaagtcatcagccagtcagccggccctggcagccagcacccggcaaccctgctgtcttgtgataaagaaatggtctgcctgacaggatggtgtggatttttcttttttcttttttttttttttgagacagggtctggctctgtcgcccaggctggagtgcaatggcgggatcttggctcactgcagcctctgcctcccaggctcaaggcatcctcccacctcggtctcccgagtagctgggaccacaggcacacaccaccacgcccarctaagttttcgtatttttagtagaggcagggttttactatgttgtccaggctagtctcaaactcctgagctcaagctatccatctgccttggcctcccaaagagctggaattacaagcgtgagccactgtgcctgaccagggtggattttttcaagtgcacatgttgtggtcccagaagctctgatggtaccaaattcaaagcgaaaaaaagtcaacggttcccacccatcctacctcccatgatggcaagaggaaawcaccacactgcagatacagtccatgtaaaacaaattgctatggattttgaaagtgaaccttaagagaactgcactatgttttcttcattagagttctctggtaatttccagcttttttttttttttttttttttagacagtgtctcgctttgtcgcccagtgtcacccaggctggagtgcagtgacgtgatctcggctcactgcaacctccgcctcgtgggttgaagtgattctcctgcctcagcctcctgagtagctgtattttagtagagacgaggtttcaccatttggccaggctggtctcgaactcctgacctcaagtgattcgcccatctcagcctcccaaagtgctgggattacaggtgtgagccactgcacccggccagtaatttcaagcttctgaggagccctttgaattgttaaataacttgtagctatgtccaacatatccatgttcagtgtatgttcratatttcttaggaaacctgcccttggttgttttctttgtggtaattcatgagccggcaaatttgacatgtgttacagaatataccttttctctgctctcctacctcataaccagaacttaattatcctgctttagtcacataaatagctaactaaataaatatatgcgatttcagtctgctcactgtgaaaacagaccttctaaatgatctcttccacttgcagatatttgcaaatatggatccatccctcctgatgtggaggagaagttacggttggaatggccctaccaggagcaattgctactccgagaacactaccagaaaaagttcaagaacagcacctactcaagtaagaaatgaaaggcaccctagagatgttccagccccaaagatatttgaataggttggactcgggcaccaatctagcaagtcctacggaagttgtataaagctgaaaatactgaagcatttcccaaatgggaaatcctaaactcaaaacttgctttttggtttttttgtttgtttgttttttcttcatctgacattgcttagtagtcacagaatgaaagataaatcaatcattcatgatctaacaatgaccttcagtgctctaaaaaactacggagtcaaggaaaacatgaatatattcctcatgtaaaattaaaatacagacatataaagggcaaaacatgaacatcattcataccttgaggtccgtccccctcccagaaataacccccagtatgccttggtttagagcattaagcaggagggccctgagtcactccagacagtcttggccaccaagcagcattctctttttgtttcnnnnnnnnnnnnnnnnnnnnnnnnnnnnnnnnnnnnnnnnnnnnnnnnnnnnnnnnnnnnnnnnnnnnnnnnnnnnnnnnnnnnnnnnnnnnnnnnnnnnnnnnnnnnnnnnnnnnnnnnnnnnnnnnncgcccagcctggagtgcaatggcgcaatcttggctcactgcaacctccacctcccaggttcaagagattctcctgccttagcctcctattcattatgaggaatatttgattattcagttcctgtagggtaaagatattacccccgatcatattattgattattgagtagctgagattacaggtgcctgccaccacgaccggctaattttttgtattttttagtagagacagggtttcaccatgttggccaggctccaggctcgtctcgaactcctgacctcaggtgatccacccacctcagcctcccaaagttctgggattacaggcgtgagccaccactcctggccacaatccttttttaactatgaaatatatttttatctgaagtttgatgtttatacccmactgagggatgatgttcccatatctcagttaaagaaataacctgctcagatacttcaagctcttcttttgacttttgaaaataaatgatcttgaagttactatactttgtttgggttagttaacattatttaaagtatattattttaattaattatctttgtaagattttactgtatactacctggagttcaatgtatcagatggatttcaaatttatgtacattttttatgtatatggtacagaaaaaaatgtgwtccataagaaatcaraaaatagcgcatatgctaatagctaatgttgtcctctaaaaaacttwtttttgcatttttaagagggsgatmtactctgacactttaataagtgtaattaattattgactggaatttggcatgaggcagggccatttcagatcccattaaaggaatgacacataccagagaaccacagaagtaaggccacatttgtaataaatcattatagctctgctaggagaagacccagttgtattaggtaattaatggatttgctcttaaaacacatgtcccggaagatataggtgagtcttggggggtcgcattaaacattataccaatgtatcttacatttctaagaaagttttactactttacaggatctttctgttaccaaaatggwaggtttccaactccaggacttggctttcatagttcctacaccaggggaaatgccttcctttgctaactatgcaaccaggttagttagtgtaagtccagccaccctgttggcaatgctaaaaggtacaacaaacacagaattttatttgcatttgtaaacatttgatttctggctcgaaattttcagttttcatgggcacgtcatggaaacagaaatcttctgtgtttagtttgggcacctactcattgtagtgacaaatatttcagaagcyaataggggattccacaaattgttctgaacctgtggctgagactggtaatggctgagtgacatggggacataccacaaaagaagaggtagcaaaaggctgctgagataaggacatgttcattgcttagctagtggcctgcacccttaaaacacatgtcccaggctgggtgctgtggctcacgcctgtaatcccagcactttgggaggctgaggcgggtggattacctgaggtcaggagttcgagaccaacctggccaacatagtgaaacctcatttctactaaaaatacaaaaattagccaggcatggtggcgggcgcctgtagtcccagctactcaggaggyaggcaggagaattacttgaatctgggaggcagaggttgtggtgagccgagattgcgccaccgcacgctagcctgggcgacaaagtgagactctgtctcaaaaaaacaaaaacaaaaaacaaacaaacaaaaaacaacaacaacaaaaaaacgggtatcccagaagatacaggtaagttttctaacacaggtcctcttgtatggtgcgttccacttaagtagaagatgacaaaaacatttgtcatgagaatatagactcacattttaaacctgtttgagcaggaaaaggaagcartgttacagatgtaattcygggtgtgactgcagaaaggatgactcccttattaaagtagtcatcctgagtgagctaactctttgtacttcctcttctcctcctgttcccctcatcaccccattcttccgttgcctacacccaggcccacattggatgctgacatagacttacatggtacagtccaagggaaagatctgccatttttttcaatgtgtcatcttggttatcttcattccaaggatctctccactctttatacagtaagagatgagagtctggaaaggattgggaataagataatgaattgtaagttttaaattgttcttcgtattttgrgkaaggagtaggctaggtggtccttctgttttttttktgtttttttttttaaagtagatgtggccagacgtggtggctcacgcctgtaatcccagcactttgagaggctgaggcaggtggatcacttgatgtcaggagttcaagaccagcctggccaacacagtgaaaccccgtctttactaaaaatacaaaaactagccgggcttggtggcgtccacctgtagtcccagctactgcagaggtggaggcaggagaatcacttgaacccgggaggtggaggttgcagtgagccaagatcatgccattgtactccagcctgggcgacagaacaatactctgtctcaaaaaaaaagagaaaagaaaagaaaaaaagaatggatttgaactcagtcgtcaatagcctctattccaggagatgttacagttgattatgttatagggggtgtataatagaatttcgagctatgtaaattccaagtgcatttggaagaatgaagaaatggaggaagggtaaagtatgagtgcaagcattccaggttttttgaaaatgctataatctttgttcagggctagtacaaagtgctatttagctgtaagggttttttgtgatttacagacagttttcacatgtgtcatttcaaccttggttttatggcgaaggcatgtgatggtgcttgtcccaggactttagatccatatctgaggttcctgtcgggcaaagatattacccctgttcatattatagtctataagtgggagagttgtgcctggagctcaagtcttatgatttctgatccagggcacttcctacaacatgattttgcaatataaaagcctataatgtgtgactaaagcaggtcactcaccccttgtaacagactctagtaatggtactgccaccaaacggctgcgtgatattgggcaaagacttaccttatttgaatctcagtttcctcctagaaaaatgagggtggaggttaagcataggctgatgatcctaaagcctccatactgccctaaactgtggctctaagatccagtagaatgctgggtcacaggactctagggagcttttcaaacccaaatgtctgtcattccttgatggtaggcagcagtttatggaagtgggcgacacagcaaatatcaaaatacctaaagcagcttgcaagagttgtttctgcctagtggtctttatagttaatattaaatagttaattttttttttttttgagacagagtcttgctctgttacccaggctgcagtgcagtggcacaatctcggctcactgcaacctccacctcccgggtttgagcaattctgtctcagcctcccaagtagctgggactacaggtgcatgccactgcacccagctaatttttgtatttttagtagagacggggtttcaccatattgggcaggctggtctcgaactcttgacctcaggtgatccacctgcctcagcctcccaaagtgctgggattacaggcatgagccactgcacycagcttaaatagctaatatttaatattattctatagttattcaagtaattcaggccaaagacttagaaacaaaacaaaaagccacttttaaggagaaagggtgtaagtttgccagatagatagagatctttcttttttaactacaagagttcaggaatgaattactctttaacaaacgactatagatatacatgaaaattggaaggacttattatgcatatgataatcaatttaaagacaacacttaaaattatattgttgccactctcaaaaagtggtaatagaacagctaatggtttaaaaagcagagtacagaagttcccaaacttatggcaccttaatatcgcagaaaactttttaaagcatgcctaggccacaaaaaatacctgtattttgattattaaattgtaaggtctacacaacctaatagtaataggtccaatagtaatgctgtccaatagatgttgatgtttttttccttgcaaacttaaaagatcctacagtgcctctgtaaatagcactgcctggttagagttgaatttcagataaataatttttttcatgttaattatttttcttttctttacttttttttttgtttgtttttttgttttttttttgagacaggrtctcattctgttgcccaggctgctgtgcaatggcatgatcatggctcactgcagccttgacctccctgggctcaggtgatcctcccacctcagcctcccaagtagctagctgggactacaggtgcttaccatcatgcccggctaatttttgtgttttttgtagagatgtggttttgccatgttgcccaggctggtcttgaactcctgggctcaagtgatccgcccgcctcggcctcccaaagtgctaggatgacaggcatgagccactgcacctggcccctgggcgaagtatttcttaatggttacataggacatacactaaacattatttattgtctatatgaagttcaagtttaactaggtgccctgcacttttagttgctaaatcctgtagctgtacccatgcattcactggtgctccccagcttgccttgcacagagtttggaaaccatagtcctataactctaggccaattttttaatgtaaaatttgattcattttaaattaataaataataacaggaatttttttaaaaattgttttaaatataattaaaattatcaaaatattttttaactgaacttgtgactagagatatttagattatgaagagtggggtttatgctaactaatgacagtctggctatgcatgtggagcactgagctataaattgtggcttccccaattctcctgatgtcacttgaacaaaacctaagtgtcagaccagagcttctggtatcttccatgggatttcattcaacagctggagcaaatgaagtcagattgattttttttaatttgtccaattttgttgtctcaaaaacataattataatcatttattagaactagaatttcttcagtttaacaacagaaatagttattcattatgaaaagcgaatctggaggccttcattgtggtgccaatctaaccattaaattgtgacgtttttcttttaggaagctctgtagatgtgctatacacttttgcaaactgctcaggactggacttgatctttggcctaaatgcgttattaagaacagcagatttgcagtggaacagttctaatgctcagttgctcctggactactgctcttccaaggggtataacatttcttgggaactaggcaatggtgagtaccccagggaacaattcattaataaggagattccccactagcattatttcttttcttttctttttcttttctttttttttttttttgagacagagtctcgcactgctgcccaggctggagtgcagtggcgccacctcggctcacttgaagctctgcctcccaaaacgccattctcctgcctcagcctcccgagtagctgggactacaggcacccgccaccgcgcccggctaatttttttttttttttttttttttttttttttttgcatttttagtaragacggggtttcaccgtgttagccaggatggtcttgatctcctgacctcgtgatctgccctcctcggcctcccaaagtgctgggattacaggcgtgagccaccaggcccggctagcattatttcttatgacactttttttttttttttgagacggagtctcgctctgtcgcccaggctggagtgcagtggcgccatctcggctcactgcaagctccacctcccaggttcacgccattctcctgcctcagcctcccgagtagctgggactacacgcacccgccaccacgcccggctaatttttttgtatttttagtagagacggggtttcaccgtgttagccaggatggtctctatatcctgaccccatgatctgcccgcctcggcctcccaaagtggtgggattacaggcgtgagccactgcgcccggccaacactctttttattattagcaaatatacttctgcctgggcacattcttgcaagtgctcaacaatgcaacttttggaagtgcatgtggcagaaactcctgctgtatttattccagaacctattattgctaatcccagtttatgttacatttgaagtgagaaccagttggagccagcaacgttcccagctccaaagttcccttgagattttcagaatcacttaaccctattatgcttggcaacctggactcagcaaaactgggaagtcagcagtttgttttattcatcccttcctttctcaktttctcaaatgtgtcagttaatctcagtaaccccattgcaaccttcattacctgcccaarcggtctagaacttgccagtatagaatcctacgtgggtcaagctcctgactgtctccttcttcactctttttttgcaaagaacttgtaaattttaactataagtattcatgattcgccacatttattcaaaacatagagtgctttttccacatatcagccaatggaaataaggattaaatgggaaatgaaatgtagtaataggataagcacaagtcttcttcctgctcaaacttttttttttttttttttcagacaagatcttgctctgttacccaggctggagtgcagtggcgtgttcatagctcaatgtaacctccaactcctgggctcatgcaatctctcacacctcagccccctgattagctaggactacactatgcctagccaattttttttcttttgtctggttgtgttgcccaggcttgtctcgatctcctggcctcaagtaatcctcctgcctcggccttctaaagtgctgggattataggcatgagccactgtgcccggtctcaaacctttttttccaaagtaaatgaagttattagatatggaatatagtctagttcccagatatccatatccattggtttattaccctcattattaacttcaaattgtttaatagaccctcatatctcagttatacagttaaaatttttgttttgtttttctggagtatcttatttataactwtgagttttactttacttatttattttattttttgagacagacgcttgctctgtcactcaggctggagtgcggttgcgtgatcatggctcactatggcctcgaccttctgggctcaagtgatcctctccctcagcctcccaagctgagactacaggcatgcaccaccacatctagctaatttttttttttccccatggaacaaggctttactatgttacccagagtggtctcaaactcctggcctcaggggatcctcctgtctcagcctaccaaaatgctgggattacaggcatgagccatagcgccagacctggttttacttttcttgactttgaattacaagtttttgtaatttggaaaatgttttgttgcttttaaatactgctgtatgtttgcttttaaatacaacatttctcgatatatattttgagaattgctgtctttcagaacctaacagtttccttaagaaggstgatattttcatcaatgggtcgcagttaggagaagattttattcaattgcataaacttctaagaaagtccaccttcaaaaatgcaaaactctatggtcctgatgttggtcagcctcgaagaaagacggctaagatgctgaagaggtaggaactagaggatgcagaatcactttacttttcttctttttccttttgagacagagtctcactctgtcagccagactggagtgcagtggtacaatcatggctcactgcaacttcgacctcccaggctcaagcaatcctcccatctcagtcccacaaatagctgggactacaggtgcacatcaccacacctggctactttaaaaaaatttttttgtagagatggggtctccctgtgttgcccaggctggtctcttgaattcctgtgctcaagccatccttccacctcagcctcccagagtgccaggattacaggcatgagccaccacacccagccaccacttttcttaaaaaaaaaaaagattctctctggtagacaatcctcaatagtccacatgttattaaacaatctgctgcctgaatacatgatttaccaaaaaaaggaaattttgacgggttcagaatatcaagggatctgaggcaaatgtcacctatgataaaatttgctatcaaaattaggaagtttgtgtttacctgatcctaaagcagtaaccagcccatttctagggaataaaactctcatgcgtatattgtgcatatatatgtattatatgactgagtgataataaaattttttttctagcttcctgaaggctggtggagaagtgattgattcagttacatggcatcagtaagtatgtctcctattcttaatactaggaaagtaaggctagctttatttattacctagtattcaaaaagttagttcatttaactgccaattgactgcagttcaaataagaaacaaatagtgtctcaagtagcactgtactccaattttaatattaataaaaaaaatttwaagttattttaaataatgtagtggtttctataaagatcactttatacagaagaacagtgccaattaacccatggaacatataagtagctaaaaccaattgcttgccaaagaaccagtaacccaggagtacatgtccttgccactgtgttttttcaagacagagtaactgatttctagttacttgcatagaatggactcctcctcataactcccttccatcttggtctttccctagtagaacttctacctttttttagtaacaggtgagtgggagaggtaagaaggagaataaggtcagcaattaacctaaaagcagaaagtaaaatttgttattttttttctgaatattttctgtgtaatttagctactatttgaatggacggactgctaccagggaagattttctaaaccctgatgtattggacatttttatttcatctgtgcaaaaagttttccaggtaatagtctttttaaactttttaatgtaaaaccagaatccttattttatagtctagctagttctaaattctataggtatgtatatttacatgtttttctaattttagagaacaagcactatgacttatccactgttagttttccccttagcattgggtcttaccccatgtacgtgattagaaatttgaaatatttccaatagcctttagtagaattaactcacatagatgataagaatgggttggttcacttcatgttccttccacagcctactatttcaataaaagaaagtttcccaagacctaaatgactatgaacatattttataactatataggaggggtgggtctaggaatacaaagttttgaatgctgttaatcttcaacaccacagttgaaaccacaggtcagcttttttgcaattaccatggatacttttctgttctataggtggttgagagcaccaggcctggcaagaaggtctggttaggagaaacaagctctgcatatggaggcggagcgcccttgctatccgacacctttgcagctggctttatgtgagtgaagcagcgctggccttaggggtcagagtgcagctcttctccatccttctattctgctgaaatagctccccagccaaaaagcagatcaaagaccrtttcagtggctgagccccaaaattcatgccagattttgcaagaaaatgatttactaaagcttgagggacatctttaacaagtgttccaaattaatcactataaggatgaattgtttcagaaattttggcctttaattatggcccataaatatgtcaagtagtccttactctaaagaagtacactgtaaaagaatgcatatagccggatatggtagttccctgtaatcccaatactttgggaggccaaggtgggaggattgcttgagcccaggagtttgaggctgcagtgagttatgatggtgccactgcactctagactgggcaacagagtgagactgtctttttttttcccctctgtcacccagactggagggcagtggcacgatctcacctcactgcaacctctgcctcccggattgaagcgattctcctgcctcagcgtcctgagtagctgggactacaggagtatcaccgcactgggctaatttttgtatttttagtagagacggggttttgacatgttgcccaggctggtctgaaacccrtgagctcaagtgatctgcctacctcagccttccaaaatgctgggattacggacatgagcyaccacgcccggccacaccctgtctcttaaaaaaaaaaaaaaaatgcaagttagagcatattacagctttgtctctcaggaggatacttagtgtatgtagctataattcatagattcccaagaagtttagagcctaaagtatgaggtcccaccagaggggctatcattaaatttaaagatttgttaaatcatctcattgtccaacaccacaaacttgattgctttaaaatactggtttagttacatttagtaactctattagtgcttttaatctatactgctatatcctcacattgagattttttttcttttctcttccatcttcattcttttttctctcatcctcattcttataagcctagaatacatcacaaatcctttatgcccatggaagcaagaggaataaagaatggagatgtttgttttgccattaactaaagatctggggtgtcggggagaagggggatagagaaggagaagtgggaagaggtgtccataatagcttaggtgcaattctgcttattttacattttacccccgctgactgccactttttcttcagccctcacacattgtttgtgcagggacctcataggaccaggaattgtctatagaggtgggaatttgtctcaccctgaaagggatacctctagcatggtaatagtcttctaggatttgttatcatatggaaagatgtaaagggagggattctgctgctgctgctgctgctgbatgcagttgccatttcatttaaatgacttatttataattgatgacacttttctggcttcctgttaattcctccctcaaagatcaataaaccagaaccaggcatggtggcatgcacttgtggtcctgtaaccacccaacaggttcaccttgcctgctgtctagatagagccaattatcaagacaggggaattgcaaaggagaaagagtaatttatgcagagccagctgtgcaggagaccagagttttattattactcaaatcagtctccccgaacattcgaggatcagagcttttaaggataatttggccggtaggggcttaggaagtggagagtgctggttggtcaggttggagatggaatcacagggagtggaagtgaggttttcttgctgtcttctgttcctggatgggatggcagaactggttgggccagattaccggtctgggtggtctcaaatgatccacccagttcagggtctgcaagatatctcaagcactgatcttaggttttacaacagtgatgttatccccaggaacaatttggggaggttcagactcttggagccagaggctgcattatccctaaaccgtaatctctaatgttgtagctaatttgttagtcctgcaaaggtagacttgtccccaggcaagaagggggtcttttcagaaaagggctattatcatttttgtttcagagtcaaaccatgaactgaatttcttcccaaagttagttcagcctacacccaggaatgaagaaggacagcttaaaggttagaagcaagatggagtcaatgaggtctgatctctttcactgtcataatttcctcagttataatttttgcaaaggcggtttcagtcccagctacttgggaggctgagacaggaggattaatggagcccaggagtttgaggttgcagagagctatgatcacgccactgcactccagcctgggtgacagagtgagaccctgtctctaaataaataaataagtaaataaataaatacataaataaaatcaagatggtgtgcaattagaattgagcgattttgtttccaaacctcaagaaagcttggtcttgctctgtcccaggtggctggataaattgggcctgtcagcccgaatgggaatagaagtggtgatgaggcaagtattctttggagcaggaaactaccatttagtggatgaaaacttcgatcctttacctgtaagtgaccattattttcctaattctagtggagtagattaaagtcaactcaggacctctggtgttaacctcctatgaacagtcagtcctctcagtaactagccaaatcatgagatgatgaattagaaggagccttagatagcatccaatctaacatttttttgtgtgtttgaagagaagaaatcaagagctaggaataactttttaaaggtaagccatttgcagtatagtgtggattttgtttaaaaggggataatttgaaattttatgactcattatacaagacaaaataagttggattttcaaatgttttacaaagtaaatcaaagttataattgcctacagtacgcaaagcttcaaaacattttttatgttatgaaattgtaatttatttaaccttaaaatgagccagtaccatgtgtttgcttaaaaatctcatgctaagaatttactatgttgttaataatcttcaagatatttatgaataaagtcttatttctaatccttcctccaactgtatctggtgctaaatcaggaaatgtttcttcccaaaaagcctcgtggaagatctgtatgtctaaatatatgtcagggataatacagatgtagccctgmgaagcatgaccttgatttttatagtctaaaatgtcatttgcagatatmtattttctaagaataattcctaaaagaattatttgaatgttgtaggaaagctaagaaattttgcaaagagcgtacgtgaaaatataagctaggcttttgtggtttgtggatagacttcccaacaaaattgctttttatctatagtgatccaagcttgtggaacatattagtcatctttttttagaaaattcttagaaaagtgatcttgcaaaaatggaatttatctttccccaagtatattctgtcatgtatagagttaaactaagcatagtaatttcaccagacaaacattcaaaatctactcctgacctttttatctcatccaaattttcccagggcccagacataaacctttgccttacgaactctttgtatatgcactaaatatgcttctccttcaaggttctcagtcagctagaaaaatgtgcaagagtaaatggtacccttctcacttgtagatccaagagaattagacttaaactcactctacatgtctgtgactttattttatttgcatgacagtcctgtgaggtggcaaggcaggtatcttggatccattttttagataaggaagttcaaattgagaagaggttgcatgatttacaggaagccatactgtagtcctatgttactcttaaaaatcccattcaaatcctgcttctgaggcctgcatactttctaccctaccagtcattgacccatgcttatgtctcctttgaaaacattgattccactcttgtctccagtgaaaaagtggaatttaagcagagaaacaaaagccatttgtcttgttaagtctactttccctctactttcaagaaggaaagttggggtatgtgttgaatggtgatttatttatttatttattattttaaaaattgatacaaggtcttactgtattgtgcaggctggtctcaaactcctgggctcaagtgatcatcccacctcagcctcccagtgttgggattacaggcatgaaccattgtgcccaccaccgatccgcagttttttaagaaaaacttttactatagaaaattttaatcatatacaaaatacagaggaaagtatatgaacccactttaggagactagaatatgccaccccaaaatatgccactttggcataaggattatttcgagctaaaggcaactgggaagaaacacatagaagaaaagttctctgtccttctccatttgcctaaaagcaggacatgaatcttaaaagtccccctccttccctttctaccaggaaaaacaagagttaatcactgaagataacttcagacccttatcagtgtagagatggcactagaagaatctatattacatactcatttattttccttcccacaacttgccaccccagagactaaaaatccttttcctttgtcatgtctcttgtccaaaaatttgctctataagctggagttctaagccacctctttgagaattacttgttccctggtattttctgttaacatacatgtattaatatacatgttaacaagcttctgtttgtttttctcctgttttctgtcttgttacagaggtccatcccaactaagaactaaagagtaggaggaaaatataatttcctcctgcatactttgatcttgtttaatccgtaatccttcccacttttcacctcctacctattagattactttgaagcaaatttcagatatattactttatctataaatatttcagtatgtgctaggtgtggtggctcacacctgtaatcccaacactttgggaagctgaggcaggaggatcacttgagcccaggagttcaagaccagctacggcaacaaaaaatcaaaaacttatctgggcatggtggcacatgcctgtggtcccagctacatgagaggctgaggcaggaggatcgctttagcccaggaggttgaggctgcagtaagctgcattcacaccactgcactccagcctgggtgacagagtaagaccatgtctcaaaaaaatacatattttagtatgtatcctttttgtaaaaacacaatacttttatcatactttaaataataacaataattccttagtatcaccaaatattttgtcagtgtctcacattttccttattgtctaaaatattgttgatagttattcaaatcagaatccaaacaaggtccatatattacatttggttgacaagtctcttaagtttgttcatctttaagttcttcctccctctctttcatctcttgtaatttattaatgtgaaaaaacaggtaatttgttctatagtatttcctacattatagagtttgctamatttattccctatgatatcatttagcatgttcctctgtcccctgtgtttcctgtaaactggtagttatacctagaagcttgagtttattcaggtttttaattgtattttttttgcaagaattctttattatctgcttctggaagcacagaatgtctggttgtgtctggttttgatcttgacagctactgatgaccattgcctaatccattactttattggggtggggggaataaggttttaaaataaattttttttwaagatttttttaactgttattttgagacagtgtctcatttcgtttcccaggctggagtgcagtggcacaatcacggctcactgcagccttgacctcctgggatcaggtgatcttctcacctcagcctcctgggtacctggaactacaggtgcacaccaccacacctggctaattttttgtattttgtgtacagaaggggtttcatcatgtttcccagactggtcttgaactcctgggttcaagtgatctacccacttcagcttcccaaaatcctgggattacactttggccaccgtgcctggcctaaatgaaattatttgtctctaaacagacagaagttttactttaaaaatttgtctttgtgtgtacatgtgtttgtgtatgtgtgtgtgtctaaaagtttggctttgagctttgctttgaattcttggatgaacrataaccaagaatacttaaactctgatcattcttgacagatatcccctacaggctatggccttttgaattgtgtcctccagtgataaaaagcagcaagcacgatactgctytcagattcatggtggtcacatgtgaggkgaaaaaaaaaaaaaagatgaatcctatttaaatgcccccaggataacagtgatactctttgtaggataactatttgcttgccactggtttcattaaataaggacataagtaaagatctatttttgtctctttctccccaaccaccacaactaggattattggctatctcttctgttcaagaaattggtgggcaccaaggtgttaatggcaagcgtgcaaggttcaaagagaaggaagcttcgagtataccttcattgcacaaacactgacaagtaagtatgaaacacaccctttaccaatcatcaagttttagtgggtaagcctgtaactttactcaaacaccctgttgcatgtgtctatacattgcataagtataggcagttgcaatttagtaaagttttatacaacgattttattttattttatttttagaagaaaaatgctacttttgttgttgttgttttttgagacggggcctcgctcgtcacccaggctggagtgcagtggtgcaatctcagctcactgcaacctccgcctcccgggttcaagtgattcttgaagaggagaacaataataacaacaatattattttcaaaagttgtgaccgcagtttctggagttgagaagacatcgagatttttgtagcctcatactcttgctttaggtagcaaaaaatgttcctaaatctcaggaatattctctagataggtttcaatctatcattcctgataagatgatgctgaaatactaattctagccaaaaaagaccagctaccatttccgattgttggggactgggaactctggatagtgaggaccccagtaggaagtagcgaggggaatggtttgaatggataaattcataaaaaatgtcagtagatttaattttcttatacatttcagtctttttataaggctaggaaaagcccctgtttttatggtttataatttgaattcacatgaacccacaaaatttgccttttaccttcctatgtctgaaaatggatagtctggctggcctcttaacaacccagctggcagagctgtgaggatctcagtgtgctctagcccagacattggtagcatgaacggcaacatttttaattgtgttttcaaaataggagcacactagcggtctaaaacgatcataaaagaaggatactaagagggcccactgtcattatggatcctaatacttaggatgcattatggattgtcattatggatactaatacttaggatcacatttgtaattgagtttttaattgcttaaattagatacatatttctattaagttaacctctttgcttttagtccaaggtataaagaaggagatttaactctgtatgccataaacctccataaygtcaccaagtacttgcggttaccctatcctttttctaacaagcaagtggataaataccttctaagacctttgggacctcatggattactttccaagtaagtaattttccttgttcattccaaactttcannnnnnnnnnnnnnnnnnnnnnnnnnnnnnnnnnnnnnnnnnnnnnnnnnnnnnnnnnnnnnnnnnnnnnnnnnnnnnnnnnnnnnnnnnnnnnnnnnnnnnnnnnnnnnnnnnnnnnnnnnnnnnnnnnnnnnnnnnnnnnnnnnnnnnnnnnnnnnnnnnnnnnnnnnnnnnnnnnnnnnnnnnnnnnnnnnnnnnnnnnnnnnnnnnnnnnnnnnnnnnnnnnnnnnnnnnnnnnnnnnnnnnnnnnnnnnnnnnnnnnnnnnnnnnnnnnnnnnnnnnnnnnnnnnnnnnnnnnnnnnnnnnnnnnnnnnnnnnnnnnnnnnnnnnnnnnnnnnnnnnnnnnnnnnnnnnnnnnnnnnnnnnnnnnnnnnnnnnnnnnnnnnnnnnnnnnnnnnnnnnnnnnnnnnnnnnnnnnnnnnnnnnnnnnnnnnnnnnnnnnnnnnnnnnnnnnnnnnnnnnnnnnnnnnnnnnnnnnnnnnnnnnnnnnnnnnnnnnnnnnnnnnnnnnnnnnnnnnnnnnnnnnnnnnnnnnnnnnnnnnnnnnnnnnnnnnnnnnnnnnnnnnnnnnnnnnnnnnnnnnnnnnnnnnnnnnnnnnnnnnnnnnnnnnnnnnnnnnnnnnnnnnnnnnnnnnnnnnnnnnnnnnnnnnnnnnnnnnnnnnnnnnnnnnnnnnnnnnnnnnnnnnnnnnnnnnnnnnnnnnnnnnnnnnnnnnnnnnnnnnnnnnnnnnnnnnnnnnnnnnnnnnnnnnnnnnnnnnnnnnnnnnnnnnnnnnnnnnnnnnnnnnnnnnnnnnnnnnnnnnnnnnnnnnnnnnnnnnnnnnnnnnnnnnnnnnnnnnnnnnnnnnnnnnnnnnnnnnnnnnnnnnnnnnnnnnnnnnnnnnnnnnnnnnnnnnnnnnnnnnnnnnnnnnnnnnnnnnnnnnnnnnnnnnnnnnnnnnnnnnnnnnnnnnnnnnnnnnnnnnnnnnnnnnnnnnnnnnnnnnnnnnnnnnnnnnnnnnnnnnnnnnnnnnnnnnnnnnnnnnnnnnnnnnnnnnnnnnnnnnnnnnnnnnnnnnnnnnnntcttcccaagagcctttccacatagcctctgtagacattttttctttcttctttttttttttttttttttttctgagacagagtctcactctgttgtccaggctagagtgcagtggcrtgatctaggctcactgcaacctccgcctcctgggttcaagcaattctcccacctcagcctccctagtagctgggattagaggcatgcatcaccacgcctggctaatttttgtatttttagtagagatgaggtttcaccatgtgggccaggctggtcttgaactcctgacctcaagtgatccacctgccttagcctcccaaagtgctaggattacacgagtgagccaccgtgccctgcccctattacattctgatcacacatttcatgttttataattggaaaactggtgaaattatagacaatgttttgttcccctaaattctctttgatgagtatatattacttacactcttctgtctttaaaattttgcaaaatagtatcctagataagtttwtgagtgcacagtctgtacgcttactcatattaatgacctcggagagttaaacaacagtcacctttaaaaattattactatcattatcattatttttgaggcgggggtctcattctgtctcccaggctggagagtagtggtgcggtcacagctcactgcagccaccgctacctgggctcaagtgatccttcctcctcagccttctgagtagctgagaccacaggcttatgctaccacacctggctaattttttaactttttgtagagacgatgtctcattatgttgcccaggctggtctcaaactcctaagctcaagtgatcttcctcagcctcccaaagtgctgggattacaggcatgaaaaactgcacccagccctaaaaattattagggtcctgcatagtaagactttaataaatatttaaatgaacatctgktttttttwaaaaaaaaatagagacaaggtctcactatattgcccaagctggtctygaactcctggactcacgcaatcctgctgccttagccgcccaaagtgctgggattacaggcatgacccacctcatctgggctgagtgaacatatttttaacataaaggccgtattttatatttatctcatacattttgcccagcatccccatttccgccgaatctgttgcttgctaattccttccagcttcatttcatctgaaatttgacaaacatcttctatttctttgtcgtcatgttattgacttcagaatataaaataaaacactatacccaaattaaaccccaccctcattgcccagcctgatgtgaaaataatcagcatacattaagcttacccttgatatatgtgtagcatcttttagataaatatacagctgattaagcaatatagcctgatggtataatatcttgcccatgtacctcatcttatctccagcaggattaattcacagtgatcagatttacctttaaactttgtagcaaaatatcctctccaaaagcatatctaaaacttttgtgtgtactcttgcaagtttcttaatttcatgcagaacaggctcttaccactgttagctggagatattttcaagacctatttttgtttgtggtttcctgatgatggtcatggcatttcccccttcactccatctaaaaattgaggtgatacaggcttttaaacaaaaccaactcatatagactgagtacaactgcaatgcaggcatgctaacctctgctacaatcatgggcgtgctattgatatgtcttaagttacagaacacagggctgagcgtctcattaggtcaaaatgtaaaccagtttttctgctcactgatgcttaatgaggacagggtgtgagagatttctttaaggaaaacaaatatataataatgctacatggaaaaatatctaacattagagaattaagtaaataaactaatatactcacaccatggaatcttgtgcagacattaaaattatgtagtggatggatgtttaatggtgtgagaaaaagttaggatgtgctggggtggggggaagaatcaagttttaagaaaatacagtatacccatacttaagtaaaaaaaaaaaaaaaggtatgtacagtcatgtgttgcttaatgatggggatacattccgagaaatgtgtcgataggtgatttcatccttgtgtgaacatcatagagtgaacttacacaaacctagatggtctagcctactatgtatctaggctatatgactagcctgttgctcctaggctacaaacctgtaaagcatgttactgtagcgaatatacaaatacttaacacaatggcaagctatcattgtgttaagtagttgtgtatctaaacatatctaaaacatagaaaactaatgtgttgtgctacaatgttacaatgactatgacattgctaggcaataggaattataattttatcattttatggaaccacacttatatatgcggtccatggtggaccaaaacatccttatgtggcatatgactgtatacatgtacacaaaaaatagatgaaagaatgaatatacatcaaaatatttaaaatggttataatgacttaggttacttttatttatcttagtaataataatgatgatagataatacttttatagtgtttactatataaaagacactgttataagtgttctacatactttacatgtattacctaaatgatataaatataactctgacagtaactaatcttatacgttctcttttcttttttttttttttctttttttagacagaatcttgctctaccaggctggagtgcagtggtgcaatctcggctcactgcaacctccgcctcccaggttcaaacgattctcatgtctcagcctcctgagtagctgggactacaggcacacaccaccatgcccggctaatttttgtatttttgggtagagatggagttttgccatgttggccaggctgatcttgaactcctggcctcaagtgatctgcctgcctcagcctcccaaagtgctgggattacaggtgtgaaccactgtgctcggcctaatcttacaagttttcaatatttaaagagtgctaactttgttgacaatataaaacatatttgagaaaaagagatataagcatcttatttagaattatgaaaatatcaatagacctacagccgactaaagcttttcttcataagctcttgcctatattgattcgctcctgtgaatatgcattaatttgatttaaataataagtatgtataagaaataacacttttccttaatttttaagaacgttcaacagtttttaatttgaattccaatagtgaaatacatagaaaatataaaattttctgtagtttagccaaattgtttttgtttcaccacagcattctaccaaaatttcttaataacagtaagaaaatgaatgcatacctcctgcagggagaggggagttaggcagtttatgggcatagttacaagtgagaaatttcattggctaccatttacgctaaattcataaaaactgcattcaattctatatatctattttctttacataaaaaaggtttcaattattggccattaaataaaatagccaccattccagaagttgtgtcatgtttatcctttttataccaccatcatattgcctattatatagattgtgtgtgttccattttctgtaatgggccagacagtaagtatttctggctttggagtccatatggtctctatcataactactcatctctgccattgtagcttaaagattatctaggtcaaatgcctaagtgatatagtgttgaaatacaagttatataatataggctgccacaaaaaaaaatttatttggtctaaaaaagatttcatgacttttgtagcagcatgggtggggcatgcaccacttggttaactcggtgtatctttctcctttgcagatctgtccaactcaatggtctaactctaaagatggtggatgatcaaaccttgccacctttaatggaaaaacctctccggccaggaagttcactgggcttgccagctttctcatatagtttttttgtgataagaaatgccaaagttgctgcttgcatctgaaaataaaatatactagtcctgacactgaatttttcaagtatactaagagtaaagcaactcaagttataggaaaggaagcagataccttgcaaagcaactagtgggtgcttgagagacactgggacactgtcagtgctagatttagcacagtattttgatctcgctaggtagaacactgctaataataatagctaataataccttgttccaaatactgcttagcattttgcatgttttacttttatctaaagttttgttttgttttattatttatttatttatttattttgagacagaatctctctctgtcacccaggctggagtgccatggtgcgatcttggctcactgcaactttaagcaattctcctgcctcagcttcctgagtagctgggattataggcgtgtgccaccacgcccagctactttctatattttttgtagagatggagtttcgccatattggccaagctggtctcgaactcctgtcctcgaactcctgtcctcaagtgatccacccgcctcagcctctcaaagtgytgggattacaggtgtgagccaccacacccagcagtgttttatttttgagacagggtatcattctgttgcccaggcttgagtgcagtggtgcaatcatagatcactgcagccttttaactcctgggctcaagtcatcctcctgcttagcctcccaagtagctaggaccacagacacatgccatcacacttggctatttttaaaaaattttttgtagagatggggtctcgctatgttacccaaactggtcctgaactcctggactcaattgatcctcccaccttggccttccaggtgctgggatttctttgggagtacagcatggtacagcaggagatcatttgatgttacctctgtgcagtgttgctagtcagcgaaagactataatacctgtggggacagcgattagccaccacaaccagtctttatttaaagttattaaaaatggctgggcgcagtggctcacacctgtaatcctagcactttgggaggccgaggcagatggatcacctgacgtgaggaatttgagaccagcctggccaacatggtgaaaccccatctctactaaaaaatacaaaaattagctgggtgtggtcctgtagtcccagctacttgggaggctggggcaggagaattacttgaacccaggaggcagaggttgcagtgagccgagattgtgccactgcactccagcctgggtgacagagagagattccatctcaaaaannnnnnnnnnnnnnnnnnnncatctcaaaaaaacaagttattaaaaatgtatatgaatgctcctaatatggtcaggaagcaaggaagcgaaggatatattatgagttttaagaaggtgcttagctgtatatttatctttcaaaatgtattagaagattttagaattctttccttcatgtgccatctctacaggcacccatcagaaaaagcatactgccgttaccgtgaaactggttgtaaaagagaaactatctatttgcaccttaaaagacagctagattttgctgattttcttctttcggttttctttgtcagcaataatatgtgagaggacagattgttagatatgatagtataaaaaatggttaatgacaattcagaggcgaggagattctgtaaacttaaaattactataaatgaaattgatttgtcaagaggataaattttagaaaacacccaataccttataactgtctgttaatgcttgctttttctctacctttcttccttgtttcagttgggaagcttttggctgcaagtaacagaaactcctaattcaaatggcttaagcaataaggaaatgtatattcccacataactagacgttcaaacaggccaggctccagcacttcagtacgtcaccagggatctgggttcttcccagctctctgctctgccatctttagcgctggcttcattctcagactctggtagcatgatggctgtagctgtttcatgggccccttcaaacctcatagcaaccagaggaagaaaatgagccattttttgagtctccttcatagacttgaataactctttttcagagcttctcacagcaaacctctcctcatgtctcctcatgtcttattgttcagaaatgggtaatgtggccatttcaccagtcactgccaacaacaacgaggttcctataattgtctctgagtaaccctttggaatggagagggtgttggtcagtctacaaactgaacactgcagttctgcgctttttaccagtgaaaaaatgtaattattttcccctcttaaggattaatattcttcaaatgtatgcctgttatggatatagtatctttaaaattttttattttaatagctttaggggtacacactttttgcttacaggggtgaattgtgtagtggtgaagactcggcttttaatgtacttgtcacctgagtgatgtacattgtacccaataggtaatttttcatccattaccctccttccgccctcttcccttctgagtctccaacatcccttataccactgtgtatgttcttgtgtacctacagctaagcttccacttataagtgagaacatgcagtatttggttttccattcctgagttacttcccttaggataacagcccccagttccgtccaagttgctgcaaaatacattattcttctttatggctgagtaatagtccatggtacatatataccacattttctttatccacttatcagttgatggacacttaggttaattccattcaatttcattcaatttaagtatatttgtaaggagctaaagctgaaaattaaattttagatctttcaatactcttaaattttatatgtaagtggtttttatattttcacatttgaaataaagtaatttttataaycttgatattgtatgactattcttttagtaatgtaaagcctacagactcctacatttggaagccttgttttccttcactgctttgtttatacctggaaacaggatatagaaccactagtgtgttgtttcaccccttgttatactatcaggatcagaagtgggggttttccaatgcacagtctgagacaaggacttgggtcaggtgggttatttgggaataaggaatgaaagaacagggagtgtgagagggaagtgaagaaaaaaccaatattaatttttgctgttgagtttgctgctgtgggcaatgagcgttcagttccaccagcactaccaagaattgtaggggatgcctcccaaaatttgtctcttattattctcttatttctcatcagctatcattttatagtcacattattgtcaattacaatttctacaaagaacaccagtttcacataaaattattttaaggccggaagcaattatagttaatgattgtatttgttaagcttgaaagtcactttaacgtctcatttgggagtcaaacgataaatattttcttttctattctctctttttttgagaaagggtctcactctgtcacccagtctggagtgcagtggtatggcatgctcatggctcactgcagcctaggcctcctgggctcaacccacctcagcctccctagtagctgggactacaagtgcatgccaccatgcatttttgtattttttgtaaagacagtgttttgatatgttgctcaggctggtcttgaactccatggctcaagtgatctgcctgcctcagcctcccatagtattgggattacaggcataagccaccacacctgaccaataaatattgtttaaacctaaaacaccttctctagggccaaccacaaaaatcagatgaaacatagtagagacgaaaaatatgaatgtagaagtgcttcaaacatgtaaatctgctaaaatgaagggtacatgtaaagtggaatgaatgttctggttgacgcaccatttaaacaaatatttgtgggatgaatgaatttattctccatccactaggtgcaacatttctgcattagcgttctctagagaagagaaacagtaccagtaggatatatataaagatataaagagtttttttttttttttttggagacagagtcttgctctgtcacccaggctggagtgcagtggcgtaatctcggctcactgcaagctctgcctcccgggttcacaccattctcctgcctcagcctccccagtagctgggactacaggcgtccgccaccaagcccggctaatttttttgtatttttagtagagatggggtttcaccatgttagccaggatggtctcaatctcctgacctggtgatccgcccacctcagcctcccaaagtgctgggattacaggtgtgagtcactgcgcccagctgatttattttaaggaattagttcaagcaattatggaggctgctgaatccaaaatctgcagggtaggctagctggcaggctggagacccaggaaaggaccgatgttgcagttgaagtccaagtccaaaggccatttgctgggagaattccttcttgcctgaggtaggtcagtcttttgttctattcaggccttcagcagattggatgaagcccacccacattatggagggcaatctgctttactcaaaatccgccaatttaaatgttaatttcatcctaaaacaccctgtattagtctgccctcatgcagctaataaagacatacttcagactgggtaatttataaaggaaagagctttaattaacttacaattccacatggcttgagaggcctcacaatcatggcagaagttgaaggaggagcaaaggcacatcttacatggtggcaggcaagagagcttgtgctggggaactcccctttataaaaccatcagttctcatgagacgtattcactatcatgagaacaacacaggaaagacccacccccattattcaattacctcccactgggtccctcccacaacatgtgggaattatgggagctacagttcaagatgagatttgggtggggacacagaaaaacagtatcattccgcccttggcccctcccaaatctcatgtcctcacatttcaaaatcaatcataccttcccacagtcctccaaagtgttaactcatttcagcattaactcaaaagtccacagtccaaagtctcatctgagacaaggtaagtcccttccccctatgagcctataaaatcaaaagcaaattagttacttcctagatacaatggaggtacaggcattggataaacacacctgttccaaatgaaaggaattggccaaaacgaaggggctacaggtcccatacaaatctgaaatccagcagggcagccaaatcttaaagctccaaaatgatctcctttgactccatgtcttacatccaggtcacactgatgcaaaaggtgggttcccatggtcttgggcagccccagcctgtggctttgcagggtgcagcccctctcctgactgctttcatgagctggcattaactgactaaagcttttccaggtgtgcaatgcaagctgtcagtgtatctaccattctggggtctgaaggatggtggctctcttctcacagctccactatgcagtgccccagtggggactctgtgtgggggtccacaccacacatttcccttctgcattgccctagcagaagttctcttatgagggctctgcccctgtagcagacctttgcctggacatccaggcatttccatacaacctctgaaatctaggcagaggtccccaaacatcacttcttgacttctgtgcaccctcaggcacaacaacacatgtaagccaccaaggtttggggctcgcaccctctgatgcaatgggttgagctgtacgttggcctctttttgccacagctgggatgcaggacaccaagtcccaagactgcacaaagcagcaaggccctgggcctggcccacaaaaccatttttccttcctaggcctcctggcttgtgatgggaggggctgccatgaagacctctgacatgccctgagacattttccccattgtcttggtgattcacatttggctcctcattacttatgcaaatttctgcagcccccttgaatttctcctcagaaaatgggtttttcctttctatcgtatcatcaggctgcaaattttctgaacttttatgttgtgcttcccttttgaacacaagttccaattccaaaccatatctttgtgaatacataaaactaaatgcttttaacagtacccaagttacctctggaatgctttgttgcttacaaatttcttctgccagatgccctaaatcatctctttcaagttcaaagtttcacaaatctctagggcagaggcaaaatgccaccagtctttttgctaaaatatagcaagagtcacctttgctctagttcccaagttcctcatctccatctgagactacctcagcctggactttactgtccatatcactgtcagcattttggtcaaagccattcaacaaatctctaggaagttccaaactttcccacatcttcctgccttctgagccctccaaactgtctgttatccagttccaaagttgctttcacattttcgggtatctttacatcagcaccccactataccagtaccaatttactgtattagtctgttctgatgctgctaataaagacatacctgagactgagtaacttataaaggaaagagatttaagtgacttacagttccacatggctggggaggcatcacaatcatgaagttgaaggaggagcaaaggcacatcttaacgtggcagcaggcaagagaacttgtgtaggggaactcccctttataaaaccatcagatcttgtgagacttgttcactatcttaagaacagcatgggaaagacctgtccccatgattcaattacctcccactgggtccctcccatgacagatgggaatttatggaggctacaattcaaaatgagatttggatggggacacagccaaaccatatcacaccttcatagaaacaaccagaataatggtttacttgtctagtttttttgagacagggtcttgctctgtcacctaggccagaatgcagtggtgtgcactgcaaccttgaccgctcgggctcaagtgatcctcctacctcagcctcctgagcagctgggactaaaggagtgcaccaccaagcccagctaatttttttaaagatttttgtagcgatgaggtctcactttgttgcacagactggtcttgaactcctgggctcaagcaatcctgcctcagcttcccaaaatgttgagatgacaagtgtaagctaccaacctgagcttcataagcctcttaactaatatccctacttatctcactgcttgcctacagtttactctcaacccagtattgagagtaattatttaaaatataagtcagtatgagacaagaactatgagaggaaaataaaataaaatagaagtcaggtcatgtctctgttctgttcacaatcctccaatggctccctcttatttcacttagagaaaagccaaagtccttaccacggtatgtaagaccccacacaacctggtccctagtcctctctgctctcatccctgatctctctcccttttgctcactctactctatccacactggcctccttgctcttattaagaaaacacttcaagcttgctcccatcttagggcccttgcactagacatccctctaagagtatctagtgatattcttccctcagatctctcatagctactcccttatctccttcaagtctttgagaaagtgagatcagggctgtcctaccaccccaattaccatatttaagtatacatacagcctgtccctacttttccctgttactcttcttttctccataccacttaccaccttcgaacatactgcaaaatctatttgattacctttttcagtccttgtgatgtggggaggggttgtcttgtttccaaagccttgtcagtcattgtaattcattcttctggccaccataaaaaagatgagaggtttattgtttgtttttttgagacagggtctcactctgtcacccaggctggagtgcagtggcatgaccatggctcacaaagcctcaacctcgggggctcaagcaatcctcccacttcagcctcccaagtagctgagaccacaggcatatgccattattctcagctaatttttgaatttttagtagagatgaggtctcactatgttgcctagactggtcctgagttcctgggctcaagcaattctctcacctgggtctctcaagtgttgggatcacaggtgtgagccacagtgcctggccagaataatttttgaccaaatgttttggcactatggcctagccaaattgacatgtaaaattaaccatttcagttcctgtgggtaataggtttaaaacaaaatgagttcctgcccaatccaaaatgaggaattggcgttgtgtacatgtaccctaaaacttaaagtataataataataaaatttaaaaaaaaaagaaagtcacttcaaaaaaaaacaacaaaatgaggaatcggagccttacaggcccttttagagaaagcctagtcccttccttttctgaagagtttgcagcagttaaatggctttcccaagggcatactgtgccttggcattagtctagaggagactcctgaaagttagggctctactctatgtgactgttctcttgtcctacaaattagcagagtgacatgtgggtacccatctcagtttcctgtgcactttaattggaccaaatatcttaggattgaatcacctctgggcagggtcagcatcatgggtacatgtgcagtcacccagggcctacgctaagaaggaccttgtacttggtttaatgtcctgctgttgccatcttgaaattcttaatatatttttttaaacaaagagtttggacctatattggaaagtcatggatgcaataca

SEQ ID NO: 94732 - DNA, 32943 bp, Homo sapiens
  misc_feature (1)...(32943): n = A,T,C or G
cccacccacattatggagggcaatctgctttactcaaaatccgccaatttaaatgttaatttcatcctaaaacaccctgtattagtctgccctcatgcagctaataaagacatacttcagactgggtaatttataaaggaaagagctttaattaacttacaattccacatggcttgagaggcctcacaatcatggcagaagttgaaggaggagcaaaggcacatcttacatggtggcaggcaagagagcttgtgctggggaactcccctttataaaaccatcagttctcatgagacgtattcactatcatgagaacaacacaggaaagacccacccccattattcaattacctcccactgggtccctcccacaacatgtgggaattatgggagctacagttcaagatgagatttgggtggggacacagaaaaacagtatcattccgcccttggcccctcccaaatctcatgtcctcacatttcaaaatcaatcataccttcccacagtcctccaaagtgttaactcatttcagcattaactcaaaagtccacagtccaaagtctcatctgagacaaggtaagtcccttccccctatgagcctataaaatcaaaagcaaattagttacttcctagatacaatggaggtacaggcattggataaacacacctgttccaaatgaaaggaattggccaaaacgaaggggctacaggtcccatacaaatctgaaatccagcagggcagccaaatcttaaagctccaaaatgatctcctttgactccatgtcttacatccaggtcacactgatgcaaaaggtgggttcccatggtcttgggcagccccagcctgtggctttgcagggtgcagcccctctcctgactgctttcatgagctggcattaactgactaaagcttttccaggtgtgcaatgcaagctgtcagtgtatctaccattctggggtctgaaggatggtggctctcttctcacagctccactatgcagtgccccagtggggactctgtgtgggggtccacaccacacatttcccttctgcattgccctagcagaagttctcttatgagggctctgcccctgtagcagacctttgcctggacatccaggcatttccatacaacctctgaaatctaggcagaggtccccaaacatcacttcttgacttctgtgcaccctcaggcacaacaacacatgtaagccaccaaggtttggggctcgcaccctctgatgcaatgggttgagctgtacgttggcctctttttgccacagctgggatgcaggacaccaagtcccaagactgcacaaagcagcaaggccctgggcctggcccacaaaaccatttttccttcctaggcctcctggcttgtgatgggaggggctgccatgaagacctctgacatgccctgagacattttccccattgtcttggtgattcacatttggctcctcattacttatgcaaatttctgcagcccccttgaatttctcctcagaaaatgggtttttcctttctatcgtatcatcaggctgcaaattttctgaacttttatgttgtgcttcccttttgaacacaagttccaattccaaaccatatctttgtgaatacataaaactaaatgcttttaacagtacccaagttacctctggaatgctttgttgcttacaaatttcttctgccagatkccctaaatcatctctttcaagttcaaagtttcacaaatctctagggcagaggcaaaatgccaccagtctttttgctaaaatatagcaagagtcacctttgctctagttcccaagttcctcatctccatctgagactacctcagcctggactttactgtccatatcactgtcagcattttggtcaaagccattcaacaaatctctaggaagttccaaactttcccacatcttcctgccttctgagccctccaaactgtctgttatccagttccaaagttgctttcacattttcgggtatctttacatcagcaccccactataccagtaccaatttactgtattagtctgttctgatgctgctaataaagacatacctgagactgagtaacttataaaggaaagagatttaagtgacttacagttccacatggctggggaggcatcacaatcatgaagttgaaggaggagcaaaggcacatcttaacgtggcagcaggcaagagaacttgtgtaggggaactcccctttataaaaccatcagatcttgtgagacttgttcactatcttaagaacagcatgggaaagacctgtccccatgattcaattacctcccactgggtccctcccatgacagatgggaatttatggaggctacaattcaaaatgagatttggatggggacacagccaaaccatatcacaccttcatagaaacaaccagaataatggtttacttgtctagtttttttgagacagggtcttgctctgtcacctaggccagaatgcagtggtgtgcactgcaaccttgaccgctcgggctcaagtgatcctcctacctcagcctcctgagcagctgggactaaaggagtgcaccaccaagcccagctaatttttttaaagatttttgtagcgatgaggtctcactttgttgcacagactggtcttgaactcctgggctcaagcaatcctgcctcagcttcccaaaatgttgagatgacaagtgtaagctaccaacctgagcttcataagcctcttaactaatatccctacttatctcactgcttgcctacagtttactctcaacccagtattgagagtaattatttaaaatataagtcagtatgagacaagaactatgagaggaaaataaaataaaatagaagtcaggtcatgtctctgttctgttcacaatcctccaatggctccctcttatttcacttagagaaaagccaaagtccttaccacggtatgtaagaccccacacaacctggtccctagtcctctctgctctcatccctgatctctctcccttttgctcactctactctatccacactggcctccttgctcttattaagaaaacacttcaagcttgctcccatcttagggcccttgcactagacatccctctaagagtatctagtgatattcttccctcagatctctcatagctactcccttatctccttcaagtctttgagaaagtgagatcagggctgtcctaccaccccaattaccatatttaagtatacatacagcctgtccctacttttccctgttactcttcttttctccataccacttaccaccttcgaacatactgcaaaatctatttgattacctttttcagtccttgtgatgtggggaggggttgtcttgtttccaaagccttgtcagtcattgtaattcattcttctggccaccataaaaaagatgagaggtttattgtttgtttttttgagacagggtctcactctgtcacccaggctggagtgcagtggcatgaccatggctcacaaagcctcaacctcgggggctcaagcaatcctcccacttcagcctcccaagtagctgagaccacaggyatatgccattattctcagctaatttttgaatttttagtagagatgaggtctcactatgttgcctagactggtcctgagttcctgggctcaagcaattctctcacctgggtctctcaagtgttgggatcacaggtgtgagccacagtgcctggccagaataatttttgaccaaatgttttggcactatggcctagccaaattgacatgtaaaattaaccatttcagttcctgtgggtaataggtttaaaacaaaatgagttcctgcccaatccaaaatgaggaattggcgttgtgtacatgtaccctaaaacttaaagtataataataataaaatttaaaaaaaaaagaaagtcacttcaaaaaaaaacaacaaaatgaggaatcggagccttacaggcccttttagagaaagcctagtcccttccttttctgaagagtttgcagcagttaaatggctttcccaagggcatactgtgccttggcattagtctagaggagactcctgaaagttagggctctactctatgtgactgttctcttgtcctacaaattagcagagtgacatgtgggtacccatctcagtttcctgtgcactttaattggaccaaatatcttaggattgaatcacctctgggcagggtcagcatcatgggtacatgtgcagtcacccagggcctacgctaagaaggaccttgtacttggtttaatgtcctgctgttgccatcttgaaattcttaatatatttttttaaacaaagagtttggacctatattggaaagtcatggatgcaatacatgactgatattacacccttttcaggtttgagtcagatctaaatcatctccaatctaacaactaggagtgttactaaattgcctgctggcctttattctttgcaggcaggagaaaggctaggtaccccctgcctcattgcaccaaagtggccaggcatccaacttgctgtacttgagccatgcaagaagtcacagaatcattgtacatgttttacagaaaggagcctaaagactaagtcaacttcctagaatattaaaatccagatgagtgacttgcctagggttactcagtgagaggttaaatgagttgatacatgtaaagtgcctggcacacagcgatatacagagttgcttatgaataagagtactgaccatctgaggcaggaggatctctttagcccagctgttcaagaccaacctgggcaatatagtgagacctcctctctatgaaaaattaaaaattagccagccacggtggctcgtgtctgtggtcccagatatttagaatgctgagatgggaggatcgattgagcccaagaggtggaggctgcagtgagccatgatccctccactggtctccagcctggatgacagagcaagactctgctgaccagacttttcagcttcaggttcttagcatcacacatgctggttgtctactgattacaaaaactcctttgaagggctgtcaaatttaaaattttcacttgtgtaatgaacatcccttaaccctgaatgcgattttaatttacagtcttgtatgtggccacttggtgcccttttttttttttatggctaaacgtgtacgcaaattcttcttttggattcagtaggtttttcaaagcttttttttttttttcctggtacaactgttccatatgaataaacactatccttttcattttatggagaaagctgataatagggttaaattatagggggccattgttttgaactaagttcctgcactaggtcccaacagatcagactaagaatcaagagtcacccatgctaaagttccaagtcaccaaactaaaactaagttgtatctgacattctgagaagtcaggaaagagagacaacagccaattttccaaccaggccatttcaaaatgcaatcgtcatgacaattaagtttcctgttttagtccttaacctggtgtaacctaatgttaaccaatccgttatttctctgttgttgtttccctgtccccgcctcgcaatgaaagtaatttgaagtgaccaatccgctttttgttctctgcttctgctttcttcagccctttttctgtctataaagccaacttcctccgctcgactctttggaacacttattctattttacagaataaggtgttgcccgattctattttttgtttgtttcctcagagaccccgttctgagtgttgcccgataatggaaccacaaagtcaatcaagatcgagttgtaaaaaattacaactaaatttattgtaatttttttgccttttgccaatagaaatccctttttcattaagtattcctccctagagtaagcgaccacgatgaccccaatttcacaagtaaggatgaggaaaggttctgcccacaccgccgcccagcctggcagactaggattgcatcctgcgggtgccactgcgcatgcctgccggggaatgacgtcaatccgagctcgtcccggcctcaccagcgccatgctgggctcgcgagccgcggggttcgcgcggggcctgcgggctttggcactggcgtggctgccgggctggcggggccgctccttcgccctggcgcgtgcggcaggcgcgccccacggtggtgacttgcagccccccgcctgtcccgagccgcgcgggcgccagctcagtttgtccgcggcggcggtggtggactctgcgccccgccccctgcagccgtacttgcgcctcatgcggttggacaagcccattggtgagtgcgggcgggcgggcagcccgggaatttgcaagtagcagccgccgagtcggctccgcggagctgtccgcggcggccggccggggcgtgatggaaatgagaacctgaaagcttgggcttggctgccgggtgccgtgcgccctggggcgaatcacctcgggacactttgaaatgagagcctgaaagcttgagcttggctgccggctgccgtgcgccctggggcgagtcacctcaggacacgcagtcgggacagtctcctaaaggacccgccagtttcacgtctgtctgcatcctgagcacctgaagcgggcaagataattctcattccacaaacacttgtttaaatggtgactcaagcggaaggttccgttctcgtggccctccttcatttattagaatgtttgatyctccccgcaatcttgtaaggcccacaaagacaatccttaagacagttaagacgctgaggaaactaaggctcctcgtcagagccagaccagaagaactctgtgttttgatgctgagtcggagctcttttacctgcatcacccataaggcaaagatttaattcatttgaacgcagcagggacagcgcttacggactgcctgtcagcttacaatcgcccccgacagaaagattttcctgaccttcctatyttaattaacacctaccaacctcactttctatcgctttatccgcaatttttcttaatagcactcaccactaactaaccttatgcgcttgttgattgattggcttctccagtagtgttaagtgaattaataagttcctactacgttgtccggccatagagatagaaaaagctatggaaaccctttgctttcaaggaactctggtctagttgaaaaagactatttggtgagctaggaaaatatggatcaaatatgagtgatacaaaagcaagtgctacaggaaaaagagaaattactgtggatcccttgctggaaagtttcgagaagaaattatactccaaaggacaagttgattttgcagaggagggaagagatcttagtgcgggaagtacttttgcaaagacccaagggtggagtgttagaacactaagaatacgagcctgacctggaacaccaagtgggtgtggaaaatgggaaacgagactagacaagaacatatctgaagaagctggatagcgtggaggaagaagtgaaggatgaactccagccaatctagatgatgacatttgccattgcagtgtatggagatgtagtcaaaggcctaggtacatttactccacttttgcccgtacaagacccgaattaggccttgcttttggtattctagatttatgcacgacctatttgggattagagcactaagttataacaatcagctatcaaagcataaaagcctactgaatgataggtacagccctgccatcattgggaagctgtgtatgacccccatgagttttggggccacattcacgttgagaggcatgcatttccaagcccagttccaatctgaagcctggctgtaattctgttcttggagtctgtggcatggagtggcagtgtagccttatagatgaacatctgccattattcccatttccccagttaaacctctggcttctatcttagtggctggaccttccgccatgtaacagaaggcaacaaaggggttatgagcaaaactttggagccaaacctcttggatgtgaacctccaccctgctcatctgagggaccttggataaattacttcacctctctgggcatccgtttttcatctgtaaaatgaagatactattaatgataatatggacgttatgaggtcacgaaaattcattaatatatgttaagtgcttagaacagtgcctgtcataatatgtgctgaagaaatagccattattatcttagaagtggggaatggagaaaattgtacttacagattgtgtatgtttggaagawaccagcctgcatggtttggttctaaataaggtgatcattacaggatttttcagaaaactaaatagtactatgttagaattcgctcaacaaatgtattttgaacccctaccatatgccagaaacaataattgacaggagtagaattccaggtttgataattctttatttaaattcttattttgtgggataattatgtgttcgttgttttactttgttgaagttatatcttgttaccttcattgatcaatagtaggttttcgttgtttttgagaaggcaatacagcttctttcaaatgggctaaactaccttattccagaaagtgtcagcaggtggcactctttccaccaaattggaagtgtaattttttgttttaccacgtttatgggtgattatgttgtcttgaagatcatctgtttttgatctgtccatcacccctcagaacttgctcattttatttcatctcccatagagtttttcccttttctacaaaaacatttctttttgcaatctacttgtctcttgtctttgctacctctgcgtctttcttcacagaaaagtatggggaatgaaagtgtcatatggaagacaaaaaaaaaaaaacattgctaggaatcagtagggacaaaagaacaggtgaaactgaagtgtatggagagatttagggagtacagagtgacagcattggacttaggacacagactgcagccagactgtctgggttggaataccaccttagcctttttttacctgtgtggtcttgggcacaattactccctctctgcgtcagtttctgtatttgtaaaatggttgtaataaaaatagtgcctatcgaataggcttgttgtgagagtcaaaagtgttctgtgaaaccacctggtacagtaagtgccatgtatctgttattacggttgtcataacatcattaatattgtcatctcttaacgactctgtgaggtagctgttctcttccctcatttacagatgaaacaaagacttaagccttaagatactttactgtctagtgtcactcagcttacaagtggcagacatagaactgagaagtcttcttactttccccttcactgtaggaacccttgtcatctgtaggggagctctacagattcctatcagtaagtgaatacggtacttttaatacagatttttggccaaggaagttttgttcctgacagaaaacactataagtggttacacgtctttctgtctagaatttttttctttttagtggaaccttctgttctaattgtaccaggaaataatagctgtgaagtggtattctctcttctctagcctaggaggataggatcagctactcctctgtcccttgtgaactatactcatagctccagggtaaagaaagtagttaaacctactgtgttttacttaaaccactctgtttatctgtttcctcatctgtaagatagggttattaacagtacctactatgtaaagatgttacttgggaggctgaggtggaagtattgcttgagcctggaagtcagaagctgtagtgaactatgaccttgttactgcactccagcctcggcaagagagcgagaccctgtctctaatgtaaatatataaataaataagtttaatataaagatgtcattgaagattaaataagtttagacatataaagcatttagaacactgcctgatgctttgtgagcactccgtaaatattagccattgttactgtggagtgcaccaagtatgagtctgtccaggacaacctgaattcaggtctggactgaccatttctcaaggttttagcttgaggcttctccttgacttctctgttgtgtaaatttagatcccctttggaaaagaccctctgattcctctctccctcctcctaaaactagctaactaacttagatagttttgttttatgcctttgcaggaccctgtgcttgtcctgttgttggattgatcttttattgttattgcttatttaactgtatttctttcttttgatttatgagctgcatgaaggcagaagccccctttctcttagccaccattgtattcccagttcttagcatagttctggcacagagtatatgcttcataaatatgtctaaatgaataaagcttaaacttagtgaagcttaaacatgattacagggactttagtcatttgaccatttttcttcaggatctgaactttctttagccccaaatcccttttctcttgtatccctctatagggaargaaagctcagaatttatctaataggcagcatatccaaacatcagttgaaagactttcttttagaagtagaatattaaagttcatatttgaagtcttttatataatctatttgcttttatcttaatttcctctagtttattggttaagtactaagaactaaccccatttgtacatgtagctgcaaagtactcagttcaaaataacaaaaaaactaacacttaaaatcccagcactttgggaggccaaggtgggacgattacttgaggccaagagtttgcaactagcctgggcaacataattccctgggcatggtggcttgcacctgtagttccagctactggggaggcggaggcaggaggatcacttgagctcaggagtttgaagccacagtgagctacgattatgccattgtacgccagcttgggtgacagagtgagatgctgtctcaaaaaaaaaaaaaaaaaaagactagaccgtctaagtgtattgtactaacaatggtaaaggaaattttgctaacttttttgagtaggtaatgtgtgtatatgatacaatattcagaaggtgccagggtatagagtgaaaggcaagtctcttactcctgtctcctgtccatgcagttcccctactcagaagcaaccattattatatgtttctagtgtgttcttcctgacagtctttgagcatattaacattgacgcatgaatgttttatatgtaggtacgtatatatatatatatttatatacacatataaacacacaataaacaatttttaagttgtccttcacaaaggtagggccattttgtaacctcattagaaatacataagagtattcaactccctagagtgtgttgtcagatgtagggttttgccagtgataggtgaaaatttttatctcaatttagttttcatatgtgtttctcaaagttgagtatcttttcatatgtataagagccatttgtatttctttttatgtgaatttttattatgttttgtcttttttaattggactgttgatctctttcttctaggcactctgcgtagtaaggggtcctttgtgatttgagttgcaaatttattttctcagttttgtcatttgtttttttgacttatagtgttctttatttctttggtatgtgatgtttaaacaaatgaaaacagttaactgacttaaatttgtaccttttttgtctttttatttttgcttaggaacctggcttctgtatttaccatgtacctggagcattggtttggcagctgaaccaggttgttttccagattggtacatgctctccctctttggcactggagctattctgatgcgtggagcaggctgtactattaatgacatgtgggaccaggactatgataaaaaggtaatttcatcctgaaaaggaatagagaggctcttctcaattctgcagaataacatagtggtatcacttttgaatgccatataaagcaacaagatcattcagtgaccacagaaatccagcatggaaaatgccaggatcagttgaatagctggtattgcaaagtgcagagtacaatatttcctttctcaacacaagagtggccccaggggcaaggtgtgtactttattattataaagtgaattgagaatttggaagactgagggtgagggagttaaaggttaggagtgaaagtgaaaaatccatcctgaaccttcaagtgtccaaagatctgtcatcccttcctttaagatgtattttagagccctaactattcttacgtaaatcaagtgaatcaaggcagcacttgttagtgtttcctataattgtttcttttaaaaacataactttacccattttttctccttagaaaaataatacatgcttgttctgaaaaatgtagataatatagaattgcaaccaatgaaaagtgcaagttgtccttatctcctcctcttatctcctagagaaaacttcggttaagaacttgatgcattatttttcactggattttttttttgtacctgttctaatgcatgtgtataattatttccttgttcttcaacagacagttattttctcaaggaaaggggccatcttatttgcctttttatcttagcaactatgccataattagtacaagatcattaaatgcttgagtaaataatcaattgaaatttgattttaaaagaaacccacattgaattataaaaagtgaataatcttatataaagttaataatcgatcctagtttaccttttatgtagtctgaattttccttaagcaaggcagacctataataatttttagttaatagaatagtgttacgtgtgtgtgtgtgtgtgtgtgtgtgtgtgtgtgtgtgtgttttgagatggagtttcactcttgttgcccaggcctggagtgcagtggtgcgagctcagctcaccgcaacctccgcctcccaggttcaagcgattctcctgcctcagcctcctgagtagctggggtttcaggcatgcaccaccatgcccggttaattttgtatttttagtagagacaaggtttctccacgttggtcaggctggtctcgaactcccgacttcaggtgatccacctgcctcggcctcccaaagtgctgggattacaggcatgagccaccgcgcctggccattaatctattttttaattcaaaaacatttattcagtannnnnnnnnnnnnnnnnnnngcaggttctaggattgcatcgatgaaatacaacattcctgacattcagggtttagttattataaaacagtagaagtcttttgagaatagtgttcaccagagaacttgctgaagaccacttacctcaacctaagggagagggttagagataactttccaggccggggtgacctttgaactctgaaagaataggatggcaaaaaaagagtgggctagagggtgaaggtgtctctagacagagggaacagcaggtccagaggcacggctgtgagatgagtatgcgtttgatagcagcaactacatggtctgcgtgtggctggaggatatggggtgtagtagaagagtggcaggagctgtatggtaaagcatttctctgacacaactgggatgccttaatttgccaagacatgcacactgtcctttttttttctttaaaaatgtttttgtttttatggatttaggggtacagttacagtcaggttacatggatatagtgtgtagtggtgaagtctgggcttttagtgtacccatatgtagtatgacctaatgggcagtatttcatcctgcactcccctcccaccctcccaccttttggagtctccagtgtctattattccactctgtatgtctctgtgtacccattgtttaactcccacttataagtgagaacatgtggttttgactttctgtttctgagtaatttcactaagaataatagcctccagttccatccatgttgctgcaaatgatgtgattttattcttttttatggccttgtattccatggtgtatatataccacattttttaatctagtcatccattgatggacactttggttgattccacgactttgctattgtgaataatgctgtgataaatgtatgagtgcaggtgtctttttggcaaaatgatttcttttcctgtgggtagatacccactagtgggattgttgaattagtagttctgtttttagttcttgagaaatctccatgctgttttccatagagattgtactaatttacagccccaccaactgtgtataagtgttcccctttctccacatcctcaccaacatctgttttttgactttctaatagccattctgactggcgtagaagatggtatctcattgtggttttaatttgcatttctctgatgattagtgatatctgactaagtccccaaaaggaaacacagcagaaacaaaaatagacaaatcagacttaattgaactaaaaagcttctgcatagcaaaagaaataatcaacagagcaaacagaccacctgcagaatgggagaaaatatttacaaacaatgcgtccaacaaagggctaatgtctagaatctacaaggagctcaaacaacaagaaaaaaataaccccattaaaaagtaggcaacgcacatgaacagacatttttcaaaagaagacatacaagcaaccaacaaacatatgagatacacactttcttgatttggaggttcacacatcctggtcagttttattctgtacactctatatgtatatatatgaatatgtatatatatattatatattatatattatataaaatatatattatatataatatatattctatataaaaatatatatgaatgaggcttctggcatgtatcacttcaagataattcttgaacatgttaatagtagttcttcactttaaaaaatttgtagcttagtataagccttccagaaaatgaaaaatagtcccataaattagtaacagtttatgaagcatgggtctgtttagataactgaacatttgagattaaatatttgaaggcaaactgcaaaattctgaattgctttatcttatttggtagacagactctcctctaaacgtttacatcccacactcttgactagagttaaaactaattacatagattttgacttctgcttccaggaagatggaatagatgtattttccctattctttccactaagtatgtctaaaacacctggagattatacataaaacaaacataagaggactgtggagaaaaggtggcagactggctagggacctcaggacccaaagaatttcctagattttgtttttcttcatatatcccagacttggaactgaagaagccagaaatctggaaatgtcattgggcacagataggaaaaaaataaaaaataattaaaaaaaaaaagcctacttggcaggggccagtggaaaccaggttgggaacgtgagcttgtaaccccagctggtagcaattaggcagcatctcccacccccttcttttgccagagcagtgtcaaaaaaagtcaactgaaataaaaggtttaaataagattcatagtctcatgacataatacttaaatgtccagatttcagttaagaatcatttgtcataccaaaaactaggaaaatctcaacttgagtgaaaaaaagacaatcagcagatgaacaacactgagatagcagagatgttaggatttcttagaaagatttttaaagcagcaatcataaatatgcttcagtgagcaattacaaacattcttgaaacaaatgaaaaataccacctctcagccaagaaatagaaaatataaaggagaaccaaatggaaattttagaagtgaaagatataataattgtaataataattcagtggatgggcccaacagcagaatggaggggacagaggaaggaatcagtgaactggagatagaataatagaaatgacaccatctggaaaacagaaaatagactgaaaaattgaagacctttgaactataacaaatgatctaatatttgtttcatgagtcttggaaaaacaggagaaaggggttggggctgaaaaatgattgaagaaatattggctgtaaaagccccaaatttagcaaaagacataaacctacatatttaagaaggtgagcaacctccagacacgataaacacacagaatcctcaccttaatacattatagtcaaacttctgaaaactaaagaaaattttaaaatcttgaaagctgtgagaaatacgaaaagcacaacccataataggaaaaattgaatttgcacttcatyaacaaatttttatctgttaaggaccccgttaagaagattaaaagggctgggcaccgtggctcacgcttataatcctgccactttgggaagccaaggcaggtggatcacttgaggtcaggagttcgaaaccagcttggccaatatggtaaaaccttgtctttactaaaaatacaaaaaattagccaggggtggtggtggatgcctgtaatcccagctacttgggaggctgagacaggagaatcacttgaacccgggaggcagaggttgcagtgagctgagattgtgccacttcgtaaatattttaggctttcctactgtggaaattgaacatgttatagctaaatagctgataaggaagttgctttgttttttatttatttatttatttgacacagggttgctgtgtcacccannnnnnnnnnnnnnnnnnnnagacagcgcctccttatgttgcctagtctggtcttgaactcatggcctcaaacagtcctcccacctcagcctcccaaagtgctgggattacaggcttgagccactgcacccagccaggaagttcctttgttttgtttgtttagagatggggatgggagaaaagagaatgagtgatgggaatttttagttcttttcaaagctattttaaatgtgaagttttgatttctgacagtacttaaaatgttgatttctctcttcattcatatttgtgcctaccatgggccagtctcttcattaaatgtttaaataaatgattgagtcattacatgaagctaaggtatctgtttttatgttttaaggttacaagaacagccaatcgtccaatagccgctggagacatttcaacttttcagtcctttgtttttcttgggggacagctaaccctggcactgggtgttcttctgtgtctaaattactacaggtatattaaacgttttccacatcatgtataaaatctctcctttgaaatggagaaaataggaataaaatgaaatatctttatcacaaagttgttcatttgctacttattaagcatctgtaagttagcaagtgtaagtaactcaccacacatttttaaatctgcttcaagaatgctttcagccaaaggagttaagaaatgaacatttaatttgttttgaaccaccttcagtatttgtactacattccctaagggacacaaggcaatttcataggttttctaagtgcgtgcatggatgtgtgtgtatacacccacacatatatgtataattttatttatgttgacagtatctctaaagtagacttaaagcagaagtgattatattcattttgcaaaaagaggaactatgtctttcccagggtggtgttactaatcaatgactgaagaaagaagtgggaggactcattcctatatctcttaaacaagacaaaacgaaacttttgtgtatcagattgcggtttacaaagtgcttcaatgcgagagaagaaagacaaaaagttactttatggagactagacttaattgcgtgccttgccctgatagcatcaattacatgaaaatacctttggaaggttatttctggaaggggtagtgttagataaactttgaggtcctaagaacgtcttattttatcacattttcataggtgtttccttttttctagaaaagtaacactgcatcatatatataaggagggatatcttgactctaattattagttaggacatcttagtttattagatgccttaatgtttgcaaacagttcagagaggcagtaacatttggtagttaacatttggtggttgataggttggactctggagccagactgccttaggtttgaatctaggctcttctatgactagctatatgacaattagcaaactacttaatttctttgtgcttcagttttcccatctgcaaaaaaggaagagaataaaactttatattataatacctgccttttggagtcattgtgaagattataatgaattaacaagtgtgattcacttagaatagtgcctaatacatgatagtactgtatgtgttagctattattttgtttgattgttttataacatttaaagtagttttctactcatcctttataatagggaaagtcgaaggctaggaagataacttacataaaatataatttaagataaaatatattttccaattagtattacttatgtcattgtcttaaagtatttcgtggtttctaagagatagtggtaataatcactttaatggtttttcctcttttcagtatagctctgggagcaggatccttacttcttgtcatcacctacccactaatgaaaagaatttcatactggcctcaactagccttgggtgagcttacaataactaaaagtatttcctttgatatttgcaaactacacttttatggagagataggtaaataggtaaagatgaaatgacaaatcagtcatgtaattttcctaaccaatagtagattttcgtactttaaaggagagcagttagctatttttattagttcagaaatattgcatatttattagggttatcatcatcatcattattttttcctctcctctctcccccactgctcccctcccctacactctcctctcccctcttctctgagacagggtcttgatctgttgctcaggctggagtgcrgtggcaccatctcagcttactgcagccttgacctcccaggctcaagtgatcctcccacctcagcctcttgagtagctaggattacaggcattgacaaccctgcctggctaatttttgtatttcttgtagagacagggtttcgccatgttgcccakgctggtctcaaacccctgagctcaagcgatctgcctgccttggcttcccaaagtgctgggattatagatgtgtgccatcacgcctggccattgctttctgaaatgcttttttaaaaatctaggtatgtcatgaaaaaatgtttgatctagatgccctgaagaatttgggggatggggtaggaagcactctgtggcaggaaaacaagggttaaagtgtatgtgatagcttagacagctcgtattctgtgaagcctctcaggaagaagttagacagtctcttctgggctaccataggattctaatccggcacttacttatttcagcagcattaattcaaccaagaatacgttgagagcctcctatggtctccagttaataaattgtggcccagcatttagcatagcacttggcgcggtgtaggtattgaatacatacttgttggtgaaaagaaagaaacatagttaggtaagcaggtatcagaatctgctgcaaaaatatctattcccagacttttctattctattcctagaatgattctagttctttgaatcatttttttcagtaaatgaaagaactaaaagcaactcaagaaattgatgtgagcgtgatttgtgggaaagttgtggtagaatatttatctttttctaagatcctctcattgaatgttctctttattaaatttgaaattatattctcaatataagcatttcctatctataagataatattaagaagctggtatatttactccaaacatttactgaacccctacatttacttcgtgctaggaattgcagcaggtactgggaaaataaaaatgactaaaacaccctgaccatctttaaggagttggagatggagatgacagataaacaggtcattgcagtacaacgtgtcaggcaggagtgctatgggaccacaaaggagaggcacttcatcagttaaggaggggacatgagtggaaataggtaatacaggaggagaaaaggggtttctgagaaaagatatctgggacacattgagtttaaggtacatgagcaacttgcaggcagagaagtccagcagactgttcagtatgcagtctggagcttaggagagttatcaggcttgcaagtggagatttgagagctgtcaacatgtaggtgtttgtttacagtcctcagagatgatgccattgtggaatagatcagtgttcgtatgtatattcatgtttcagtagctgataggggaggcagagtggtaacagaaagaacatgggtttttgagtcagagagatgtaagttcagatcccagcatcttctgttattggtagtgccgtgcaccatattaggtgggataaatcttctctttaaacctcctatttacttaattaggggatattattctttttattagctctgttactttagttgttaattaacctctctgagcttgttttgttttttgtaaaatggagctaataagtaccaccgagagttgaaagggtttaaggaaggaacccacagaaagcagcacacacagagtctgatacccaggagcactgaacacactccgatgccactccttccctttaggattctaaagtacatacagactttccccctttttgtgttttgctaattgtaggcttgacatttaattggggagcgttacttggatggtctgctatcaagggttcctgtgatccatctgtttgcctgcctctttatttttctggagttatgtggacactaatatatgacactatttatgcccatcaggtaaagaaattatcttttcttaactttggtttagttgttgctgtttttaaagaaccaaattaaggagaaagcatttttttctaaaatttgttgttgttttttaagaactttgagaaccaaattaaggaggaagaattttttttttctaaaaagaaagtcattcacagttccatggctccaacaaaattttttttatgtttatgtgtgtttaccaaaattcaactcatttattttatttacaagcaataaagtagtatttactacgtgccaggcactgttttaagtactttacagacttaatcccccaacagtctttgaggaaagtacttacattatcctcatttaacagaagaggaaatatgtgaagaagtatttgtccatgtcacacagttagtgggtggcagaactgcgattcaaacccagtgttcagagactgcttttaaccactacattcttctgtccctctaatcattgaattatgcaacttttttacttggtgtagttagtgaacattttcccatatttttaccaattctttgtcattgtcactttaagactatggactatgagatagtccatgccccaatttaacatgccataaattcgatgtaccataattaaaaaaaaattaacagtttctctattttggctacttgtttctgagttttcacaattataagtaatattgttctaatcattaatacttcttgaataggagtttttcagttaaatttttagaagtggtattattgacttaaaggattatatgcatttttatagcttttgatattgcctttttgataaattccattttaaaaactcatttttttcttttacatttataaactctcccccagctttaatgagaagtaactgacaaataaaattatgcatattcaaggtatacagtgtgatgatttgatagtacatgttctgagaatacatttataaacttttcaaaaaagtttttctcagtatttttctgaaatatgattatatattctcagtcatttacttgaagaatatgtctggatttcattctgttttcttccactaaaccccctatgccctgctacatttgtagtatcatgaaaaggcrgatctgtaatcagtcttacttccaaagtgaaacttgacttacagrttagaagagatgcctgtactttttgcggtaaggtctggaatgagtgcttaggataccagtactccaattagattaacaacttcaggaaaacaccacatactcattggcacttttgtggttcacataataactatagacacagtttgcaccctgaaggtgattctagtatgaaaggaaaaacagaaacacccacagtcattgttatttggatttgggccccaaaagagagcctgtcaggttgctgtctgccggtaggtcagtgcagagagttcagcatacagccactgatactacgtgaccatcattatttacaacagtatatggagatgcttacaagtaaacttgctgggagaaaccaggcagctacatgtggttatatcatcaagacctagctctacctaaacaggatttgataggaaaggcaagggataggttgggctagaagtgggaaatgagtggatgtggttaggtggtaagtgagcatttttctacatctgtgacttttgcaagattgaaactaaaatgtataggagattattgagatttgagaactctgaggtagagaggagctatgggaagaattagagctgaattttaatcctaacactaaaaatatggttaagagtcattataggattataacaaatataatggtgtatagaaatgaagctggatggtgattttagcagtggtgtttagctttgattggcctgcacattcattactgatcagcctgtttctgagttactgtcatctttcaccgcttatggtatatctgcatgttctttaaaagacaatttcttctgaaagtagttagtggtaattggttgcacaaccttgtgaatatacaaaaaaaacactaaatctgatacttcaaaatgtgaattttatggtgtgtgaactaaatctcaaaaaacagtttatttttctttctgatattaggacaaaagagatgatgttttgattggtcttaagtcaacggctctgcggttcggagaaaataccaagccgtggctcagyggcttcagtgttgcaatgctgggggcactgagcctagtgggtgtgaacagtggacagactgctccctactacgctgccctgggtgctgtaggagcccatctgactcaccaggtttgacctttttcttatttgtccctcatatttccttggtataaattataaaaattatttaaacagtatgccctctgtgtttacctggcaaggaacttcttaaacaactacttggcttctactacctttaacagacccccctgccctccggcctcaacttataagaaagctagctctagtattttattttatttttaaattttttttgaaacagggttgtccagcctgtcatccaggctggagtgcagtggtgcaatcacagctcactgcaacctctaactcctggactgaagcaatcctcccacctcagcatcctgggtagctgggactacagtcatgcaccaccatgcctggctaattttttttattttttgtagaaatggggtcttgagattttgcccaggctggtctgaaattcctggcttcaagcaatcttcctgccctggtctcccaaaagtgctgggattaccagtgtgagctaccaaccccagccaaggtatattattttttaaaaataatataggcctaaatccaaattttcccatctgattttcctggaattacttctgattcatgtctggaaaaatttcagtgatatctgaagcttgtggtttgagttgaattactctaaaagcaaactgacagataaagcttttaaaaaaaaatctgggtttctagtgatggttagtagactaattattcataaatttggtttctgctggcataaagaccaaggacagataagacatgaaatgcggaacatgtcaaagttctgccagtagagagcaggaagctgtcatttcaggatattcacccacaccacatcccctacctgtcagaaacttatgttgagaatctacattgttgacttgtaaatgaatgaactaaatctaattttgattaaatcacttgctaataaattgactatatttttatatcagtgttattgttattttcattaaacagaatcaaaaaggtattcatggtggatcacctgaggtcaggagtttgaccagcctggccaacatggcaaaaccccgtctgtaccaaaaatataaaagttagctgggcatggtggtgggcacctgtaatcccagctactcaggaggctgaggcgggagaatcgcttgaacccaggaggtagaggttccagtgagccaagatcacaccactgcactccagcctgggcgacagagcaagactccatctcaaaaaaaaaacaaaaaaaaaagaagatattcatgaagctgtatttagatgactgattttatacagattattgccaattactatcagtataggcaagactcacataacatggtatgaaggaaatcagaatctgatgtctgtaaagtaaaccatatgctgtgtcccctccactgttttcctcactgtgaaaactaaaatgtgaattggtgactttccaggatgtcaccatttttcccttcagaatttctcagcatccctttttggtcatagctcagctccatgagggctgacattgtcatttgattgtctggtctggataatgggtatatgttaatatttaaacacctgaatattaaatagtacaggaaggcaaaaattattaagacaatcacaaatactannnnnnnnnnnnnnnnnnnnnnnnnnnnnnnnnnnnnnnnnnnnnnnnnnnnnnnnnnnnnnnnnnnnnnnnnnnnnnnnnnnnnnnnnnnnnnnnnnnnnnnnnnnnnnnnnnnnnnnnnnnnnnnnnnnnnnnnnnnnnnnnnnnnnnnnnnnnnnnnnnnnnnnnnnnnnnnnnnnnnnnnnnnnnnnnnnnnnnnnnnnnnnnnnnnnnnnnnnnnnnnnnnnnnnnnnnnnnnnnnnnnnnnnnnnnnnnnnnnnnnnnnnnnnnnnnnnnnnnnnnnnnnnnnnnnnnnnnnnnnnnnnnnnnnnnnnnnnnnnnnnnnnntcacttgaacctgggaggcagaggttacagtgagccaagatggtgccactgcactccagcctgggtgacagaaggaaactgtgtctcaaaaacaaaggaagaaaaaagaaatacttggagcccactttatattttaaatcacatttatggtcctctgtccagttttgttgttgttgttgttgttgtttgttttgaaacagagtcttccctctgtcacccaggctggagtgaagtggcacgatcttggctcagtacaacctccaccacctcctggtttcaagcgattctcgtgcctcagcctccgtagtagctgggatcacaggcacacgccatcatgcccagctcatttttgtatttttttagtagagacggggcttcgccatgttggccagactgatcgcaaactcttggccttaagtgatccgcccrcctcagcctcccaaagtgctgggattacaggcatgagccaccacgcctggcctctctgtccagttttcgatacagtgtttaaagatggacgtagccttttagtatttaaagagaaaggaaatcatgataattgtaagtctgcagaccacataataaagaatagtcccccatgcctaaggaagataggaacatacgtgagacttccttagtgtatttgcagggctaccatggggaaaaaggagtacgcttgttctagattactagcaacagatttaggtctctagctccccttccctaaatgtaggtccctgaacaggagagatttagaaatgtgrgagggcatttttggttataataaactaggaggggtgactatatggatgatggccagatacagtcaatatcttgtgctgcaccagattgccctgcattagagttgtcctgcccaaatgggacttgttctccattgagaaactttgctgcagacgctaaaaccagaactggagggtaggagttgcagggagacagactttagatcagtcagtataaggaagaacgttctaaatcgttagaactaaaaacagtatgggttgcctcacaagcattcatgcaaccctcaaccgaaaattcttaagaaacagcttggatgattccaagtgaaaaatatggtaaatttttctttttctttttctttttttttgagatagagtctcactctctcacccaggctaggagggtgcagtagggtgatcatggcttattgcagccttgacctcttggcctcaagcaatcctcccacctcagcctcttgagtagctgggactacaggcatgtgccttcgtgcctagctaatttttcattttttatatttgtattttttgtatttgctgttttctcctccgtgttaacatgtttatttgttatgacccaaagtccagactaggtattaatacaactttgtattcctctcttgcagatttacactctagacatccacagacctgaggattgttggaataaatttatctccaaccgaacactgggactaatagtttttttagggattgtccttgggaatttgtggaaagaaaagaagacagacaaaacaaagaagggtatagagaataaaatagaaaattaatgaatgaaatttatctaggaatttttaaaacattttttacaaaatataattagatttgaatacaaaatctgatacaatatgttaaagaattaagaacctgaagatgaagatttagagcatatttacctggattttacttatttgctagcaaaattcccccttgtcacagaaaccagggactcttcaggatttgagatggccttgagtattttagttgatacattcttctgcccattataattctcacctgaagttatggggattgcacgggttttggcactttagaaaaagcctgatgtgggtcttacataaatgaatgtctgtataagaaaatggactcttttttttagggaaaaataaaagcaactatgggaagttgggccttactgttctttattgtgacctttagtcactgccaaaaactgtaatttaggaaaccaattctgtttttttatgttttaggagaatttaaataaccaaatagaagtatttagctattatagccacatgtaccactgtttaccaaccctgacttttatttgggagatttggtctctgtgtgcagtcacagtgaccagaacagacaagtgggcagtcaccagagactaccttgattttctgtctatatcttttttatcttatcccattatagtttataggatagtgatatttaaatgtttactgttttttcctttacctgccctcaccttcacaatgttctcaacacagtaaccagagtaattctcttaaaacctgagtaaggtcatgtcattcctctccccagaaccctccaggatctccctaggtcactcagtacaaaacgaaagtcctaccacctgccaggccctccatgacttggcttcatgtctgacttctcacactcacacctgtagccccactggcctcactcttccttaaacaggctgggcagactcctaccccagggcctttgcatttactgttcactttgtctggaaagttctccccagatcatgtcttactccttcactgcagaacctttcttaaatgtcaccttctctaagaggcttttcttagccatcttcaaaaatctcacctgcaaataccacccatacttctgtccccttgcttttttttttctcttcagctcttaatattagcaacctgaactatatcttacttgatttaaattgctctcatagacagtaggctatagggcagacagtcatttgtatatgtgggtgtgggcagcagtaaatataaaattgcatgatgagggcgacgatgatggtgatgatgaagatgatgatgcagctaacagcacttacatatgccaggcactgataagcataggaaaaattatttaactgtttactcagcaaatactgagccactgaaaatgacttgggtcagttgttgcagctgtaactttgctatagcagcagtgagttgaaggggagaagaattaggaacatagtaccctacttttgaggaaatatgattggctttgattttaacagaatagacagagtttaaatctatgttgatttctgttttcttacagatacgaccctatattttaaaatgcttaaaacatcttaacccattgcactggttccaattaaagaagggtgagtacaatgtacttcaattttacaacattctccttagtttatgaaagttaaaaatggaacagattttaaaatcactaaaaatcctgcagcttttttgtgatacaggggacaagagaacataacattaattcatacatactcaaaaagcttattctcaaaaagctgcttaaacataattgaattattttagttctttttcatttttcctcccttctcccagtagaaaacgctgaaaaaataatataaatgggtaaggaacagatttttggaaaagaaaaaacgatgaagtagattattagtctctagaatcacagacttaagacaactcgagttggaaagacacacagcagtcatccatctagatcaggagtgtcagtccctaggagagttgaaatgagcattgccaggagtttgtgatagttgaaatgaccagcattgccgtgggaatttattcagtgaggagggcccttgccctactcttctgcttcaaagtcactgtgagtttttcaatagaaatcatgtgaaagaactttttaaactgtggacaattatctaccacaatttcatgatgggggtggagataggatgggagctacagggtctaaaaagtaaatgaatacaactattccagctctaactgacctgtcctctgaattcccagagcacttggtgggtgccagtggagcaggagctgtgaatgccagtcacagccacagcttgccagggttggaatctgctttaacacctatcagttgggtgatcttgggcaagttccctgacctctctgtggctcactcggggataatcataatacctttctcatgcatttcaaaattttctgtcttcccctgcgaatggagatttcatggtaagtgggaccttgtttgtcttattcattgaaatatccccaatataccatatcacaagggctgcctctccctcttcccggatttctttgctaaattgtttaatgcctctacctgatttttataatctggcctcaccctaatgtttcctccaactgaaagtacaccctccaccctctgggtgccagtggagcaggaactaagaacgctatcatgacgacagcttgccagggttggaatctgctgtaacacctgcctaccagttggttgctcttgggaaagttccctgacctctcggtggctcaaatactcaaataggtataatcctaatacctttctcatggatttaaaaattctctgtcttcccttgcgagaatggagatttcatgatcagtgggaccttgtttgtcttattcattgaaatgtccccagtataccacactgtaagcactcagtaaacatttgtaatttttgtacatcgggtgaactaacattagagttacttgtcagacctggtgttaggtgcaaccattagaaattattaatgctggccagtcacggtggctcacacctgtaatcctagcactttgggaggccgaggcgggcggatcacgaggtcaggagatcgagaccatcctggctaacactgcgaaaccccgtctctactaaaaatacaaaaaaatagccaggcatggtggcgggcgcctgtagtcccagctacttgggagtctgaggcaggagaatggcgtgaacctgggaggtggagcttgcagtgagctgagatcgcgccactgaactccagcctgggtgacagaccaagacgctgtctcaaaaaaaaaaaaagaaaaagaaattattaatgctgttcaacaacataaaaagttgactatgtgaggtaacgttacaaaaacattttcatgtacatatcatcaaaactatataagaatataagtaatgctgctgtctgcccaccaggtggccttgctctgtaggagcagtcacaactcttaacaacactggagcgtaacactgccttttcgataaagctgttttattctatctctggcttgccctttgcccttctttcctgggcaaagccaagaaccctcgtggactaagctccactttggggctcatttgccctgtatcaatggtaacacctatttcttagggttaatgtataatttagagactatgcaacacatttaatataggtgctggcatacagtaactaatttttaactttagaaattaatcaggccaggaatggtggctcatgcctgtaatcccagcactttgggaggccaaggcaggtggatcacttgaggtcaggagttcgagaccagcctggccaacatggtgaaaccccatctctactaaaaatacaaaaaaaattagccaggcttggtagcacacacctataatcaatcccagctactcaggagggtgagggaggcatgagaattgcttgaacctgggaggcagaggttatactatacttcttttgtaaaatctacttttttcacttaatattttcccatgtcattaatgcttctttcaatatattgatgttttttggctgcataggtttttatcatatgtatgtactgcaatttaattaatcctatcatggattttaatatttacattttttccttctcacaagcagtacggccatgaatagatttgtatcattgggcatatctgtgaatatttctgtaggaaaaatcctagaagcagaatgtctttgtatgtgcatgtacatttccagggattggagggtaggtatggagggtggagtatggtggtaggcacattttaaaggatttggattcattttctcaaattaccctacagaaagctacacattgctaatagcagtgcatgagagcctctttctcagaccttggccaatatgaaaggatactatttttaaaactttgacacataggcaagaacaatatgtggtttcactcacaactctgtgattactaaagtagttgatctttttcaaagtgtttatagagcatttttatttcttctgtgtgagttgccttcatgtctttgcccatttggttattgttgttgttgatgtacgctgcctcattcattgattatatccccaagatctgatatctgacagacttgtgctctcattttacaagattatcgtgttattaattgtgatgggattttggatttcatgctttatactgaactatctcttccatggagaaggtaacatttaacatttttatagttgttccaattaatatgtattattcagacagtccaaacatttgttgaacatctgtgtgcaggcacaggctagttgctgcaaacacagagattaattagagtttctatcttcaaaaagctcagaatcagtagctgggattacaggcacgtgccaccatgcctggctaatttttgtatttttagtagagacggggtttcaccatgttggccagtctggtctccacctcctgacctcaagtgatctgcccaccttggcctcccaaagtgctgggattacaggcatgagccactgcacctggcctctctctctttctttctttctttttgtagagacagggtcttgctttgttgcccaggctggtcttgaactcctaggctcaagcagtcctcctgtctcagcctcccaagttgctgggattagagacgtgagtcaacctcactcagcataaatactttttttttttttttttttttcaaataaaatcgtacataaaaccccaacaaatacgtacagatggaaatcagagacagtccccttaaactgaaccttcctttcttttaggattgtcacagagcccaagttgaaaactatctcttagagataagaatgaacattggagtccctacagttactaactgaatgacttagagtgaactatttaaacctctccagcctatctctttatatctaaaatgggaattaaaataatatctacctcatgctggtgttttaagaattgcatgagaaaatgatctcatctaaactcctgactttaaatgtcatctgtatactgattattcccaaatgtgtacctccagcctaaacttcccttttgaacttgcacttggcagaattgaatattgaactgcctacttgatatttcaacatgaatgccaaataggcacctccagttcaatatgttcaaaactgaactcctgatctcagcctcaaacctcctcctcccacccttcttgccatctcattaatggcatctccttttccttttgctctgaccaaaaccttggaatcaaccatgactcctttttcccacattccatattcaagacattagaaaagcatattggttctaccttcaaaatacatgcagaatctaatcttttcctaccacctccacagctgccaccctggcccaagtccctatcttctccccgctggattaacacattagcctcctcactggtctccctccttctcccttgccccctttcatgtgtcctcaccatagcagccaggccgatcctgctacaaccaaagccagcgtatgtcattcctctaactcagaacctccccatacctccccatttctcccagtgtaaagccaaagtccttagcatggctgaaggaccctcagtgagcgggctcctgctgccttctggctcttcttccactccctccctcgccagtgctgctgcaggccttctgccgctgcagccttctggcctcgttggggttcctggaatgctttcctagatgttgccatggatacttcctcacctccttcagtatttgcccaaaagtcaccgattcagtgaaaccattgtcttcattttctaagacttaacacacaccattacacaaacttctttttctctctcactgctttttctccatatt

SEQ ID NO: 94733 - DNA, 96128 bp, Homo sapiens
  misc_feature (1)...(96128): n = A,T,C or G
aaacatttttttcatatgttcctatcattctttgccttttaggaggtgaacattgacagatcatataaccattataaactgtactgtctttcttttaaacatcatattatctttgttctgcaatagttaatgctcaatacatatccttacaacattgtctctatagacattttggttttgtgaagcttattctctgatagatacctcagtagtactcatggaaacaatacccacagaattcttacctgatgttagtagtgtgtttgtgcctttatatttggaaggcacttttgcttgatataaaattcttggatcacattttattatcttaaatcctagatgtccaagaaacttttttattttcctttaaaatctaaattttaatagagtatgtcttagggttggccatctgtgttggtatgcttaactaaatgatgtgttctttcaatatatagttttaaatccttatagttttcaggaaatgtttttttgaaagatagtttttagttattctactcctttgctttggttttcttctgtaacaactcctattataattatattggatcttctttatcttcaataattattttttaaaaatctatttacctttctatttttatttttaaagtattttccctttccacactatattcctctaaaggcattatccattatgtttgcctatctatctgttaggtctactttaatctccatttctaaaatatatatatttttttctcttcctttcttgagatctgtcacttcttttctgagatttatgaactctgatttatgttgtacttttgtgacatatatcacttgaatggtagtttgccttacattttatttgtggttatctgtatactcatacaatttatctagttattaatatcattaattcactcaacaaatattcattgatcctctactatgtgcaggcattatagtctgaagttgagccacagtagccaatcactagaaacatgaaagagagataaaagcttattgctttatgcaactaaaattttgtagtttgttatacaacaatagctgactaacacaacatatttacaatcattaactcatgtgtttagtctcaacagaatgcttttacaccatgaattcaccatattgaaattctcattttgacattgtcagctggatttatgtctttaggaatattttaaggaagatatattttcaggaaactagaagtttgaatttttttcttccacaaatgaatatttgtgatctagaaaattattgagtcacaatcgttttccccaaatcattataaatattgcatcattactttctgacgtttaacaaaaaagcttttgcttgatttctttccctttgtaggctgtagattttttctgaaaaatgcttgcaagacattttttaaattcttgaaattaaaacaaattctgcaggatatttttactgtatagtctctttcaattgattctgcctgaattcactaagctctttcacatgcagactaaatgaaagcccatgaacgttttctattatgtttttcattatttcttttttttttggtatgtgtgtgtgagtatgtatgattgtttacacctattattcaaagcttcattctcacttctctgaatcttatatttatcatttcttcatatttcattgttttttttttttttttttttgagatggagtcttgctctgtcaccctttaaagcagtggcatgatatggctcactgcaacctttgcctcctgggttcaggcaattctcctgcctcagcctcctgagtagccagggctacaggcgtgtgccaccacgcctggctaattcattgatttcatctattgtctgcaacagatctttccttcatggctttcagaatatactaactctaccaaaaccttgagagtggaaatctagcctcagggaccaagagaaaataaatttctgttgtttcagtcatccaggctgttaatataccagccctagcaaactaatacatacccttaaacttctacttcactttcaaagagaaccccaatcatgaatcattataattctcccaggtcaatgaaggttgcagaaaaatcctacccttagaactggtcaaaaggagtccctatcctggtctagtgctttaaagggcaaaatctagttctttccagctatgccctgccctaaaggaatctttggggccaagaagacgtgttcattcagaacttgtgccttcacttttagacaataatttgagtacctggtccctaaaattctttgctcacacagccccaagaagtctaacagtgacttttcccgaggtccttcctactgagggcaaacagtgctttcagtatctataaccctaggccaaaaatgtagccaaaaggccccaaggtccaagaggtgacaaaggagtgggagagcagtaagtttgccaaataaaatacaagacaacttgttaaatttgagtttcagataaacaacaaataatgtcttagtatcagttccaagtatttcatcagacaaatttatactaagaatgtattcattgtttatttaaaattcaaatttaactgtacatcccttttttaaaaaaaacaaatatggtaaccctagttgggggccagagttgggtgtccatatgctgggcatctatgtgcataagcacatggcccattatgatatcgttattgataccattagtatcaaattgtgtatgaaaaggtgacactagcaaggcaggatatatgagccaatcaattctctttcattaacccacattctgacacaatagaaattctaaattcaacctggcttccctggtattttcaaaataggaagaacatatttaacttttacactttgttggctatatttataatgtttaaatatttagacatttttaatttatgtggttcattttcaatcttgtcccagctataacgtcaagaggtggtactgttgcagaaaagcactctaagcgtcaatattattgttaatcacatttaaagaatgatgaaagtaagacttagaaaggtcattcagctagaggagtccattttcaatgtcagatctctctaaatagaaatcaaattgtcttcatcaccaaaaataatttactacttacaagtaaatatatatttttttcttttctttttctttcaatcatggctcactgcagccttgatgcccccaacccgcctccccccacccccaccaccaggccaacatggcaaaaccccatctctacaaaaaatgcaaaaattagtcaggcatggagacaagtacctgtagttccagctacttgggaggctgagatgggaggatcgcttgagcctgggaagtcaaggctacagtgagccacaattgaaccactgaactccagcctgggtgacagagtgagaccctgtctcaaaaaaaaaaaaaagagagatgaagtctccctttgttgcccaggctggtcttgaactcttggccacaagtgatcctcccacctcagtctcccaaagtgctagaattacaggcatgagccgctgtgcctggccataagtaaatatattctttgatcacataatttaatatgcatgcataaaactaatgcatttcatgggatattaaagataggtataaaggaagtcctaattgttcaggctttgatcttgagttttattggcccagacacctgattttataaatgtgcccacatttgataaaactgtgggtatgtgttgtaaatatacaattcacaacactgacttataaaacaaactggcaatttaagtttacaatggctaatatatctggcagaatgatcatttgtagcaattcctctttatgggaaatgccaaccagaagctcaaattataactcagaaaattgcttgtctaatgttggaacaaagggagtatatcttagttttttgtttttttgagacagggtcttgctctgtcacccaggccagagtgcagtggtgcaaacatggctcactgcagcctcgacctcccaggctcaagtgatcctcctgcctcagcccccaaagtagctgggactacagacgtgtgccatcatgcctggataactttgtattttttttagagatggggtctcactatgttgccccagctctgccttggcctcccaaagtgctgggataacagacgtgagccactgctcctagcccaggagtatatattctttgtttttttgagatggagttgcccaggctggagtgcaatggcgtgatctcggctcactgcaagctccgcctccctggttcatgccattctcctgcctcagcctcccgagtaggtaggactacaggcgcccgccaccacgcccggctaattttttgtatttttagttgagacggggtttcaccgtgttggccaggatggtctcgatctcctgacctcatgatccgcccgcctccacctcccaaagtgctgggattacaggcgtgagccactgcgcccggccaggagtatatattcttaagctaacatttccatcaagataggtgaattatatgcaaaagaaaggaaatcagtgtatcgaaatgatatctgcattctcatgtttgttgcagcactattcacaacagccaagatttggaagcaacttaagtgtccattaacaggtgaatgaataagaaaaatgtggtgcatatacacagtggagtattatttcgccattaaaaaaaatgagatcctgtcatttgcaacatggatggaactggaggtcattatattaaaggaaataaggcaggcacagaaaaaaaacttggtatgttctcatttattatatttgtgggagctaaaaaattaaaacaattgaacgtatgagaaacggtagaacgatggctaccagaggctgggaagggtagtgtggggcgggggaggaccccggtggtcggtgagcatggttaatgggtacgaaaatacagtttgaatgaataagatctagtatttgatagcacaatagcatgactacagtcaacaacaatttattgtacttttttttttgagacaagagtcttgctttgttgcccagggtggagtgcagtggagtgatctcggctaactgcaacctccgcatcccaggttcaagctattctcctgcctcagcctcccgattagctgagattacaggcgcccgccactacgcccggctaattttttgtatatttagcagagacggagtttcaccatgttggctaggctggtctcaaactcctgaccttgtgattcacctgcctcagccccscaaagtgctgggattacaggcgtgagccaccactcccagcttattgtacatttttaaatgactaaaataactggattgtttgaaacacaaaggataaatgcttgttatggataccccacttaccctgatatgattattacacattgcatgcctgtatcaaaatatctcatgtaccctataaatatgtacacctactatgtacccgcaaacattaaaaattaaaatatttttaaaaaattaattaattaatcaaattccattctaagaacaatcaagccgaaagtgaggaattactttaaatgctttgaagctcagcatcccggggttcttatccgtcactaattacctatacatttgcaggtctcagtttctttgctttgtaaacataggcttcttgtaaggattgggattatacactgaaaaagcttagcacagtattattactattatgctatctacattatattataggtgaaacactacagattataatacatacaatatatactaattgtattatatattgttattttttgtcattatgctatttactattgttctatttaataactctctagataatttaacaggacaaaggtacagaacaatctggcccttacaagccggcggagacgggtacgaattaccatgacaacagcgcgcgcctcgacattgtcggctcgcgcgttgtttgggaagaaaaagcctaggctgcgtgttgcgtcatcattacgcgctcttaaggtttctccgtggtgttttggaaggtcccggcacggctaccgtcgccccacgctaggaaattttttttttattttcaacctttgttacatagcactgaggctacaagatcgtaagtactgagggaagaaagaacaagcgagcgattgaacgttaaaaagatgccttagcatgcactccacctctgaaccttcctgtgtgttcttaatcctatcagcttcctctcagctgggatcgcgccgcgtcaacttccgggcggatgcccgccagcacggcctccgccgctccccttctttggcccctttgtgtccccgcagtgtcgaggcgcgggccctggcaggtcctttctcgaggcagggggcacggtagcacagggagcttctctttgtgggcgggcgcgaggcccgctagggggttatactggggaacgtgcctgcgcgtgcttgggtaagaggaggttgcaygagggtcagctcgtggtttcagtaaggaggggcgggcgggggaggcggacgaaggggagtgaaaagcaatggaaaattttaaaagatacccccgtccaccttctaattgttgcggcctaacaatgaagcgcagccataacagtcctgagccactggcatgtttgcgggccctttattgccttgggaataaactgctgtggcattgtatcgtatattgttttcatggccttttttcctctctttatttttcccctgcagatagttcatttaaagcccccatccctgcaaggtggtgctttctrccaatatgaatcttttcaacctggaccgttttcgctttgagaaaaggaataagattgaggaagcgcccgaagcaacccctcaaccttcccagcctggcccttcttcaccaatttctcttagtgctgaagaggagaatgctgaaggggaagttagcagggcaaacactcctgattcagatataactgaaaaaacaggtgagttacaatgttaaaattgatgtaacatcaaggacagtttttaaaagatgaaaggcagaagggattctcatttttattcttgatgtcatatatattgatgcattgtcctgcggtgtgcccttttaaatacagctttgggactgccataagcaccatgtaccctcaactgagcatccatccattgtcgcctcacttttatatgagttcttcgaatatggccccatggtggaagttgaaattagaatttagggcatccataggtcagaacggttgctattggaagagcratgtcagtgattcagtcctatgataaactttgaggctatttgggcagacattttcattcattccagtattccctcaaaatattgatcatctactgtgagctagacattgagcaaggtgcctaaagacaacctctgtacacaagggaagatcagatcacatcaagttcttgcatccacctgacttcstggatgtcctcagaatgcaaatgagtaattggtattcttcatggtgaatgaacatttttaacctcatcagcagattgtcagagacaaaagtatttgaggataagccaaaaattaagatttccactcgaatctatgttcattgaacagttaactattagaggaatatatttgagctcttgttgtattataggaatagtgataagtgcttcaccttctgtcatttaatttgcacaataatcctacaaggtagatattactgacatagaggttaatgtgaaatgagattcagagaggttattaggaacttggtagagcctgaactcaagtcctggcagtatgattcctgagcataaactaattagttagtttcttaggaaaggtgaaaggaatgttggaagttatattttaatatttatttcagtaatatctttttttatgcaaaactctgtttcgtaaacagcttttaacttaatgtagcctgaaagattggtaacacacatgtttatccttggtatctttttgtttgccacccttctacttaaatgtaataatgatggcagatcctctgcaagttatcattagaataacatttttaaatactttggtgtaattggaaattggcagaatgatttggtagattggattaggagtcagatttacaaaggctttgtctaagtagttttgaatttaaatgctatagggaacaactgaaggattttaagcaccaggattttaatccctgtgttcactctttgaatagatatttgacatccaggtattttaatgcttttccaatgaatatatttgtctgtttcctctgtagttagatagttcaggaaagccaaggtgtagacatgggatttcgagtccatagaagcttctgcttcttcatttttgttaaatgtgggacattagacaagtcatttgaaatctgtgatccacacttttttcatctctgaaagtgaaagcagtttgtaaactggatttcagtggaatgttttagttatttatcagtattggtcatgtgaaatctttaatttcctttagtgatcagaagatatttttctgtttttatttctttctaatgataacactcattttctctttattgggacttttttccatacataaattctgcttaaaaactgagattgctttaggaattacatgatcagccttgatggcttcgggaaataagaaaactaagtttgttctaggaatgttgagaattaatccttgtaggaatggagcactttgctttaataaaagattgttttaaatgatactgtgaattttggagaatcttgaaaactgagaagtttagattttacattgtaagtattagatatccattgaagaacttacasagtgaatggaaaatggtgaaagaaagttttaaaagtcagtttagcagtagtgactaktacacactgattgagggtagggattgaagggaaagaaaacatttaggcaactcctgtaattgagcttaatgatagcggtagaaatggagaagaaagagatatgagaggtttcaaagtaatgaagggcagggtttagatccctgatgggaatgagataagatgaatggtaagatttttatgcgcggtggctraagcctgtaatcccagcactttgggatgcaaaggtgggcaaatcacctgagatcacaagmccagcctggccaacatagtgaaaccccgtctctactaaaaatacaaaaattasccaggcatggtggagcgtgcctgtaatccctgctgctcaggaggctgaggcacaagaattgcttgaacctgggaggcagaggttgcagtgagcctagatcacaccactgcactccagcctgggggacagagactgtatctcaaaaaaaaaaaaaaaaaaaaaaggtaaatgtctttaagaattcaaataagaatcgaaggtctggctgggcacagtggatcacccctgtaatcccagcactttgggaggctgaggcgggctgatcagctgaggttggaagttcaagaccagcctgaccaacatggagaaaccccgtttctactaaaaatataaaatyagctgggcatggtggtacatgcctgtaatcccagctactcgggaggctgaagcaggagaatcacttgaaccctggaggtggaggttgcagtgagccgagattgtgccattgcactccagcctgggcaacaagagcaaaactccatgtcaaaataaataaataaataagaataaaaatcaaaggtcctgcccccaagtgctaatttagcctggggtctagggattgctgaggaagtggggattcagaattgagtgttggatctctggagaggacaagatactgaagttagattttaaggtcaggactggagatgaaaattggtgaattataaataggatgtgactattgaccttacttctttatcatgtggtaacttttcatactcccattgtgggataatgctgcgttagtttatttacagtaaagtgtcaggtcaaactaagtcagcttacaggacagaaattgtatgtagtcaaaattacctgtaatcactctttttgactaatcctgttattttatctagtgagttgacttcatttcctatgaccctccttcagttactgtgccaccaccacattgtttcttgaatctttcaagcaaggtcccatctttgcttcttccaatttgcttttttgcctggaagactcttcctgctgatatttgcatatgactcagatgctttgtttcattaaatctcagtaaaatgtcacctttttaagaagaccttccttgatcaccctgtgaaatagccacccaccccagcccaccctaccccagctttactgttatttttcttcatagtatttatcactagctaacctttcattatgtagttgtgtatcactagctaacattacattatatagttgtgactcccttgttagaacatatgattcatgagagcaggaccttatctgttgtgttcacctatttatctccattgttcagggcaacgactggcttgtcgtaggccctcaataagtgcattgaagtaaatattattgcatgatgagtgggcattattagtactttatacattttttaaaatttatttattatttatttgtttttagacaatctcactgtgtggcccaggctagagtgcagtggcagaatcttggctcactgcaacctctacctcctgggttcaagtgattctcatacctcagcctcccgaggagctgcgactacaggctcatgccaccatgcccggctaatttttgtattttctgtagagacggcatttcgctatgttgaccaggctagtgtcaaactcctgacgtcaagtgatccacgtgccttggcctctgaaagtgctaggattataggcatgagccaccacgcccagccctatacatatttatttattattatttttttgagatggagtcttgctctgttacctaggctggagtgcagtggcacaatctcggctcactgcaacctctgcctcctgggttcaagcaattctcctgcctcagcctcccaagtagctgagactacaggtgcacaccaccacagccggctaatttttgtatttttagtagagacagggtttcaccatgttagccaggctagtctcaaactcctgacttcaggcwatctrcctgccttggcctcccaaagtgctgggattacagacatgagccaccacacctttattttaaaataggaccttaaaatagtccctttagccatcaggtgttctttggccatggttgcttgaagcttcttttggtacaggacatcctccctaatgcccctctaaatcccagccagcctttggatttgagggcatacacttaacctctgccccctgatttattttactcttctcggtgcccaaagttgtcaatgattgttatttacacattatttctcctttttttctttgacttttgggagtacagtgagtttggagggattgaaataatggcaggtgaaagggaagagagatcctactatattttatgaataaagaataaaaatgagtgaagcctgatcctccaagagcaccaggagaaaatggtatgtaaatatatagttaaaatagtatggtgtgataaaaccatataatagggcaaaatactaagcaaagtagaatcactatctgtaattcacaaatgattgaattatccattcttcaggggaggatcacaaaaagtcacagagatatgacctttggagtggactctaaacaatgaaatcattgtttactgggtgaacaaatgatgagagagttgaaaatatatgttgcctccaagagtctaatatgtgtgtggagggttgggggcagattatagaacaggaggttttagacaatatagatgaaactgaaaagatagaagtgtaaaccattgggttgtgaggggcctttatatcctgtgtcagggacggtagatcttatttggtacacatcatagagcatttcattatggaaatgctattagtgaagctgttgtattcattgaagcctcaatgtagggaaatgactgtagagatgacagaggaggcaactgaggggagttgtaaatgatacgcatttgatgatattaggtgatcagttgaatgtggaggatttacagataactcaaatgttccttgcttggacagctggaggattgacaccatggactgaattaagaggtgagtttaggagaaagatactaaaaattatgttgtgtttgcattacccatcctattttagtaccaaggtagtagatggttgaatattagagctcagagagtggtctaaaccctagaacttgggactcatcaatgtcctaagcagggtgtacaataaaaaacatcatttgacaatgggcaggaaaaccaatgaaaaatttgaaggatgactagaatagtcatagaaaatgatagtgtcctggatacctaaatacctagtttggtatttagttgtctagtaacaaatcctgtagagaagtcaagttgagtggggactgatcagtgaccagtttccttggaattaaaagtaactactaacctttaacagtttcagtagaatggtgatgagatagagattattcattcaggaaaggaaagagagaaataggtaacctgattgggaagtaatgtcaagaaaatatgtttcaggattattgaaaattgagcgttcttttgtttttttttttttttttgagacagtttcactctgtcacccaggctggagtgcagtggcgcartctcaactcactgcaatctctgctctcgggttcatgccattcttctgcttcagcctcctgagtagctgggactacaggtgcccgccaccacgccgggctaattttttttttttgtatttttagtagagacccggtttcaccgtattagccaggatggtctcaatctcctgacttgagatctgcccgcctcggcctcctaaagtgctgggattacaggcatgagccaccgcacctggccaagcgtttgttaaccaaggacaagaagctagtggagagggaaggactgagggagggaggtatctgaagagaggcatcaagtgatgagaactgaagaacagttggactgtttaactgtgcaaaagaataaagacatattttccctgggggggataattgaaggagataaaaatagatgggttcatagattattttggcattggcggaatggaggaaagttttagtatatgtttgatgaatttttttttttttgctgaaatagatttagtcctctagagtggttgccttttcaaggtggttgtcatattgaaagtagcacttgttgataagtgagagacatttttaaaactataccagtcgtcagaaagatttcctgagagtattgctctgccacatacagattgtatgatcttgagtaaaaagtcaactgtttgggtcttacagtcttctcctggctttgcttagttttctgtattccttgcccacattaaaatggttattatcctttgaatgatgatactgaatgtatcattttagcttcataattccgtgaccattgcgcaatactcagtctttttgtaggtgtctgtggccaaaatgtgagccatcgttaaacctgtagatagtcattgtggtttcttaatgtctgttaatgttaattgaaaagcaatacttagttaaagggttagtgctgaattgttgtaacagaaagtacaataagtactcaaaagtaagtaggaatcttaagtgcattttaaatgtgcatgtatttggctgggcacagtggctcatgcctrtagagtcgcagcactttgggaggccgaggcaggaggattgcttgagaccaggagttcaagaccagcttgggcaatgtagtgagaccctgtctctacaaaaaatgaaaaaattagtcasgtgtggtggtgtgcacctgtagtcctagccacttgggaggttgagacagaagaattgattgagcccaggagtttgaggttatggtaagctgtgatcactacactacattccagcctgggcaacagagtgagattctgtcccaaaaaggggggtgggggggaggagggggatagaaatattattttagtcattgtcacttcaccctacacacaaatttcactagtttgtatcagactacatcttggttttgatgtctgctttttcatacctgtctaaaatattgcagacctttattatctttaataagctaataggcaaaagtatgttattgttgctttttctttattttttagtttaagtatgttttcataaatttactagccatttggattttttgtgtttctttatgcttttctgtttttctaatacatgtctctccgataaattatttgtaagtatatcttaaattccacgtgtcttagtctgttagaactgctgtaactaccatgaaccgggtagcttataagcaatagaaatctactcttggcaattctggaggctgggaagtccaaaatcaaggtgctgcaagattaggtatctcagggccmtattcmtagaccacaatcttttaaccccatgtggctgaatgagtgaggggtctcttgggcctcttttataagggcactaatcccattcatgagtgctctgcccccatcacctaatacccyttcctccctccagcaaatgtcacctcctaataccattaccataatggttaagatttcaacataccgttttggggagtggggcacaaacagaccatagcaccccctttgttgtttgccatagaaaaattttagatttttatgtggtcaccttgttcatcctttcctmtaagtcttstgcattccscattaccacactataaatatactcattcatattttcctmtagtatgtctgttaattttaaaaattatgataaaatacacataagaaaatttaccatctcaaccatttttaagtgtacagttcagtacattcagttcaatacatatacattgtcatgcaactattctccagcactcttttcatcttgtgaaactgaaactctttatgcattgaacaactactcctcatttctgattcccccagcccccggcaactaccgtttacgttgtctttttatgaatttgactattctaagtatctcattaaagtggaatcatcacttagcataacatccccaggatccatccatgttgtagcatatatcagaatttccttcctttttaagactgaataatatttcactgtgtgtatatacacattttgtttatccattcatccatcaatgggcacttggattgcctccacatcttggctgtttgaattgtattgcagtaaacatgaatgtgtaaatattctctttgaaaccctgctttcagttcttttggttgtatacccagaagtggtattgctggatcatatagtaattctatttttaattttttgcggaacctccataccgttttccataggtgctccaccattttacatttctgccaacagtgtggtgggttccagtttctccacatcctctccaaccttgttatttcctgtgtttttgataatagccaacataatggacatgagtttgtatctcactttgggtttcrtgttgatttttaactttaaatctcctctgaattttatttcattatagggactaaagaaagggtgatatcgttttctcctttgttcattattcaccagttactagtcagtttttcatttattgaaaaatcctttttcttacattaaaatgtcatcattatagtctaaaattcccatgtttgtttgcatctttgggtctgttaatctgttcctctaatcttaatttaccagattattttaatttttatagtgtcatatatatgatgtatcctagattttgatgtgtttttgttgttgttgttttctctttgacctgaaagttgtttagaagccatttttatgaggttttgtctctttttaaaaaatttccaactggcagaaattttgcttgcatatttttgttaacatttacttctaatttcactgttttgtgaccagagaatgtggtctgtagtatttcttctttgggggaaattaactcagattttctttgtggcctaatatttaatttctgtaaaaattcaagggtgcttggaaagaaaacataatctaagtacagatttaattatatgtcgaataatagatgagttttattatatctttgtttttcaaactggatcataaacatttattgtgtcataaaatcaatttcttgggtcctgactaaatatgtataactacaatttttaatggagtagaacaaatagaaaattatcaaagtgtattgcttatagtaagagctgctcacattttctttcagttacacttgcaaatctaacaatctgtgtgcttagtatcataatctgaaatatgtctctcacagtgggtttcagtcaaaaatgtttgaaaaacactgttctacatcttgtttatttttgtgctcttgctttattaagagcatagagaaaagttaatgcttcatatttgtctcttgactctttgccttatatatcctacaatttttatgcatttcattattagtatggagttgggatatgtcagttatatttttattgtaggtataaagtctattatttagaagtccctcctttaggtttaacgcttttgccttgttcagtgttaattgcatgactttcttttcctttatgttttaattaattaattgttttattttattttttttttgagatagagtgtcactctgtcccccagactggagtgcagtggcatgatctctctcactgcaacccccacctcctgggctcctgagtagctgggacctcctcctgactcagcctcctgagtagctggtaccacaggcatgcatcacsacgcccagctaatatttgtatttttggtggagacagggtttcaccatgttgcccaggctggtctcaaactcctgacctcaagtgatccacctgccttggcctcccaaagtgttgggattaccgcacccagactcctttatgtttcaccctttcttttgacttaaatttgaaatgggkttttttccctcattttgtcttagaatgatgtattagaaactactctttaatcttatatttagtgtattgtttgtcttttctagggtatttattagagagtttgattcatcttttattaagatgctaaaggtattttcctgtctaccatgatatgcaaattaagactacagattttatagtctattgttttggtaataactcttttgagacagagtctcactctgtcacccaggcwggagtgtggtggtgggatcatggctcactgcaacctctgtctcctgggttcaagcaattctcatgcctcagcctcccaagtagctgggattacagatgtgcaccaccacgcctggctaatttttgtgtttttagtagggacagggtttcaccatgttggccaggctagtctcgaactcctgacctcaagtgatctgcccacgttggcctcccaaagtgctgggattacaggtgtgagccactgtgcctggccatattttggtaatcttctaagagggcaaatatatgatgtgttttagttggtatttgaaggaactgccttgaaaatcagttgccatctaaaggattgaacagtgtagagcaatacatgatttgaatatcagaaacggcagggatttataattctgcaagacaggtataaaggtttaggtgtttttattctattttgggagatcacctttgtttatggattatcaaattaatttaaagtatttctatgtgaattcataatctcccactagtgattttttttgttcgaatgagccttaatctcctactagtgattttttgtttgaaggagccttgatcttggaccaccgaaaaggtaaaaccagtggcaagcttgaatgcttgttttatggtagacttagatacgagaacgggtaaagggtactggataaacttgggatataagattgtcttcttttatgcataccactcataccactggtgggaaatttcatttggaattactccctakggccatggagtcttcctgcatatgctaataatgtaagttcccattacctttggtaataagaaaatatctttaaaacaagttagcttttcctattgtttttatatggaaggacaggctgttttccctcctgttcatttagcattttgtgtattctctcattgcacaaattatgcttataacatagttactcatgaacatggctacttcactcctatttcaaaagggcaagttgaactgtaacttgccattattttgctttaatatcccccacctggtacaatgccttaaacacagacaatattcagcatatgtcagaattgaatagtagcagatgtcttttctttataactgtttctgcttttcactattctttcctctgtttttgtagttttcctttttgcttcctgtctcttttatggtactacttaaaagtgcctatttgctttgaattaaaaagcrtcattgcagcaggaatatctttttagccattggctgttagctattttgctgttgcttacttctgaaaatagtccagataaacaaatctaagtgttcagcactattctaattctgattattgactataccagtatgttgatatattataaacggcttttactgattttatttattattattatktttttgagatggarttttgctttgttgcccaggctggagtgcaatggcgtgatcttggctcgctgcaacctctgcctcccagattgaagcaattctcccacctcagcctccctagtagctgggactacaggcgtgtgccaccacacctggctaatttttgtatttttagtagacacagggtttcaccacattagccagattgctctcgaactcctgacctcaagtgatctgcccgtctcggcctcccaaagtgctgggattacaggcatgagccaccgtgtccagccctcatcagttttcaaagtgtggtctgtgaactttttgaatgttccctgaggacttctgagggtgtctacaagatcaaaactattgtcataataatattaagacactacttgcctttttcacgatattgatatttgcactcatggtgcaaaagcaatcataggtaaaattgctggtgccttagcaccacggatcaaggccaaggctmtagacggttmtagtagtcaatgtattcttaaaattgtgtaaatgccagtatcacttaaagactcttgaagcagtaaaaattagtaattttattaaatctcaacttaggagatgtctttttaatactttgtgaaacaaaatgtgaagtacgcatcactgcataccgtacaacagtgatctcaagggaaggcgtttgagcaattgctttgtgctaaccagtcacgtttctttcccagaacaccactgattcacaaagtatggttatacaaacttaggaatttggcagatgttttctcaaaatgaacaaagtaatacaaagaaaacaacacagtatgtatttccagtgataaaaccccagttttcaaaggaaagtttgaattttggaaaactagtgtccatgactgtgagtttgacagcttccagatacttagacatttctgagaagatcaatggtgatattaacaaaagtaattttttaatataatatcatgaaatgtgtcgacctttggaagatgtgtattactcagtgaactagtattttccaaatgaccaaagcacagtattaggaaataatacatggttaacggttttaacgtaatagaatgcaaaatgttttttcgtatggttccagtttccacattgcaaataactctaagaaattaccacctgtcaagtttgggtttagtatcaaagaaaaatattcacaataatctaaaaaggctatgaaagtacccctcctttctccaactacataactttgtgaggcataattttttcacaaaatgaaatgaaaacaatgtattgcaacagattaaaggtagaaacagatatgagaatccagccatcttgtattaaaccagagattttgacaaatataaaacagtgtcatctgactaaataaattacttgtggcttggatatatarttttcatgaagatgttgtaggggagccagagatcacttccaactcccgtttagctcttatatgggctcttttggctgaatctagaaaccagatcaacaccaggaagattacaaaagaaaagcgtaccattttattaggtctatatgtacatggagatctacccgagagaaatcagaagaactgaccaaagcaagatgcttttttactttttagacaaagagcaataaatttgagaagaaatgataggacaaaggggatctggcaatgggcagcaaacttttaggggagtcactrggagacatatggggggtgtaaaactggtggaagataagtgttactttggtaagtatatttaatcaggtctgtgcaaccctcaattctcagtcactggtgataagggctatatatttgccctggtacggagagggtacccctcccagaggagccttcatgacttgctgcatgcaagaagagatgagtcagctacccatttctgaaactacaatttctccagtgttgtcaactcatatcaatggtttggcatattttgaaatgacatgtttttcattacttcaatatattatgttaatatgtgaaatgtttggttttaagtaaataaatatttaaacattcacttttattttcaagtatggtargtatcagagatacaactgacataaggaaaaactctttgggacttaaagagtacgaaggggttctgaattggagaaatgttgtatcatagcttttcctcacccagccccccacccccaacattatactatttcctctgttaatcacttgccaagcaggctgtgaggatgccacttggttcagtacagtctgcatgtttaatgtatatattttgagagtatatattacatatctgataagtgctaagtaattgagtacataatgggaagtaagccaaattttattttattttttctgtattcttctgttctgttaactaagcatattaaaggttaattttaaaaattgaggctgggcttggtggctcacacctgtaatcccaacatttcaggaggccgaggcaggtggatcacctgatgtcaggagttcaacaccagcctggcaaacatggtgaaacccagtctctacaaaaaaatacaaaaattagccgggtgtcggggcaggcacctgtaatcccagctacttgggaggctgaagcaggagaatcacttgaacccgggaggcggaggttgcagggagctgagattgtgccactgcactccagcctgggcgacagagcaagactctgtctcaaaaaaaataaataaaataaaaattgttatgtcttcaccatgtattttgtactacagtctgtwtaagggagaaaaacaaagaaaaggtcaataaagagtcatgttcaggaagttctagttctcctaatcctcactaattaaatttttagacccccctacaggtgaaaagattattcttcattttttatctgcagtccagtgctctgcctctgagctgtaacccctcctgtcttcatttttaataaagagggccgggcgtggtagctcacatctgtaatcccagcactttgggaggccgaggcaggtggatcacgaggtcaggagtttgagaccagcctggcagatatggtgaaactccatctctactaaaaatacaaaaattagccaggtgtggtggtgggcgcctgtagtctcagctactcaggaggctgaggcagaagaatcactggagcccaggaggcggaggttgcaatgagctgagatcacgccactgtactctagcctgggcgacagagcgagactctgtctcaaaaataaataaataaataacaataaagagagtttttaaggaaaactggacaattcattttctcatagcctttcctttttctttttttttttggagacagagttaagcttttgttgcccaggctggagtgcagtggcacgatcctggctcactgcagtctctgcctcccaggttcaggtgagtctcctgcctcacctccccagtagctggaactactggcgtgcaccaccactcccggctaattttttttttttttttttttttttttaaagtagagacgaggtttcaccaccttggctgggctgatgtcgaactcctgaccttgtgatccgcccacctcggcctcccaaagttctgggattataggtgtgagccaccggcacctggcctctcatagtcttcctgaagtgtcagaaagtaggactttattgttaaagtgttcaattgacaggcattagctttagttctcatttttaatacagtaaagatytaaatttttagttttatgtatttttagatttgtgatacatcagcaaaactgtaaaatcagagtctaaagtacctctatacttactatataggagtttggactgttttattactttgtgtatgatgataatatgtaggtttcttcatgtttatggcaattaacatggatgtgatttattccactacagagttgtttgctcaacttgcatgcaatgtttataaaattgttcttttggaaaaaagtatgatttgctttttgctgttgttcctaggactgcattgtaggaaatagagaaatgtttgtgttttggtgctctctagagcaaatagtagttgtrtagtacttggttgttgttacaggttgagtatcccttatctgaagttcttgggaccagaaatgtttctcattttagattttggaatatttgcatatacataatgagattgggaatggaacccaagtctaaaacccagctgatctgtatttcacatacaccaagtttgtgcgtaaaacaaagtttttacagcatttttgatcacatgagatcagatgtggaattttccactcttggagtcatgtcagtgctcaaaagatttcagattttagaacattttttattttgggtttttggatcaggatgttcaatctgtatttacagatacagctcgtgagccctaataatgattgttataatttagtgttacgatttaatggaggtggctaatagttttagggtataacagtttagacttttggacttggatttcagatctactttctcctatatgactttgggcaagttgctttttctctcagggtttatttctctctttcatgggggatatgtgtccctcatgattattgtgaggtttaaatgtttattatatttgaagacttgataatgacctacgagagaattaatgacagctatcatttttaacctttgaactaaagattcaactggtcattgctttttaaaattaatttcctagaccaggcactgtgtttactttaatacgactcccttcaatctgatccattcctcctaaaatatgtaagggtaaatggtggttttattggcaaaagggaaaataatgttggaatttaccccttggagagaagagatcttggtgtaatactttattgacytgtttttgaacagacagatgataccaatcatactagttttctagaactgccataacaaaatgctacaggttcggtgacttaagaaatttatttttcacaattgtgtagctttgaagtccaagatcaagttggcatgtgttttcttcttgggcctctttccttggcttgtaaggtgatctccttcctgccttgtcttcaaatggcctttccttcttttgcatcccggtgtgtctcccttttcttataaggacatcagtcatattggactcagagcccatcctgtaggcctcattttaacataataattttgagggtacaatctccaaatatagtcacaaagagtagggcccacacacatgacctcagttaaaccttaattacctttttagaggcctcatctccaaatacaattacattttgaggtattggtgattgggacttaatgatggggaggagtacacagttcagcccatacaccacatattcataagagctaatatttatgggatgctggctatgtgccaattactgaactaaatgctttacatatataatctgattttatatgcatattaactttgtgattattagtatctgtatttacagaggaggaaattaaggcttagagaaattaataagatgaagaggtgggattggaatcttttgggctrtggtgttcatgctgtctcaagtaaaacctaagtgctacaaagtaaaagtacaagaggaaagtattagaatataaaacacaaacctatgttattttgcagtttscactaaagtcttgttagtaaacaacctgtgaaacagaaaatgtaacaccagccctggttgatgattaatttttttctttaaaaagtggtgagaattttgatttttagattggaaacaatgaatgaaatttgagattttagcacatgattataactaacaacwgattcgttttccagttgctcaaaatatttttctcctttttattctcttgcagaagattctagtgttccagaaactccagataatgaaagaaaagcaagtatatcatatttcaaaaatcaaagaggaatacagtatattgatttgtcttctgatagtgaagatgtcgtttccccaaattgctccaatacagttcaagagaaaacattcaacaaagatacagtgattatagtgtaagctgattaatagatatattgtatttgcatgtgtgtgagattttccaagaaaaaaacctacctaatttgagatattttggtgacttccctttttttttttttctttttttttttttgccccacctgcctttcttggccacatcttggttattttctctaacttatagtcatggagaggtacaatgtgtgtgttttctggataacagtgatttttttttttttttttttgataacagtgattttgagagcagatacttaatttccttattatggaagtttaaaagaattgtttagtacctttgatcgtgtataactgctttatgatttattctaaagtccatgaatcaagtcattttaacatgtttattggaaacastctgagctaggcactgttttatgattagaaatacaacagtgaacaaaccatccccagctttytttytgccctcacacagcttatattctagtcaggtagaaaagtaataaaagatgtagtgtgtcaaaagataagtgttatgggcaaagggaagaggaatagggagttagggtcagggaatcgtttctttttttttttcttgttttttctagagrtggggtcttgctatgttgtccaggctgctctcagactcctggcctcaagcagtcctgccatctcagcctcccaaagtgctgggattacaggcgttagacaccacacctggctcgagggtcagggaatggtttctaaagagcgtggtcagaaaagcctcaattgagaagacagtgcttaattgagaagacagtgctggagcaaagacataaagggggtgagaaagtgaaccatgtagatgtgggggaaagagtattccaggcattgggaatatcatgttcagtgactatattatgcctggtgtttttgaggaaagtgggagggacatgatgcggagtgaaggatctgaagccatagtgtaaaggatgagatgaaggaggggcttcatcacattagttccataggctgtttggtttttattctgactgagatgggaattcctaggagaatattgaacagagaggtaaaattatctgagttagatgtttaaaaggtcttaatgactgtgagggagcagtagtaaaagcataaatattgttgtaataacccatcaaaaaatgatggagacttagatgaggctagtgcctgtgggagggataataagtggttagattctggaatatactttgaagatggagcaagagaggatttgttgctggatttcatgtgggttgggagataaaggagtcaaggatcaccctaagatttttggcctgagcaaactggaaggatggagttactakgtactgagataaaggtgactgtttctgctgtgggtgggcaaacaccttttgaaggaaagtcagcaattcattcttgaacatgctatgattgagaacactcctagacgtctaaatggagatgtcaagtaggtataattagatttgggacatttgagttctggggagagattacatgtctgaatttactaggtgacagagtattggtttgctatttaaagccatatgatcagatgaaatcagtgtaagggacactagtatagtatagctgaagaagggaagtcctcttggttgaaatactgaggctaggggaactctggatttttagaatcagggagatgagaagaaacctgtagaaggttctgaggaggagcagctattgaggtaaaaggctacatggtcttctagaagttaagtgaagataaagtgttgtaagaaagagcaagagatcggactgtctacttctgataagatgaggacttcatcttaaaatgaacttttcacatgaagctgtgataaacatgcctaattctgaaatktactccaagataaaatgtagtgaagatcctgcatggttaatcctgaggaaaattgtcatattttggaaaaattgtagaaaagttgcaaaaaaaaatgcattatcaactctcacartcttttcagaattacccttgttagcattttcccacaattgcattatcactcttcgtaaacagcaattacaatwactactgaacactttgcctgcagtattttctcatttatctcctaaaaacaaggtcattcattcatttgcatattaacagtaatatttcammcccagaaataccaattaacactagtacagtactattatctaatatacttttcatatttcaattttgccagttataccagtaatgtcctttagagcattgctactcaaaatactgatttataaataaggaatatgtyttagaatgcaaatcagggtactgattccttcmccaagaatatcttgcagtgaaaaaaaaaaaacagctgaactaagcaatgtgctcagtaacgtagttgtttacgttctgttgctagttccttatgttgtcatggacagactacagttggagaactagcagtcagtccctggaccatattttcagtagtactttatggtaatttttttttyacagtggatttagtttgtcatatctctttaaactcatttaatctgaaactatttctcagtctttttctgtttctcaggatactgacctttgaagataataggccaggtttttttagaatttttctaaatttgggtttaactaatgtttcttcatggttaaatttaggttaagtggaaagactactacatactactacctaaatgatcttgtgtcgtcctcagtgtgtcatatcaccttgaggcatgtgtcaggagacacatgatatccatttgtcccattattgttgaactttgatgactcaattaacgtggcccctgctaggttttgtctgtcaagttaccatttttccctttgtaataaataagttatctgtggagagatactttgagactgggtaatagtcctattcgctagccagctttcactcagtagttgtagtatctattgatttttgtcggattaatttatgataatgatggtgggaaaatgtggtatactamccagtgttctagaacttaacacttgtatttggtagtctgtaatgytcctttttctccccatttgtgcttttatttatgtggyacaataaatatcaaaatgaaattatagatgtgtacttattcagtggtttataatttagtactattattattcattttggtgcacaaatttctcagttttggcagctgagggcctcttcamacaggctgttgtgtttgtttgagggattcctatcattttcctttctggaacaaggtatcccagacttctacttctcctacctcaagcctgaaataaaaattagcaatttctccaagtagttctggttctttttagtaggaaatgatacttggaaatatagaaacttcttctgtgttctttctttgctgctggtgaggtaggaattaatgtcattgccctttcagcagaaggacctaggaaatactcgggtgtagggggttggagttagggagagagagaaggaaaaatgtgaaaatgtgtggtgtttttttttttttaatcatttgtttacagtgatactgataattctaatctatcactacaggtcttttctttgcctctcattctgttttcttctgacagtgagaaccctgacttctaccagtatcagtatattttactaatctgtkcagtcatcargtatgcataaaatagttttagaatagctacacccatactacttgaccattgagggtatacagtcaatgcactyggattattaattaattaatttaaatgttttgttattcatttgaaataccattaattattttgtattccttttagggtttttcccttgttcttttcttttaaattttactttcaaatatttaaaatatgaacaagattccaaaaatcaaaactctacaaaggatatactcagatcccttactctctttctgtcccttctccattcaaaccttakaactaaccagtttgtttagttcattgtsatactttcgtgtatttttttttttgtktcttacacaaaagatagcatactacatgtgtgtrtattcatttgtkcttttatttacttagcatatatgtatatatctcctggaaatcatatcagttctagaaatttttattattttttgcaactccatagtactacattgtgtgaacattccttattttattcattcattccccatgtatgggcattttggttatcacagtttcttaagcttgacatttattgacatttggagccagataattctttgttgtgaggtgctgccctgtacatttaggatggttagttaagtatctctgacctcaccccagcagatgccagtagcatttccctagtcaagacaatcagaaatatctccagacattgccaaatatccccttgcagcaaaactaccccctaccccaactttgagaacccactgatgtgtatgctagaaactctggcagtagataaaatctcctaggaagcattcatagacaagaaagaactgaaggcagaatcctaggtagcttcagcagttgaagaaggtgaacaaaggaagaagagcctgttacagagattcagaaggacaggctgaaaggtaaaaggaaaatcagaagtaatgttgcagaacccctgaggtgagggtggggccaaattttcaaggatatgtttgtcaacaatgtacaggacaacacaggaaaacttagataagcagtgaaaagtttttattccattcagcagtttaaaagacattattgtccttagtgagaacagtttcactgagtkgttgtgcgaaagatgtaaaaacaataagtttgagaactccataagaaaggatgtagaaaatcagtctaataaaatctgtgaaatggaggagaatggggttttttgtttgttttttttcttgctgctgtgtccacagtgcccggaaaccctggcacatggaattaattgaattaatgcagtcttgagcacattgccgattggggaggaagagcttatgaagagagaaaagattcaggagaaacatagtagatagttagagcagagtcttgtagatgtagaaagggctagaatgccttagcagtgagaggggactttgtctttaacaggaaggaacttctttatctgagactggaaaaaagagcaagtggtcaactctgttgttcttacaggtttttttcttctgtttttaaagtttcaagcacacaagaaaatgaaatagtatataaagaacaccygtataccttccacctagatttaacagttgttttccttatttgtttattgtgtcacctattattatttttagctgaagtattttaaattacggacatcccagcatttctccccttaatactggttatgtatctgccatctatcaatgaacaattctctaatatcatttaacttgtaccttaggttcagatttcatgttttttatagctgatttttttcaaaaccaagatctaaattacatttggctattaggcttcaactgtgttaatctagaatgggccactccccttttctgcttctctaaagagatcaagtcttttctcagaaaaaacagatttttctttttctttcctttttctttttagacagagtcttgctctgttacccaggctggagtgcagtggtgtgatctcagctcactgcaacctctgcttcctggggtcagatgattctcatgtctcagcctccctagtaggtgggattacaggcacccgccaccatgccaagctaattgttttaatttttagtggagatggggtttcaccatgttagccaggctggtcttgaactcctgacttcaggtaatccacccacgtcggcctcccagagtgctgggattacaggtgtgagccactgcacccggctggtttttctttttcttcatgacattatttattttcyatcacttgtatttcctgtagtctggaagataaatccaagccatagtgatattcattgtcagcatcaatatttattacatcatgaggcacatgaatttgttagatcattgagtctgatcactggataaaggttgtgaccaccagaagagtaaatatctttgaaagtggttatccagggcaggaattataaaaggattttaacctgaatgctttcattttctcagtcacctaagaggcaaggtcaagtagggagcagggaatatagagaggcataatgaaaattcaaagttgagtacatcaggaatgagaagtctaggtataataatgcaaaggaaatgcatgtgattgtcctcaaatatttgaaggacaggcataktgataaaggaagaggtktatttgcctcgttactttagagcggtttctcagagctgatctcaggaagtcaacctagaagcttttgaaatacgtacactggctaggcayggtggctcacacctgttatcccagcactttggaaggccaaggcgggcggatcgcttgagcctaggagttcaagacaagcctggcagaaactctggcagtagataaaatctcctgggaaacatggcaaaaccctgtctgtacaaaaaacacaaaaataaggtgtggtggcaagcacctgtggtctcagctactcaggaggctgaggtgggaggattgctagagcctgtaagacaaaggttgccgtgagccaagatggcaccactgcacaccagtctgggtgacagagtggaaccccgtctcaaaaaaagaaaaaacacacatattstgttctttggaaatttgcttttagatgttcytaggcatcacatgttgtgccataaaggacacaacagaaataacatgagtacatatagagaaattgcatattctagatatgtgtctaagagagctattcagaaatagaattagcagcatagcaaagtctgagttcactaatgttaagattatacctaagtatagtcccatcttgctttcattctctgatctctataacttacattcatttgttactgttctagttctgatctctagagtgcctaccatgtttgaaaaccaaaatttcaaaatgagatttttttgtttagggaataaatgagtaaaatttgactcaaaatgtcttttataaaggataaacatatgaagttaaatagaacaggaataaagttagttgttggagaataaaccctcatatgaaataaatattccctgtttgctgaggaaatgttttgtttctggcagagattcctatattcaatgggaccattctgattttagcagttagatcctgatcacacctaggtaggcctgaaaattactttatctttgtatccatttaatcttcataatttcttaggagtagcataacttcgtctgacatagagagtattggtgaaagaagatgagtaaagaggaagtgggcatgcaataaatgcgtgtgagtcctaacaaaataaatgctaggaagttccttttgttcgtttccatcccagctcagggttgagattttttcagtgtatactgatgttggtaatgcagatttttcacataactacactgaaatggaaaaaaaaggtctctttctgacaagtatagattgcatttactattgaaaagaactgcagatgtgttgtactatgtatacacatagacactataatgaaataacattagtaatacattaaaaatgttttttgctcctctaaaaatatttttagttctgagccatctgaagatgaagagtcccaaggcyttcctaccatggcaygtagaaatgatgatatttcagaactggaagacctttcggaattggaagaccttaaagatgctaaacttcagactttgaaggaactttttccacaaagaagtgacaatgatttacttaaggttatattcattggttattgtagstgtaatgatgataaaatctctcctgcattcagtgmtatagttagtagtggatagtcatttttmtaaagatatcttacgtttgaagatattaactattaaatctaaaggaagtaaatgccagacatttatttattgaaagtcttaactttttaatagatgaggttatttatttgtaaatagtgcagtaattaaagccttaatagcgaayataggttgtgagtttttttgtgtttgaatgtttctaaaatgcataacctccccatttccattagaaatactcagaaatgtcaggaaccacctcacacaactgtgacaagggtttttagtggcatttagtgccctgaagccagcgatgctaaacaccctgcagtactaaggacagtccataactaaggatagtcctgccagtagcactcttgctgagaaatattgatttaactacagaaacaaaggagtatagttgaaatgtaaagtgatgtttaggtatctctaattataagagtaaataaaaattgaccaatttagttttaggtagagaataaatttctgaagattaataaacagtctgttcctagctctgccacttattagttgaattatcttaggggaatcatttaattgcaggtcctttgtattttcacctttgtatctgtcttcgctgctaccactaccagttctcctcctcaccatatgaggcttaggagttaccatatctgtatggactaggcaggtaactttgaagtggtagagactagtatactatagagtacatattcttttttaaaggggtagctgctgtctagcttcagcaggacatggccatgtgagctgtcagtgatagcccatttttactggatactcagatttttcaaataaagccataaggctggatttttattgagggttggtcaccactttaacagctatattcctatgcctaaaatcacccatttaaaatatacaattttgtggtttttactatatttatgaaataatgcaactgactcccaaaagaaaccttatatccattagcagtcactctccagttttgtccctctcccagtcccaggcaaccaccaatccttttttttttttttttttttttttttttagcttattgkggatatttcatataaatggattcaratatgtgatattttgtgactggctgctttcacctagkggaaaarattcrtcgctgttgcaggatgtactttgttccttttaatgctaactaatttaaagaaagataaaaataaacatgctrttcaagccaaacaacacatgtctgtgaaccataggtggtcctgtgcctgccagtttaagtgtagattacattatttttaatctatgttatttttgacatgaatccactggatttttttccacccagatcattttgataccatcttactattagctaaatgaaactttagtgatatcttgagtctacattttctctgacagcagtgttacttgtctgctaatgtgaattttttttttttttttttktgtggaaacaaatgtasacatgagggctaaagtattttaaagcagtaataaggaaagagcttctaatagaatamacatggagtattaaaatattcmacataaagggccaaatctcagtttaaaaatactttcacttgattgccaatttttaatgtagttcagagtttttttcttgtaaaaatctttctaattttgtaattttattggaaaaataagattgatatgcataatttccctgaatgtttcataaatcagtatctgaaattgtgtaatttagtatatcacacactccagagcactctcttgaagtaatctctatttcaagtgatccccttcagttctagaratttaaaggtaatgtttataaattactcaacaaaaggttttaaatccatgtaaaagaattcaagaggttgtgaaatagttctargcttgctaagaatatsctttggctattttgaaaatgaagaaggccaataggatatatcttagcatccaagattaggaaaaattagtgtggaagagagcactttgatttgaggctacttgatttaatacaaaaagtagcttatttaaaagtaagatctttttaaaacaagtaactcatttgaaatatgggaagctataataggagaaaaataggggattttagtttcttctgaaatctaaaattactgagcagtataaaaacagtatattagawtgatgtcatgcaagcaatatatgcatatgttcttgaaaagattcagacaattcagaaatagagtaaaaattaagagcccctatcccatttatctcgagcagtattagatttttttaaaagagcagaattgtcctttttcccctagaaattaaaaaaaaagtaaatagatgtctgtcagtctcctctttcccctttctctctccatctgacacacacacatacacaaacgtgagcatgcacacacaggcacggagtggcctggacatgttaagtaggaagttttgtgtaaaactttgtaattaaaatagcaaaaacctagaawatactgtatatatgtgattgtgttttaatttttcctttatagtaagaatgagtcaacctgatacattttaaaatatgcttaaaattcagaccttttacataaaacagattttctgaaaatttatcataggacttaatgaacttaaactatgacacacatactttcctgtcatgtttatatttaatatgtttgttcttaaatatttcagtaactgaaataattcttaaagtgctgatttaaaacattaatcttttctcgttctgttagttgattgaatcaacaagcactatggatggagcaattgctgctgccttgctgatgtttggtgatgcaggtatgcttgacttaattttaagccatgtcgatttattgttacgtcataataatagtaccttctcattaatattgctccacagtttatcaaacacctttatgaattcttacaggaatttgtgaggtattaatagtttcactgtttttccctaaaaagggaagaagtttctcactgataattttactgcttttctaccaatcaaatcttgtaacagtgaagttttgtaggatatattttctctctttttaaagtataatttctagttgcattgtggttttattataggtttacgaatcttagtaggaacataatgtcttagggaaagkcgtagctggtaatcaacattcctttagtaaatattttttcatgtttcaggggcttgggatacaaaaataaatgcatttgaatgagcttgcaatatagaagcgtgtccagtttttwaataaatgctgactcgattttttttaacttacacatactaaaaaaaaaaaaagtaaaaatcacctgaccctactactaaaaaagtatttaaatagtgaaagcaaacccacacttcattaaccacccttaaattataaccaccttttatgtcattctcaacttttttcctgcttatatacactggcatacaacacacatacattaggttacaaaatgtaaatatattggtttacatcttttaaaaaatcatataataatttgtcatggatagcttcacattcctctgtgactacccacaggattagtttaactgtttccctattagcacttacgttttcattatttcattattatagcactaaagtaaatgtccttatacataaatagaacaaaaatttctgttatttatataggctaaatttcaaactaggatgttcaagcaaagtgtatgcacattttaaattttaatatgtatttccatgtccttttgttaaaggttatgccagtttatgcttttatcaacagtatgtttctgaatgctcatttttctaagtggattcttactactattaattttttcgaggtttaaaatatgtacaaaaatacaaaacgatgtgttcccatggacccatcattctccaataattatccacctcatttttcttccactaagtggcctgtattcaagtagattctacataagatttttattttatccatatgaaatattttaaacctttaatttcctccagtttgagcaaggagacagtattttgtgggtgctacctacagtgtatcaagattcttttttgtcttctatttattaatagctgtgtgaccttgagcagtgttgcttgactcttctgtctttgtttccttagcagtaaagtagtataatagtgccaaactcaaaggtcgttgtgaagaactaataatgtatactacttcttatggtgcctggtacatagtgagtgcataccaaatgttagcaactatttgtttaagggtcatctgatgatttaaaaaaaaagttagaggtgaatgttagctgtgtcttcctcattatttcgtccctagcacttactttaaaagcttctgagctaggattgtgccactgcactgcagcctgagtgacagagcaagaccctgtctcaaaagaaagaaagaaagaaagaaagaaaaaacctcctgaaaaatgatacgctcagtgaacatttgttgagctgcaaaatagcttgggaagttttgtagcttcccaatacattcttgctctcacattatctcattagtccataaacatttcattaaaaacaggttgtggaattactttattccacggtggtatctaatcttttttctcttgagcaattcatcttattcaacttattcattaatttcacaaatatttattatgctgcttttactaggtagcacaggctgtggcttaggtactgaggttacatgaggaaacagtggatacaacctctgccgtcataagagtttacaatcattaaatttatttaacttcagctgagctttttcttattccattgtacttcagattatttcaattaaaaaaatgttaaatggcaaattacaaggaaataaaaaattaggattttctggttttttaattaaacttccatgctgcatcatggaacggacagaacagtcttatcagacatcttcatttttagtgtagtgcactttgaggtagtatatagaatgacaggtttgtctaaccttgaagataaggttaatcttcagtatactatgttattgagacaggaaactatacttgccattttaggacagttttcaacaaaagacctttttaaatacctgtaagtgatctttaacagatccagaaattgtgacagttcccattgtttcttttaaccacaaattgcagtcttacagacagtatcatcctgcgtattaaacactagggatgtttttatgctgtttgttttgaaagtttttgtttttgaatatgaaattacagaaacaaaaaaatgtatatccaaagtttttactctacttcagaagataagagtacgaatttattgatgttgtccggagtctctctagctgccctgttgtgtttttttttttttttaattttttattttgagacagggcctcactctgtcacctaggctggagtgcagtggtgcggtctcagctcactacgacctctgcctcccaggctcaagtgatcctcacgcctcagccttccaagtagctgggactacaggcatgcaccaccacgcctagctaatttttgtagtttgagtagagatggggtttcaccatattgccaaggctgatctcgaactcctgagccccagagatctgcccacctcagcctcccaaagtgctgggattacaggcatgagctgtgcacctggcttctgttctgttctttttaggaaagaattcagcatgtctaggtgatgtggcaagattatctggtttgaaggtttttttcagacttaaaatattacatttagaatattgtggttagtgtttgtagtgacacaaatactctgctttaaaatgttaataacattccatttttattttgtaatagccatgttaatgaaatttttaagctgacatgtatgtatgtatttgagctgcatagttagggctctgatataattaatgctgaaatcttaaacctttgtagtctttagcaggtgctttcatagtagcacagcaatatgtctgacaaacttgttctctgaaagcaaaagtatttaagaagtaggtaaatatatacataatgtatacaagcatacataagtagcatatgtagctctagtttgttttcttccagtcacgacaatatgcagatttcctgttactgctgtactctatgttatattctcttgtttttacattaaaagcatttgttgcttaagctctctgtatctctatcctcctcatttgtgaaataaaaatgttacctactttgtaggtttgtgtgtgaaaagtaaatgaaacaatagtttataaaagaccttgtgcaaggcctggtacatagtagactcagaaattgctggtttctgtgatggtattcagataacttacacttggtgggggtcagctttatttcactgctcaacactcagccacttggaagaatccctccctcctaatgttgctctgtagaattactcatcaatttagagatgtatatttttagattaaataatgtgatggtttatgaatatagtattacagtgatttctacttctgaaagactgcaaagaatgtttactttttttttcaattcagtcatatgtagaacaacaaacactgggcctgatatcaagagaactgtctagtattcattataatacatttttgcctttgttttayattaaattgattttttgctatttctgtgcaaagtttgagtgtgctgctctgctttaaaaggtggtgggcccaggaaaagaaaattatcttcttcttcagagccatatgaggaagatgaatttaatgatgatcaatctataaaaaagacaagactggatcatgtaagtttacatttgaattacagtatcaaaattggctgcttaaggttaggatatgtggagtttgtggatattattagacctgaaaatccacctaaatgaattcctttctatcacaactaagggaatttacgtctacatttaatttgtgactgtttttgctttttaatktatccagtatgaagcctgcttaagcacagactattttgtgtctgtggatatcagacctgaaaatttgtctaaatgaatcattctttcttttctttcacarctaagccagataatttgtgcttgcatataatttgtgactgtttttgctttcttttaaatttatccagtattaattgcttatctctgccctcttcattacattgggttctctgaactgtgtgcgtgttcatctccaaatttcccctttttataaggacaacagtcagattaggtcccactctaatgacctcattttaacttgagtgtctcactgatgaccctgtctccaataaggtcacattctgaggtactgggcattaggacttcaacatttgaatttggaggggacacaacccataatagtggtgtttccagaagcaggtggatagggaaggcaaattcatacttagagcaggttatctgttactatatctttcatgatgaatcgtgaaggtgtaatcatcctgccaccagacagttgactgaatctcccaaggaatggtgctataatgggaactcgttggcctctgttccttgcaggttgagcactgaccgtaacaatagccagattaatcttggtgtagaaagtcttaccktgttgacttgcatgcacagactcaagcccagttgccatggccatttgtaaatgggcctattgagcaggcattcaagtggctgtggacttaactggtgttcacaaaatggatgatcttgtatacctgatctttaaaaattttctctgccacgtgtgcacccttggctgaacattcacacaaacaccgttatccttctattctattctcaggataacttctttttttttgttttgttttgctttttgagacagagtcttactctgtcccaggctggagtacagtggtgtgatcttggctcactgcaacctccacttccctggttcaagcaattctcgcacctcagcctccggagtatctgggattacgggagtgcagcaccacgcccagctgtttttttgttttttttttaattttttgtagagatggagttacaccatgttggccaggctggtctcgaactcctgacctcaagtgatccacccacctcggcttcccaaagtgctgagattacaggcgtgagccaccacgcccggctgtattttcagaataacttatattctgagatgttcagcaatgtacctcttccccagacttcctggtcaccagttttttaagtcttctttttagcctctgttcctgatacattgctgatctctacctctggccatctcttggtacacaaaatgggcaacaagatgtactgcccaaagttgtacacagggctactctctgagttgggtttatattatagcagttgttcacttggctggttctaaaattatgcaaatcctttgtaaagtcaagctggttcaggctgggtgcattagcttaygcctataatcccagcatcttgggaggctgaggcaggaggattgcttgagcccaggagttcaagaccagcctgagcaatatagtgggactcctgtctctgcaaaaaaaaaaaaaaaaatttttttaattagctgggcatgcttacatgcagctgtaatctcagctacccggaggctaaggagggaggattacttgagcccagaaggttgaggcttcagtgagccataattatgccactrcactccagcctgggtgacacagtgagacctgtctcacaacatacaaatgaagtttaaggatttcttccctctttatcaggtcataaagaattttctcttttctttcttttcgagacagagtctcatcctgtcgcccaggcatgatctcrgctcactgaaacctctgcctcccgggttcaagtgattctcctgtcagcctcccacgtagctgggattacaggcgtgtgccaccatgctcagttaatttttgtgtttcaccatattagccgggctgatctcaaactcctgacctcaggtgatccgcctgctttggcctctccaagtgctgggattacaggcggcagccactgtgcccaacctatcaggtcataaagaattttttataatgcctcaggtaatagttgaagaaggggcagcagtgatgcagaagcaggtaccatgagagtctgasacatctgcacatgcaatttatttgtgtctcttgaacctactcaagtccattctcaagtataccatttctacttgatgatgggttgctgctgccaatgctccgttttaggctaggtaaatcagatacccagatcacataacggctcaagtctcatggtcatttgatgttctgtggtcaaccattctgcttttatcaggatttattgtcaagtcaatagctgtttcacaaaaatacatcagtcagttctgtttttaaaatgtgaatttattccagtgttaatacattagagaacgatttgagcataatccaaaatttgcatgtgcttatgtgcagttttgtccatgagaaatagtaggtgatcatagaaaattgcttccagctgaaccaagccacataaaacacacacgtttccagtatccactggctgcctctttttaccatgtatattatcctgttaggtggtgatatgctattctttgacatttgtgatcttttctatttgaaaaaagcactcattcaacatctcaaacctacctaagcattctggttcaaaaatgccacacagtacatgcagagggaatgttttgagtattaaggagaagcttgaaacaagaaaacatttggaaagataaaaacataacgatacatcccaagcaacagatataaaggaatccacattatggaccatcaaagataatgccacaaaaataaaagtgtatgtatggctggaccaggttcgagtgctggaaagtccataagaacaaggcataaagaaacagaagaaaaagaaagattgtcaaatatttggattcaagaccaaagggtgaaaaacttaaggaacaacctttctcatacagatctttgtaattatatacacagacctaaaatagaagtcactgtaccctgcataagtggctccttttagtgctagtagtggttgctttaatgatttcaaacagtgctacagtttcctacaaacaatgctacagtttcctaagcctttggctgtcagacataactattagtgtagatatgaaagctgcaaaagaatttttcagcagtgatagggaagtaaattgaaggcagctgtgcatggtgttaaattcttggttttgattaaacaaatatctgttatgaacgcatgcctcgaataacccaaatatgaaagacagaaaacatgttctaggatttaaggctcctaaaggtaacataactgtgatatttggcaccagtgccaaatggagatttgaagctgaagccaataatgtcactcaccaaactttgagccttttaaaagatattgttaacgtcagcctttgaggttcatgtcaggtatagcaaaaatgtatggatggctgcccacatttgcatttatatttttacttagttcttctctgttaaagaggatgaatgccccaaaacattaaaaaaaaaaaaaaacttaactttaaaaattcttacagtgtatcaagctctctctctacaaaagcagaattcaacctatgtcacattcttccttttgcctccaaaaaccacctctctgataacagcccctttttaagtgtgtgacagcagtgtttatagcttactatttaaagtgaacattttagatattaattgctgttatmtaaggcagggttgcagaagtggttacagaatgttggaagaggtttaacattgcaatgtcattgttgaagcctggagtaatataccgagagtgtttgtgttatgtgtggcagaaaattgcctttgacttgattctttattttgaagaatttgatacttcagagaaattttaaaagtttaaaacaagctatattgatctaagaaamacagtttggactcggagcagtcaaaaatgaggatattgagaagtttctagggtcctgtcctgatgatctaaccacagaaaacattcagcaacttgctgcttatggctgtatggatgcagaagatgtcgatgacagtgataatgaaagtcagaagtctgtgtatgccatgacagtgtaatacaaatgatcagatgttttaaatgctgtgaaaataattggactgccttgaagataatggctttactgctgaagatattaggatagtcttgtgtggcatccggatgaatttggaaccgtacaggcagctttagtgtaaaaggaggaggctggcaacaccacagaaattttatttattctttatattttaagttagtacagcagacataacacaagsacagtgagctacaaccttstgtatctggtgttaaaaattyccattcattttcagataacctgttttttgccactttacaataactcgtaagctgtaactcttccaatgtccacaagcaaacttcagctcatatttattgtagtatttaggtattaactatttaatgtgtgtaaaattgtatcatttttattagattgccttctctttttatatgtcactgatgaagtttttgacattgtatctctaacagtttttctcctaaaggctgcaatttttaacaattttgcataatgcagtaatttttggaaatatatgtgtcacagcaaaactgactgtggtcagtagaagaggacatgatgacctttctttaaaactctctrmaacgattttcccactggggcttgccaaagacttcrtacaacatccttacctgcaacagattsttggagaatcattgcatctgctggtcacgaaacccaagtggcggagtaccttgtattgcactctggacctggtacagagccgtctcttaacctgggccccattcataactgacattcttttttttttttttttcttttgagatggagtctcgcactgttgtctgggctggagtgcaatggcatgatcctggctcaccgcaacctccgcctcccgggttcaagcaattctcccacctcagcctcccgagtagctgggattacaggtgcctgccaccacgcctggctaattttttgtatttttagtagaaacggtgtttcactgtgttggccaggctggtctcaaactcctgacctcgtgatccacccgcctcagcctcccagagtgctgggattacaagcgtgagccagcgtgcccagccataactgacaatcttaagaggtattttataaaatgaatcaagcagtacacaccctaatgaagtatatcttgcctccagtgtgcagtgagctcccaatgtccagtctaaagaggcagataggtgcggcctttcttttttcttaagagtggagtttgcaacatgctccagactacactcccacgaaagtggtgggcctcagagtgaggatggttattccttcaccctgatatgtggcatgtacgtatctgaccagtaccattgaaaatacccactacctgtatcaagtccagtcaacatgatgtcagtatagtggatcaagtgatactctctagactgtgcaaaaccatctaagtccatgagtactgtattatttgagagagccaggaaagttactctaactctgaagactgaaggtatatcattaaacctgccaagataaaaacggattgyttctgtttgatctaattgggaaaggggaaaaagcaagtacttgattgataactgcatagccatattgatttgctccagcaaaaataccacatcctgtaaagcagctgcagctggagtttgattgtttatgatactcttaaatacttgcaagactcatctactttttgtataggtcaaggaggcatcttacattgggatgggatggtggtgtcaatatctgcagttcctttaggactgtagtaattgcttattgttttgattgagagggacaattctagggacttggatttggtgtttcctataatagtagcccatacatcatgggtcagggaactgatatagtatgggatttctgccagtgccaaatatgtctgttccaactatgattctggagatggaaaaataagcactgggtcgaatcatatcccttgggcccrctgagacagatacagtcccaaattttatcagctagcttttgtaaagtgtctgtgtaacmwcctggaccacatgagtatattcagtcaccagggatwagcagagctggcataagtgtgggacccaagagcaaacaacacatrataggcacaccatctactaaatatttgattccgaagagctgtttactgttttccagatattttatgtatttttttattgaggtgaaattcacatagcataaaattaaccattttagagtgaactatttaatgctatttagtacattcacagtgttgtataccatcattcctgtctagttccaaacgctgtcatcacctcgtaatagcatgctatacccattaagcagtttctccccattccctcctccccctaacccctggcaaccgccaatctgccttcagtctctggatttacctattctgaacatttcatttaggtggaattatataatatgtaaccttttatgtctagcctcttattttttaatttcagaaaaatgtgttttatttgttttttcttttttcaactttatgttagaattggggtacatgtgcaagtttgttacaaacgtatattgcgtgatgctgaagtttgaagtatgaatgaatctgtcacccagatagtaaggatagtactccataggtagttttccttaactcttcccccacatcctccctccgccttcttgtgttccccagtgtctgttgttctcatttttatgaacacgtgtacccaatgtttagctcccatttataagtgggaaatgtggtatttgatttttctgattccacattagcttgcttargaaatggtttccagctacatctgtgttgctgcgaagaacatgattttgttcttttttattagcctcttacatagcataatgctttcagatatactacaatgttcattcatgttgtggtgtgtatcartacttcattcttttttatgacttagtgatattccattttatgtgtttaccacaatttgtccatgacgcacatttgatatattaacaaatgaacaactgaagtttagttttcacttatgtagtgaaaaagcagtggtctagagttagatacttggatctgttccctcctcagctggttgttgtccatctgtgagctttaaaatactgttcttggaatttcagtgtgcctgggctgtaaaggtggcagtatgaattttgaagattttgaaatgktttctccagatgggtttcaccagtatgtcttattattcccctgctcaaaatcctgttgcttcttaaaaaagactaaccttaggctttattccatgttagctctggtttaattcttcatccttgtaacctattaacattctctgcatttgagcccaagtagaccacttagtattatgaaacacatgcaattttcttctttagtccagatatccatagcattttattggtctctgttttatgaaattttattttactccattgtgcagaggaggtatcagaatttagttatttctatctaaggtactgaaagagaaaaatagcaattcagttgttggataataaaggaggttgaagaagaagattgtatttttctccatcttgtgtgtatagcatgtggtgcagttctaagcagagtagaaaaatgctttttgattgactaaaatttttcctatgcatgaacacaaggagtcttttctttttgcttaaatgtggactttaaccagtttcttcaagtgaagttaagtgacagagaagaaggaaaagtgagactatgtatagccacaattctcatattaattaatctgttcggtttatacattatttagttccacttaaattccttttatcattgtttcagttttatgttgtgactgaacaattaatatttaagccattctgtgaatcaagagtgaagtaaaagtaaactcttctcagaatttgaaatttataggtggatatataatagtgaacatagatgagatatttgtatccttttaaaatttaccgttgtcttggagaaggcatcagtatacttgaattatattgagttaatttgaggatcattctagttttttaggagatttatctcattttaagcactgagaataaagtttgagttaccggatatgcaatcagggtctttcagtgatcttaagtcagcaatatttttcatccttaaagacataaatatgtcaatgttcacagaaacaaaaagaaacagtttggattcttctgactgatgatgataattttcagatcaagtcaaaatacaatgataattgccttaagaccattgttattgatatctcttaaattgttttcttttttttttctccccattagggagaggaatcaaatgagtctgcagaatctagcartaattgggaaaagcaggaaagtattgtactgaaattgcaaaaggaatttcccaattttgataaacaggtgagtagtcgtgtatgaaaatttaatcagtgtgtactaagtgtttttattataaaatagtgttaagagttcaaccacataaaagcttagggtgagttttgtattcttctaattaaatgttctccttttatcaatgttataaagtattttcatactgtttatttatgttgtttatttaccttgtttactatagtatctatactgtatccctaagtcattaaaaaataaccgtaataraaattgtgaactcatttataacatgtaagtcatctagaaagtcatctgtaaccctgcccccatcaagtaactgcttagtttttttcatgttctcattcttgaaatttcttacaagaatttaaaaagtattccatttcagtrtcttaatattttataagctttctactacttcccagatagtgagaatgttttcagagtcattaaaaaaaaagactcatgccacgcatcctgttgctaaaaggccctctgtttaatcccatgatcatatatagaagcacatatttgtttagcatttagagtacatttacacttgcactgatttatttgagtatatatgttcagatagtacatctactaaattctgatgagctgaatgcaaaatcttgttgcaatattggttctttacctttgttgaaactacgttttgaagttagcagtttgtaaaagcctagctgcatattgaaatttcatttttaattgagaaaacatttcttgatcctctagtgttcacagtacttcatagtgagcattagaaatgcaaaaaaatgtcaagttttctttcctttgaagactattgtgtatttgtggaggtgaaattacacagaaagcatttgtaaagcagtgtaaaaacaagtgcaaaataatcagatgtgaattctctgttttcaggtgattaacttatttttaaaagagcatagacrttttctgcaagttgctaatttgagatttttaacaaaaagataaatgacttatttctaggaacttagagaagtactcaaggaacatgaatggatgtacacagaagctttagaatctctaaaagtgtttgcagaagaccaaggtaattattctgggtcatagaaaatacatacttctcattatartctgtattttagtatataagaaaatggtatataagaaaagctattagctgttaatcagagggtgggattgcaaaagatgttgaaagtaatgatgtaaaaacattctttaacaaccagtttttaaatgttttgacctgcctgttctttatcatagtgtaaaacaaaacaataaatatctttttctatttgttcagtctttcttaatagttaaggctacttttaaattgccatgttttattgagtgtaaaataacctttttaacaactgtcaggatggatcttgtgattggtgatatcatgtcattactgtaatgtagatgtcttagcctatacttgcacagatatcaaaagcactagcatcaaaaacttaagggtatcataggcatgaacacattttggaacactcttaattctaggaaccaaatgatagaggagaggtggtaaggaagagttgagtcatacatgtttagtaacatacctaaggaagaatcaagtagactagctcttcataattgcaaacccagcatggtagcttttggtgttttggtttgggtttttttgtttgtttgtttttaataaattgttttaaaaggctatactaccaatactgttgatggcacagaaaatgatattctgtggcaaaaagaaagccaccaaatatgagtttgaaaaatgagtcagaagagccatgttatgaatgtgaaaacatttgaggaatactttagccaattcattttgcttattttttataaatgcacaaaaataaaggtatgataatctgtgtaagtctaatagctttctgagtaagtaaaaatttctgaataaagtattgtattatagattggtgcatgttttctcactggtacataaaataatggtgtyaccttcattcacaggcatcttagaattctgtaaactgataatcagtgataaagtagtggggctttttgataatactgtatttgaataattttttttattttttattttttttgagacggagtcttgctctgtcgcccaggctggagtgcagtggcacagtctcggctaactgcaacctccacctcccaggttcaagcgattctcctgcctcagccttctgagtagctgggattacaggcatgcaccaccatgcctggctaatttttatatttttagtagagacagggtttcaccatgttggtcaggctggtctcgaactcctgaccttgtgatctgcccgcgtcggcctcccaaagtgctgggattacaggcgtgagccaccatgcccagcctatttgaataattttttaagtaacgatgcaacttagaatattgaagatagtattggaaaattatggatagttgaaacatacacactttttattagtaagctttatagtagtgtaagcatcattctgctatattcttcagtgttggcatagttgagtggggctgctaggaatatctgagacatcatacagatacgcagctgccatttgtgttctcaggacctttgttagaaaacagagatttatatttaattcattttaaaaacaagttatcacctgcttttgaaacaattgtttaacttcaaattctacttaagtatttttaaagtgtatcaaatttaacaataaattgtcgttgaattcttctgtattcaataggaataggtaaatgttttaagtttttatttgaagtctatctttatatttatgtatttctaatttagttactgtttttgtcttttatatacagatatgcaatatgyatcacaaagtgaggttccaaatggaaaagaagtttcttcaagaagtcaaaattaccctaaaaatgcaactaaaacaaaactaaaacagaaattttcaatgaaagcacaaaatggctttaacaagaaacgtaaaaaaaatgtttttaakccaaagagagttgttgaagactctgaatatgattcaggttctgatgtcggtagttcactagatgaggactatagtagtggtgaagaagtgatggaggatggctataaaggtaaaattcttcacttccttcaagatgcttcaattggtgaacttactttgattcctcagtgttctcagaaaaaggctcagaagataacagaactccggccctttaatagttgggaggctctggtaaggctttattctttttttccccttgtatgtgtgtgtgtatttaattcacagtaccggttatagtcaagttgtcttcagcccaggtaagcatagatgggtggccttatcctgtgtaaagtcaaacattactttcattgtaagccaatagtatttcaaatagtgtcatatgacctaattttgaatgaattaaggggtgattttcctgaaaaaacccaagctgattggctgggaatactgtcactcattcctttgcatagaaacttcgttcatttcactgcagaagaagaaattagagcttacatttaggaaggagttgtttgmtagcctgttctgatctgttactgctgagacaccatgcagaaagcaagaatgtggcagaaattttactacaactacttgaagagcaatagcaacggccaggggagctccatgattcaaaatgccagcctaagtgttttatgcttcaccacaaaagaagcaattgtttattttctttttttcttctaaaagtaacagctcagtctctaacatgtttttgttggttaagcaacgtggccattttatggagtgtagcaggctgcagcgtttttaattggaaagatagaaaaatttctggaagcctataattcaagcgttaggtgaagggaaggcataagcactggtaagtacactttgcatgatcattttctggaatttgactttctataaacaggttgtatacagaatacctgcattttgagttttatgaatgccaacagtcatcaaatcttattcatacagataaatataagaactcttaaattttgcttcaacccttacgtgggcttttatagcaggaattgtatataggcctgttgtaaaagcaatatggatgattttttacagctttaaaagatgcagcgactcttgatgctttataaaattttttaggaagttttattccctaagttagggagcaaagttgcttttgtggttaattttatacttgaaacaaatctaaatgagcattaaatgccctgataagtgtcttgaagtggcaataggggagagtccctgaacaatggttgtaaatacatttttttaattaaaatatttgaaaaatacagaaacaacattaataatattccatagctttaaaaaataataataaaaccatttgttttgcctgaagcctttgcttttccagagaacatctgtcaaagcaggccctttcaaaacttgtttggctttgcctgagtgatttatttgttaaagtatttgctgaagggctttcttgttcttcttttcttccttttcttctttcttttaatctttaatggtctcttatgttgttgcagagttgggttgctcaggcttgttgagattctaatttatttaataagatatgcaattatctgcactagtttgtttagttgctgtaaatacttgcccgaatatcttatagtaaaagtaaattatacaattttaccagaggtatatgtgccagatgtttttaaaaaatattcagcaacttaacatgtggaaagcatatttcccctactaattaatcagcagagtttaaattagtcttgacatgaatttggagattatgcattacttacttaaacctcctaacatcttgcccctttctaaaagttgaacataaagactatattgtttgttctaaccatccatccaaatgtgaaatattttatgtaacagtctaaatgtatctgaaaagtaaactttctacttgagttcagtgaagacagcaaagtaggtgaatgagctttttcaaattaatagtgtaaattagcaagtaaatacagatatgctttaaattttaatttgcttagaactttgagctcctactttaaaaacctttagaattttaaatgtgatttatttatagagtacttttttagcccaaaccctaccctagagcagatttaatatcttaataaaattatcaaaagtcaatattatgcatattttttagttaaaagctatataatttgctttttccctgttaatcagtgaggtttgataatgtacctctaaacaacttcaaaaggaaacaaaagccaaaaaaattgttttgtgttgatagctgccatatttagaaatttccttgagaattagttgaggttttaatcatattgctcagtcatattttaatgaaaattacaaggtattaaatatattaagaacaacctgctaacaaatagtctgctctttcttgaaatcattgtttaatcttacttagtcttaagaattggggaatttctatttacaaactgtaaagttcataaatatttcattaaaaaatgcatacttgagcccgtgaataaagtacatatatacaatagtaatttttgttaaaagtgaggtttctttaacgttggtgattattaaatgattaaatgtaatcattagtatttcattgtcttattataaaagtaatttgaatgtgaaaattatattgtgccttttaaaacaacatttgaaaagttgtagatcattgggttgttttcaaggtagtagacatataaatgtaatataagtgtagtagatatatataaaatgtaagtataatatacttattaatattacctacttggtaatctaatttcagtaagtttagaggttactacctttctatactactatgacttatttgtcagataattatgctttttgaaactaaaatactcaagattttagtcaccctcattttacatgaggaaaatttgattttttttaaagtatattacctaaaaggatatttatgcttcagctttataatcatttattagtcaaaatttaaatattgtttttaaatttttcttcataattttttccattttacttacagtttttctgcataatagcagtaatgtaggtgcctatygtgagaaaacctcatcattaaatcaagtagggttcagaaatacagcaagccaaaaatgtcattagtttaaaaacttgtactgttattgtggtaaaaattggaatttttattgccaaatttcacacatttgatggcatcagttcaccatccacttactggatttttgtctagccttgcacacagtagggaggggatattattatgtctgtgaaaaatactactctgttgcatctttatatgttaatcagagtagtaatgtttttatgctgaccaatgcgacatgcatcagtaactcaacctggaaactttcatatatgcatctactttgttaacatttagatcagtgtagatccagttttccttggctgataaccaagcaactcaggtttagtccatgtcacacactgtgctcctcattatgttactctcatctactagactgtggattttcttttttggtttttgttttgttttgttttgagacagagtttcgctcttgtcacttaggctggagtgcaatggtatgatctcagctcactgcaacctccacctcccgggttcaagcgattctcctgcctcagcctccctagtagctgggattacaggtgcccgccaccacacctggccaatttttatatttttagtagagatggagtttcaccatgttggccaggctgggctggaactgctgacctcaggtgatccacctgttgcggcctctccaagtgccggggttacaggcgtgagccactgcatctggtcctttgctttgtttaactggtgatttctgtaaaatacctggcctaaattggccacttaaagsmtggtaatacatatttcttccttctgaataaggtggcaccagtgaatttatttgtaagattactatatattcaggctttgttttaatttgtgtaagtttgataagtttgtattaaaaaaatctgcaagtacattttgagtactttgtaggctgctgccaggtatttataataatgaataagcttgggattctgtcctcagggctgtcttttggtaagtggggatttaatgatttgaaaattaaatctgcttttaaacagtttcctccttcctatggaaattcaaaaatatctgtacagtaagagtgacacactgtggcaagagagtgatacttcagatgctgactgtttttgaaagaaaaaagtcctttgagtagtcacttgagtttttaatgaagagatatgattggggccatattgatgagtttttttcatgtaattattcaggaagtagcaattagctttttaactttcttcctcctgaaaaaaagatttatcattttttgagaatgatttgttttacctaaaattgaaacagcatgtgcagaaatgaaaaagtaaagtttaccccaaattctaccaaagatacccaccatttaaggtgttttgagcatcatctatttatgtatacatttgtatacttcataccatgtaagcaggatcatcttttctgtggttttcagtaacttcagatttactaatagatcccacatttacagggtactttgtatttcttaaatcttttttgggggaaagttaagtaacttacaggattaagtgatttttgtgttcagaaaacagtaacatggtggcagtagagtgttcttacatctttccttaagtgagagcccctctttccccatccccaaattgtttatttactttttgttaatgtttatacttttattatttacacatatacttagattaacaaataattctataggcttgttctccgcccccacaaaaaaaaatctatatccacccttttccccagcctgttgcccatgctgcagataacttctttcatgactttttgtctcattgttctgatcacctccatatctttatgtaatatagttataatgcactttttgtcatttgtaggtcttatctatcaacttaatattatagacaataggatttagttctcactgtctacctcacttcacatgcccattttctgttccccagttctgttaatatatgttaatatggtaattttgaagatcatttttagtgtctacattgttatgactatgcaaatgcctttcatagatgaaccatgtagtgtactacatgatttttatttttttctcattttttttcctagttgttatttgtctcggtttttctctttattttcctatatacttgtcattaggtcaactctaaagtcttttccagttgcctaaatttcccrtcagattttttttttttcttttccttctttcagacagtcttgccctgtcacccaggctggagtgcagtgatgcgatctcagctcactgcaatctctgcctcccacgtataagcgattctcctgcctcaccctcctgagtagttgggattacaggcgtctaccaccacacccggttaatttttgtatttttagcagagacggagtttcatgatgttggccgggctggtcttgaactcctgacctcaagtgatccgctcacctccacctcccagagtgctgggattacctgggcctgtcagattttagacacctctggtaatctgtcagtttcatctcttttagaaaatcaggaatcttatcacctgctctgatttggaagtggccttagcatttcattttcctgtcatcctggagaatccttttgtctctctcattttgagtctcttgtttctgaattcagtgcatgccactttttttattccattggttttgtaagtgcatactaggtgatagatgaataacatagtgaagctagatgacctgattttgaattcttgtctgtcattttctaacagcttacatatctgtaagcaaatatctgtaagtggggtgtaattatagtgcctgcctatgggaaagtctaaaaattaaatgccatcagttgcctggctctttaaaaacattagctgcagatattcacaataatttgcattgcaagtgttgtgtatattattaatgaaatgccaagaaactatttgttgttttctgtttgtccactaagttctagccatattgaatcaaactttctaaaatcaaactattcttctttttttgttgttgttaaatatccatgcccaccctatagctttttaaatcagatttatggctgggcttatgggcacattacccacaatatattaagactaactgttttagcctcccttgtgatcgtttgacaaagttcattccaatgggatgtgagcagtggtatgttacaacttttggaaagtgttgtttcttcctgccggtagaagggtcaatatgatggtggatgttgaggttattgaagcaacagagttagaagaatccttaattttggaagcaacataccaaatctgaatcagttcctcagatttttatttacatgagagattaataactttatttaaacctgtgatatttgggtttactgtcacagcagaatctaatcacagtaaattcattcaattaaactctttttcctttaaaaaactgtctactgctgttttacattcgtggttagtggattgttattagatagatctaaattctaaatcagcagcagtcattttgatcatctctaaagttggtttacctgtgtgggaggggagaggtagggagtgttaaggggtcctaaggagttgttctgaaatttcaacttcaaaataaccaaaaagtgaagttcagttaaaaatctcataaccaacccttaactgttaaagcgtcctgaagtaagaatgaccttgtactccccttcattgcctcccccattttgttattacaagaaatttaagcacacagtgttataatgaacccccatgtgtttcttccatactcttgtccacttccttccatcatattattttgaagcacatctcagacatcattttatccttataattttaaatgtgtatctcctgaagaaaccataacattcttatatctaataaaaatcatcaataatgtcttaatatcaaaatattcagagttcaaatttccagttgtctcataaatgccatagtgtttgttcatttgttttatagtttgttagtttgaattaagatccaagtaaggtccacttattaagattgcttgataggtcttttaatstgtagattcctcatccctctctctctcccccttstgtttttccagtttttggtaaagaaactgggtcatttgttctataactctcctgtctaaacttttctgattatacctccccagtgtagtttaacatgttccactggactagtactttctgtaaaacgatcattagaaggttaaatgcacccaccaatattattacatagttagtgatgtgttctttcatcagaagacagtaatatctgattgttactttttgtaacattagcatctgttgatgctacatgtctggatccataattcattagccattgcaaaattaatactttttattttatttttttttattttgagacagtctctygctctgtcactcaggctggagtgcagtttcgtgatcttggctcactgcaacctctgcctcctgggttcaagaaattcttgtgcctcagcctcctgaatagctgggattacaggcgtgcaccaccacacccagttaatttttgtatttttagtagagacagggttccactgtgttggacttgaactcctggggcctcaagtgatccacctgcctcggccccaaaagtgctgagattacaggcgtgagccaccatgctggcctgcaaaaataatattttaatactgttattgctgcttgttgaggaagtatctataaaagaacttcttacatctaccactctaaatgttgccgttcatatacaaaattcagaataaatgtttattctttcctttaattttccagctctcaaagtgattggtcacccccaccttttaaccctttcttgtggcttccaaatgaccataattaatttatgctctcaaaaaataagtaaaaggaagaaaatttttttaataaataaaaagacatcaaacttaaatgtgtaaattggtacagcttaagtgaatttgtgatttatgtctgctgtaattttttttatattaggaagtttcagctatgaaggaaattttacacttcaaaaagctgttcagtggcagaaaatatgataatgacagattagatcacaatatgctaattttttcagagttacctctcgtgtaacacagcttttgaaaatatttgaatagtactatattcttttttaagtgaaaaaaaaaaagaaacctgtaattgctttataaagattcagtgtgcttcagcttcactttgaatatatccacttagtataatctaacattggttttcttaataatggttgtgtgacttacatgttargaatcttcacagtacacattttactttttatctgtttctcagaaaatattgactgttatttatcactaaactcataatatgcttaggcactaaccttcaacaatacagtaacatctttagatttctaccgaattgtgaatatgttattagatgaatatttacctctccatgtgtttctggcacatatcttcaaagcataactattatgaataaaattatacatttataaccactgtgaatagttacgtatttaattactcagaactgtccatgagaaatactatagaaattatttaccatgtggtgtattttatataaattcattataattggtgaaagattaagtttgtttgtttgtttttgagacggggtctcactctatcacccaggctggaatgcagtggcgtcttggctcactgcaacctctgactcccgggctcaagccatcgtcccacctcagcctcctgagtagctgggaccacaggcacgtgccaccacaccggctaattttttgtatttttggtagagatggagttctgccatgttgcccaggcgggtcttgaaatcctaggctcaaacartgctcttgccttggcctcccaacatgctgggattattggtgtgagccaccacaaccggccagtttattgttttttggcagttaaaacttaacacttcactttttgaaattatttcttccttggcttctctgataccacatcctacatttcttcttgctctgtctttttaaatgcttctaaatgttggtgttcttcaaggttttgctctcagtcttytaatctccaatttcatgtgcttttccttakgtaatctcatcagcatctttgactttgatggtcacctgtgtggcatctttttctccagcttacatctcttccctaagatacagatctttatttaactaaccactggctctttctcgaaaatttggtagctgccccaaatttaatatatccagaaacagacttcctttgccatcttggtaaattttaatctcaatagatggtaccactaatctgttagcattgaagccagaagtctgggagtcaggcttaactcttcattcatctccccacacttaatgggttctacctcctgaagatcgtgaatcttatcagtttctcygtgtccaacacagaccactattgtctctcaactcaaagccttcttaatagttttttgctctcaagccttcttcacattactctcatagagttctttctaaacaggaactctctaaaacccttcaatagctttttaatgcccataagttcagtttagaacgcattaaaatgattcatacccttactgccttcctgttcagacttgtctgttgcttctctaggttctgacatgtgaatttatctttccattaaaacagttcttttattatttctggcttcttactccataaggaattactaggtcttagattttattagtctttttgtgatgagtgcccatgaacttttgttgtttcccttgtgtataccagaggttatgcttgaaattgttacttgtgtttcccaatgttcgtagaccacaaggacagggctgtgtctatctcccagataattcaacagttacagtaatttctgttaaaaaaaaaaaaaaaaaagaaagaaaagaaatggtagttggttacagaaaaaaaaaagtgtattttgaacttttaaggtcttaaattattttatttagggaggtactagttatacagtgaaaagggcatggaatttttctcttacccagctttgtgatgttggaaattgaaccttagttttttcatctagatttggtaggctagtcttggtagttgttacgaggatttaatgagttactgaataaaaggtatctaatagttactagcacataaatggcacctaatgtatgttcattccttatttcctgattaatttgttgggtttctctcacatttcaatgtattacacacacatactacaatcagcatgagattggtttatggcctataatttttggttgcatttaaaaataaaagtattttagctaaaagttctaatagaacctccttaagacactgattgttatctatactgctgcttatgaatagatctttcccctgaaaagcacaaagtagggggagtaggagatcatattgtgattatgaattttgtccctgtgaaaaatatagagtagtatgcaaataaacttagtatttaacagtgccatttttgaagtgctaagaatagattggatattttgtatatttccaagttattctaggataaatatggaaaatgtatattgctataaactgtattttatttarttatcttagtatatccaaaaagcacttaattactattgcttgagctttttgctgaacttagaaatactgtgatcacagtgattacttagagttgttaatgtgattcttgtcataacttggaaaaatatgctaaataggatgacatgaataaaaatcgtgtggtattttcctaatagatggttttattttagtttcctagatttagttctggcttatgggattttcatttttgccccaagtatttcaaatagcttttggactttctcatcctttccactaaaaatattttttgtcatgttttatagaatatatattttcagctatctatctgaaaaattctagttctgatatagcttttacatatgaagtattcagtgcctccttttgaaaaataaatacaactatattttgaaagaaattctgtgagttttcacagagaaccatttatagtattatattgaaattggtttttaaaaaccttatctaattattgaattggtcatagttaacttttgattcatgtgatatctctccgtgtgatagtctgtttagaagtaaagtatcaagtgacaaataattagagttttgaaaacttgaggggctatactytgatgatagatgtggaaaaatatcttttaagattaatcttaatatgtaatagtcataggaaatgacaagtagaggtgagagatcagatttgcagtgactacatttgatactatyacctttggtattagggaaaagtgaatttaagattttgaaatgtttttaaaaacttgataggagatagtmacaattacttgtgaatgtttctcttataagagaatagctgccagggtcaaagtaacaagtttgggattatgcattttttgaggtaagatatattttactttmacataatgagtttgatgtgtgacagtagaatataaaagtgamacatgtagcarctcaaatataaacatgaagaatcaggttctcttagtagttgactataagctcattaagtaaaagtttaaattagcaaacttgttttcctcataaagaaatcaggattgcctttctctttcctagatctgaactattcarttatttttctttttatgctrtagttcrcaaagatgtccaaaactaatggcttatcagaagatttgatatggcactgtaaaacactgatccaagaaagagatgtagttataaggcttatgaacaaatgtgaagacatttcaaataaattgaccaaacaagttaccatgcttactggaaatggaggtggatggaacatagaacaaccttccattctaaaccaraggtaatctttgttgaatatatttattcgtattttatctcaattatacaaaatatctgaatttatttctgtatcgtgcctagaaagtgatatggcaactagtggtaggagagaacccccaggttttctgtaatggcacataagtggactatgaactgtttttcattgatttcccccacccccaagtagggtattttattctatcatatcattataaattaaagggggggatggtatgatactatatgaccagtgtcttttttgcctcataacaggtaattgtttatataatcagagaaactgaaaaagtggttttagttactcctatacacaaatttgatatcctaaaaaaagtcagctgcttaattgcatcagcgtaaaacctcctttcctagcccattttctttttaatcataaataaaatgaaatgatatcccatactgtgatgaaatgttttaaatgataaggccagctttttaaatctccttttggggtagaaatacatcagcaagggaaaggacagatactttgattaaatagatcatataagtctacatatttccccaatttgctactttcaataaaatacttgtcagaattcatgcaaaaaaaaaatactgtctagtggccagtacatattaaagtggtttttgtaattgtgatcgcccacattttgcatgttgttggcagattggggtgggggaaattgtgttgaacttcctttaaaagtttgtatatttttaagtagtttggagactcagaactgttcagaatacttccctttttaaaaaaaataatataaaactgttaatagtatgatatttatagtggcaaaaccatggaaacaaatggagttcctaaaattagggaataattgaaatgaattatggtatatccatactttgcaatgttacacaactttcaaaatgagttacatctgttcaaagtatttctgataggttaagattagcagtaggatctcattaaaattaattgccttagttgctgattttatttacttctgatatttttctaagttaatgatcaaagcatatttgctgatcattggttaataatttaaaatcaaggtatggaaaaaaaaacaagatgattactggcctttaatagtaagctacaatcttttctgtgcccttctagggtgmtatgggatggtgtagggaaacgtgatgcagttcccacaaagaagctcttttctctgttgcatagaaagaactatatcagcaaatttcatctcctaaaagtgtagttggagctgctgcttcttgttctccagcattggatatggggagttcttcactctacaagacttacccagttgagtctactttatcataatttggatttttaaaaatcaagtgctttattgcatcactttaaaaatttctctctcaaaaccacattcacaaagtcctgttacttgtaaatagtttgatcaggtaataaactatcctttccattagactgaggattttttaaatgaaatacttaatagatgagaaaaatagttgttgttgttgtttttttaagwgcttgttggatcttatccaaagtacaacttctaaaacctatatggatagtctctttaaagtttatttaagtgcacttttaggggttagaatttgttgtcttgatttttgttcttcagccaaggtaagagttgcataagcaatttttacttggtgtactggccaggcattgtgggtacttagtatgtagacatttaaagttgtctccttgctttagtaaaggatttattagcacagaggaaaatattagactatcctgatgaataacctatcatgcttgcatttttctctaaacagaacaagttcttcatgacgaagtttactttgctacaaactgttgcaaatttatgtgaattgtaggagaagaaagtttgccttttagaaatacaaatattccggaattccttgtgaaaaatgacatctttatagggaaaagctaaagttttcatatgtacttcaaaaccattactttcataatctttattttaaaatgtcaaaatttaaattgtttaaaatataatacagtgaggaaaaagaaaataaatccttagtatttctcctgttttattcttactatagatgtagccatctctaaagctttagttaattaatctataatttatcagccttaaactaaaaagatttctcacatgttcagaatacaatatatttaatcaagtgtgtcttgccttttgagctaaatctgccaaggttcttctgatcttgttcatcctgaacttgacagcatggttcctaccctgttcttacacaggagctctgagaccctttgtcagtgatgtgaacgcaaattaacactgcagatgtggtttcactaactcaaaagtagtaggatgtaaatgtttagtttgaacatttctgtcactacagactaatattgtggtagtatttgcagcagccatgtcatacttacgggacataaacttttggtcggacagcatccgtaacctgttttctatgaactgctttaaacaagtctctctagccctgtatttctgtattttaaactcaaatttatcacatcacatgtacccctgttgtttctattttacgcctttctcacctttgaaaataattttgaaactagtttctctggcagatttaaacccaattgaattttcagactgtggagaaatcatagtaactctggagggaattttttttttcccctaacaaaacaataacttcaaaatagcctgttgcctcattttctttcattatctcagaaaatctttaaatcacttttttccttagtgagagataaaaaatcttcagttcagagatattttaatactctgttgagaagaaagcacttaacttattcagaagacctgagcaaatccccatgttcttaacagtaaattggtggttcagatatatatttggtcatgaaaattcttagaaaactgtgaagcgtcaaaatagatgggaaatatgattatatagcatctaaatattagaaccaactagaaaagaatataggtatcctatttttaaatgttgttataataaatgggttcagagtctatcaaaattgcattttctttggtccttttacatgctgagaaaggatctgtaattggcagcagttccgtgatagtaagcaacaaagctacttgtaatttagacaaatctaacagaacagcaaacatatatacacattaatactttatatttttataacaaatatttcaatgtaataaaaccatttcatgtsctgatcaaaacaccttaccataatttgtcattttgaataaagcaattttatttaaattttaaaaatctgtgtagttttttaaatttcctcatcactttttaaaatttgatgttatagtgagtattttgacagttaaatagactcttttcccaatgtgtgttggtgatgaagaatttcagtaatttttgtttattaagaatatttcgtggctatttgtgataggttgtatgttgggatggcatgtgggtccttggctgcatttataagtgatgtatgcctaccttatcaagtttcattagtcgtaaattgtgagccttatgtgaataggatgactaaagaattgggaaggatgcataaaaataatggaaaactcagtgtgttgaccgtaggatgggtgggtcaggatgaaagataattttttcatttctactatttactggttaagtgctgagctctggatcacacctggattggatactgacactaccattgcagatacagatttggttagctacatgaccttgggcaagttacttaacttctgtgagccgcagtgaacttctcatctgtaaaatgcagataattaatatttcctatttttaatatggattaaatgaaataataatgtatattaagcccatagcatagtctgaaatatggtaaatattccagttttagcatttactctcaccgttatagtagaaataattgttttggatctggaaattaaaatgtctatgataacatgttccatttgttactacttttatagtagtagcatagaaattatattgattgggaaagcaaagaccttttttaaaattcagcaaaagaattgtaaagacagaattagaaaattataaagacagaattagaaaagaattataaaaggcagaattagaaatactgctttttctcctacctatacttttagttgtattaaatgggaaatgttttataagttgcataccccacagttaaaacatagattctgatttaagatggacatcattcaactacctgttcttcactcagttctaattatgtcttgatttcagagtttgatccttcaacaatttattatactatagctatgtccagacccttccctgtgtgcaaacaggatatatgcaagaggagattaaggggacaggataaaagctggagaatgggaggcatggccttgtcctatgttttcacattaatgtaaggtgttttagtgaatatgagaataggctttggagtgagatcgacatcctgaattaaaatcttagtcttaacactttgtagctatgcaacctcaggcaaattaagttttttttttttttttatctgttaaagtgatgatagtaactactttatgggatttttaaagggttaaatgaggtgatgtttgaaaaatgatatctgtgcctatgtataatagatgttcaataagtgataactgttaatagtttttaaccatttgaactattgttttcattctgttgttgttgttgttgtaattgagacagggtctggctctgtcacccaggctgaagtgcaatggcatgatctcagctcactataacttctgcctcccaggctcaggtgatccttccacctcagtctcctgagtagctgggactacaagcatacgtcaccatgcctggctaattttttttgtatttttggtagagatagcgttttgtcaatgttgcccaggctggtcgcgaactcctgagctcaagcaatctgcccagcacagccttgcaaagtgctgggattacgggcatgagccactgttttcattccttataactctgccatattactttccaaacaattcattctcagggattagtctgtttatatgtttccaaattaaataaggtttttgacacttgaatgctactttctactcactgatgttcactgtcttttagcatttgctaaaacatcagtgaacatcagtgagtagamagtagcatgtaagtgtcaaaacaaataattttgctaaacatgtgctgtgtacatttgtacgtagtatgcacataatacacacataaatgcgtgcttcagaattatacataccactgatattaggagtgattgacacacattcagaaagtatttattaaacctacctggccaaagtagcaaattatgtttgtgtttttttgtcctaatacttttaagttctttaatgtgctaaaaatcaaatcaacacaattcaattttctattatagatactagcttagtattaatattatcatagttaatattctaatcatttatggaattaatttggaggtactatattatgaccaaatatggaaatgcttgattcttactgccagaagaaatagaatagagaataaagtttgagaagatctgaaaaaycatttatgtcttgggttcattttttttaagtaggtgtacatagcatctaacagttaaaaggtaagattagacctaggcattttagtttttatgtgcattgtaataactaatagaaaactgatagaaatatagatgtgtaatatttggtaactctctctttaccagtttgtcactcaagccctatcagaaggttggtttgaattggctggcattggtacataaacatggacttaatggcattttggcagatgaaatggtaagtgtactttatttctaagatttgttgttgaaagtgtcattaaaaggtattcttgctgtcatttaaaacatgaaacttttttttgctactgtagttaactactgccacctcagtaccttatattttatctcatctttgtttttgatagagttagttctaccctcctcactcctccccaagatgaagatagatttattgtctttctgattatcagattagtaaatacatgttgcaaacataaaaatacaaattaaaaaatcgaaatcaaagtcacctgtaattctaccacttaaacaagaactagtttggtgtcttcttttctagatactaccttctgcagatgttgtgtatgtacatgtgtacgtacatacatatatgtgctttttctacagctgcctttaaaattgtaacttagatccctgtccttgtcagtaaacaaatccacatatatatcagcaacatcatttcagctattttatttttattagmggtctctccgggtctctgttctttctcaaatcacattgccttaaagctgagttcacaaagtttgttatagccagtagtccaggtgttgtcatatggaaacttgacctttaatctaacatctctattcctccagctatacttttttgaagtgtatatttaaaatgagtcatgttcagcaaagaaaatgttacactgtgtgttggattcctaaaataaaagttaacacagataatgatatttgttccctcattagcctctaagaaagtaatctttagcattgtaagatattttcccatatatatttcatactgtcattaaaacacagatactgtttatctaatagaaaagtgaataatattcacaggatttcaaaatacttacagaaattaccgaatatatgtcatttcagttgtgtgactgcacttggaaatcagacctgggtttggggtccccagctttgcctttcaggagctatctgatcctttccagttgacctaatctctcaaaactaataataaaatgtagatagtctttatatcataagattgcatttgctatcaaatgaggtatatattatgtgaaactatttttgtaacctgtaaagcgcaacacaatatttataagttgatggcttagtcagctagcattgccataacaaaataccacagaccaagtggcttaaacaacagaaatttgttcttcacaattctggaggtggacagtccaagatgagtgtatcggtagcttgcgtttctcctgagtcctctctttgacttgaagacagccactttcttactctgtccttatgtggccttttctgtgtatgtacacatgcctgatatttcttcttacaaggacagtcatattgggttcaggccccacacttatgaactcatttagccttaatttcctcctgaaaagccttgtctctaaatacaatggcatttgaggttacgactccaacgtatgtattgtcagtgggaaggaggtggacacaattcagtccacaacagttgatagcattcagttcccctgaggatctgtatctcctaagtaacttttttaaaccagtattttaatgatgtctaatttagttgcagtaaaatgtacaaatatacagcttagtgactttttacatatatgtacacccatgtgactactacccagagaagcttttccatcatcccagaaagtttctcatgcttttttccagttactgctaccactattcttatacctatcctcgtggatttttttctggttatgtagtatatgcagtatactctatactatttgtttttggttcatttggtgcaacataatgttattgagatctatctgtgttcttatatgtatcagtaatttttttgtttctgtttttgtttttttaaattgccatgtggtatggtagtccgtggtataaatacagtgcaatttgttgatcttcttctgttggatatgaatatttaggttatttcttttcttttcttttttctttctttcctttttctttttaagcaggtgcttgctctgtcacccaggctggagtgcagcggcgcactctcagctcactgcagcctcgacctcttgagcttaggcagtccacccacctcagccctcccgagtatctgggatcacagacatgcgccaccatgcctggctaattttgtatttttgtagagatggagttttgccatgttgcccgggcttgtctcaaactcctgggctcaagtgatccacccacctcagcgtccccaagttctgggattacaggcatgcaccatggcacccaacctatttaggttatttccagtgtttggctattaagataaaactatgaacattcttacccaagtccttttgccaacataagcgctcatatctcatgattatattcttaagggtagaattgctgggatagattaggcatatgtttcctccatttagtcatgggacattgcccttaaaccattcagtggatattaaacattcactgtgtctaagcaataaccaaaattatatcctttccatgcaatgcaaaaagtcttccrtattaatgtgtattgtatatgaactagcaatgaagatctrtccactgctcagtaaagtaagttatagcatcatttggagattataatcaattctgtcatttgagaactaagaacatagtagaaattcctttagagttgcattctgggaaatcaaaagtgaatacagcacagaattactgctttttcttctgtatttttatgtatttattttttgtttgttttaaaatgttatatattgtcttttaaactttttagggcctaggaaaaactattcaagccattgcatttctggcatacctctatcaggagggtaataatggtcctcatttgatcgktgttccagcttcaactataggtttgtaatactggagacaactgtatttaactttatcatgttttatataggtagaagagagtgtgtgtaagggtgtgtgtcggaggggtgttgtggtttcttagtttgtagagatgaatattaattttatggtctctttatacttttctcctttgtttatatatgtgtgtttgattatattggcagtcttttaaaaagaactcaaatgtaagtcagttttaaaattttagaccaaggacgatttatgttggtttcataatacttttagttacttttaaaagtgactaagagaaaatgagtacttttaaatgtagaattaaacagatacgtaattaattcctacacacataactgttccattctttctcaattcgttggatgtagaagttagaataagagaatatttgtacatgtgaatgtaacaaagaaaacccccttctctttaaattggaggttaataatcaactgtaaatataatatttggtcatctgcccttcattttgatgcctcacaaaacctcaagatcattttacataggtttcataaggagtaatattgtaaagggtctgtgataaaaacaatcgccatggtatttatattttaatttttaatttttatttattttttttaagacagtctcgctgtgtcacccaggctggagtgtggtggctcaatcttggctcaccgcaacctccgcctcccaggttctcgtgcctcagcctcccgagtagctgggactacaggcgcccgccaccatgcctggctaatttttgtatttttagtggagatggggtttcaccatgttggccaggctggtatcaaactcctgacctcaggtgatccacccgcctcagcttcccaaagtgttgggattacaggcatgagccaccttgctgggccagtatttactttttataaaagactgatttctgagtagcacttgtcaaagtttagtgttaatttaaccatgtgaacataccctattgtagcagatgcaaataatgtctcttctgttccatagataactggttaagggaagttaatttatggtgccctactttgaaggtcctctgttactatggtaagaatatgtcattctgcttttaactttggaaattaaaaataaagtacagcacaataaatagtcatgtgtttaktgtttttaaattctaggttctcaagaagaacgtaaacaaattagatttmacattcatagtagatatgaagattacaatgtaattgtgaccacgtaagtattgagaaatttggggaggatggatatttatgcagcccccaaatttaaaaaagaaattgtagtagtactatgtaggaaagtttatgctgttaactgtgatacgaaagtaatagaatgactaatgttgaggattcaggcattttttagtttggtgtgtaatacccatataggaggtttttgttagtgaatcacctcattaatggtgactataaaaaggttttgcctagttattgaaaaaagtcgtcttgtaatagtaatttctcagttaagcttaaagtaaaatttgagatatcccaccaaaattatttatatttttaacttacaaataagtatctgtaataaatacaatgaaatttcattttctcaatgaaaaatttgagttagggcagaaataaaaatgaaaaataatactaataatactacttggtaataattgatgtaaatatcttgcacagaacttaatgctcttgtgttacattagktgatttatttaaagttctattttaactgtagttattatttctctctactggcttcttgtgtaggagtctgtcctttaaaaattcatgcggaattttattttttcttaataaaacaggctccatatgcagtctcaagctgctagctattaactattatttcttggatctaatctgctagtttaataaaatattaagttttaaagagaaacatgttttagcttcacgttcttttttgtgcttattaaaatataacacttcatggagcagattacttacaagttatacccaaattgacctcctcctgggtatgtagaagttgtccgattgtaacattaacattttcttttttttttttttttttgagacggagtctcactctgtcccccaggctagagtgcagtggcgcgatctcagcttactgcaacctcttgcctcccgggttcacgccattctcctgcctcagcctcctgaatagctgggactacaggcgcccaccaccacacccagctaattttttatatttttagtagagacagggtttcaccgtgttagccaggatggtctcgatcttctgacctcgtgatccgcccgcctcggcctccaaaagtgctgggattacaggtgtgagccaccgctcccagccttttaacattttctttcaattatgtattgcagctttcatagcttggttacagtgtacatcaataattattaaatacaagtacgtcagtatttatttgagtatcacccgtgtctagtgctgtgctttaagtactggctgttagaaatgtgtaaataaaaaatgattttataagacattaaatttcactagactccaagctcttaaaggtataaccttagagatgttttttcttttggtgacagatataactgtgcgatcagcagttctgatgaycgtagtctgtttcgacggctgaaacttaattacgcaatttttgatgagggccatatgctgaagaatatgggctccattcgctaccagcaccttatgacaattaatgtaagagaatgtttgtaaagttttccaaatwactgtaaartttagattacgtaatttaatatatgtagtatttattagcagaatctgtattatgtagtttaatatatgtagtattctgtgttagcaagttttttctgtaaaagggaagatagtaaatatttcacacwttatggactagatggcctctgtcacgtattctttgattttgttttttaacaaccctttaaaaaattattaggtcataagccataatttacctgttctatatgttaaactatttataaataatctttcatcatctcataaaggtgatacgaggacacaagttacctacttataaaagaagaccaatggttttcgtattcattgctgttgataatagcggacgtcaattatttaaattactatatcatttatcacagaatgttaaattattaataatggttttaatttatctctcctcccttcacctttcactggggaggatagacatgaaaggagtggctctttaagaaaaagctaatataaattttaccttcattcacaggcaaataaccgtttgctgctcacaggcacacctgtacagaacaatctgttagaactcatgtcgctgttgaattttgttatgccacacatgtttagtagtagcaccagtgaaatacgaagaatgttttcctctaagacagtaagcataaatgcatattttctcccaaatatgttatttgtgttttatctgggccattcttctgttaggtctcttttgttgttttcatagtgcatatgctctatgaagtaactttaagtaggtgataactctatatttggattggyttggaaaccagccaaaatataatgggaaagaaaatagcaatttccctaatcaatggccagaagtcttggttaatatcctaattttctgaaggatgacgattttaaattgatgaagagctcagatatatagtatgtgcggaaagtttgatcattacatcatctgtatcaaaattggctacgtaaattagtaacatttctttatgggtaaactataaaactagacaaagctagaatatccagaaaatgcctatgctgagaaatatattctgaaataaaagttcataaaaccaaagtcacaactaaaagcgacagtaaagaaatcctcttcacaagaaaagttttgttacttctttattgtttaggaaaagtatagtcttcaagaactcccagttttttcaataccgcagtgtttacactgattcttggctctcttccacatcactaatcttttgcaagaattttctgtgatactcgtccactgcaaattaactgccttttaaacatttactaatttgaattccctcccacttaatgtacagtgttttaaatggcctagcagattttatgaaccattttctatcttcagttcataatatatggaggactccttcacatcctakaataaaattctacttcttaattctccagagtcaccagttctgactaagcactattccccatttttagaccaagtgatttgcatcagtctgcactakcttycttttggggccattttccacaaagaaataaaggattttctaccccccacgctcctccttacccacacttagacacatttttcaatgagagttatctakgtaatcgatacatgactcatcagttgatgacttctgaacacccatctggtacagttcaaattgattacttcagtagagaacatgattacgtatcataaaacttcaaaatacatatggagcttcaagaagtacatggcagcccagaattcagatgtgaagtgccatctagaatgaatcaagtttctgcagaaaataactcagactstaatgagggagatttttatgttgtgtaataatactgttattgcaataatttaagtgaataattcctaaaaggatatgtttttattttgctcagaaatcagcagatgagcaaagcatatatgaaaaggagagaatagcacatgcaaaacaaattataaagccatttattctcagaagagtaaaagaagaggtaatgcatatctacatgttttttatttttattgtttttaaaacttaggtttttctctttactagaatgattatcttaaactgttttttctgtctcaggttctcaagcagttaccccccaagaaagatcgaattgagttgtgtgcaatgtcggagaagcaggagcaactctatttgggtcttttcaacagattgaaaaaatctatcaataayttgggtataatctgatttttactcttttatgtgaaaaagaatcttgtactggggatgcattttgtttagtcatataatgggatttgtgcattttaaaaaattatctggaatttgaggaaataattttaaaacttagttgatatatttcaacagttatccgcttggttttattttttactgtgttctctttgagtcacagaaaaaaacacagaaatgtgcaatgtcatgatgcagttgaggaaaatggccaatcatcctttattacatcgccaatattacacagctgaaaaactcaaggaaatgtctcagcttatgctaaaggtaaggatttcatattatgttaacactaagctttaataagaggttaagttgttaggctataagattggtgaacccaatgggcatactaaacctttaactacatatttaagaaaaacttttttttttcagaccaggtctggttctgttgccaaggcaggcagtctgggctcactgcaacttctgcctcctaggcttaagccatcctcctgcgttggcctgctgaatagctgggactacaggcacgcaccaccatgcccggctaatttttttgtacggatggggttttgccatgttgcccaggctggtcttgaactcctgagctcaagcgattcgcccgccttggcctcccaaagtgctggaattacaggcatcagtcactgcactgaaacacgaaaaacacattttagactaagttcaaaatgatctgggggacataaaaacaaagaaggactgataacctacattataagtcagcaaactatggccttacggcagtgactatttttataaataaggttttactataacacagtcatgcctgtttttgttttctgggactgctttctcactacaggggcagagttgagtacttgccttacaggtcattttgcctacaaagcctaaaatatgatctggccctttacaggaacagtttgctaactcctagtctagacttccataatgcacttctttttcattttatttctttataattttagcaattactctttatttttgcctctttctcctttaacattttaaccttatttatccttactgatctttggttgaaagcaacccattttcttccttttctttacttttttttttgagatagacttttgctcttgtcgcccaggctggagtgcgayrgcatgatctctgctcactgcaccctccgcctcccaggttcaagtgattgtcctgcctcagcatcctgagtagctgggattacaggcacctaccactacgcccagctaatttttgtatttttagtagagatggggtttcaccacgttggccaggctggtctcgaactcctgaccttaggtgatttacccacctcggcttcccaaagtgctgggattataggcgtgagccactgcacctgaccaacccatttctttttaaatttttttttattattttaaacttatggagaatttcaaacatttataaaagtagaattgcataatgaaactgcccatatgttacttcacccctttgaaagttaccatttgataataacaccacccttgtttcatctataccccagacttctccccagggttattttgaaccaagttctagatgttatttcatctgtaaatattttagtatgttatctctcaaacagtaaggacttctccccctttattatacctaaaagattaatactaattttccttgataagtctgttacactaaaaggttctatgatttagatattttatcaggtataaacagttttattaaacttttctcatcrtattattaattatttttattttgaagtatactgtgttttgttttgttttaaggaacctacacattgtgaggctaaccctgacctgatctttgaagatatggaagttatgacagacttcgaactacatgtactttgtaaacagtaccgacacattaataactttcagttagacatggacttgattttagattctggaaaatttcgagttttaggatgcatcttgtctgaattgaaacagaaggtattaaaaaagaatggcgtttcttttgtattttctcaattactttaacttcttaaagcaattctggcacactgacttgcttgaattagcctatgtctgttctgcattcttccagaacttagtgttttgaacattttcttgacgtattttcttgattacctcctttcctctgttgaacctcagacaaaaacaatagaaagttagtagactgtatctgtattgatgttttaaaaaaatcttaattgtcattatttcataggtgacaatctgtatgtgtgcttcaaaattagtttttaaagacactatttgttagttatttaagtaatgctgccgtttatgtgtgaaatagcctaaatttgtaaaatcacagtccagataatacatacataagcagttgtccacattttccgacgtttttcttatgaaaaggaagtaatttaactgttcttaaaatcaaaactgagagctagcttttagccctgaagttaaggcagtttattcatatataggctgcaataagacatacgtcttcggtattactgatttgtattaaagaagcartttatcacagagaattttctgcaaatttatcaacatgatataagtaacacttctaactgtttaaacctgtcaaggctttgagtagtaaaacgattttttctatttctaattcatgtatgtattttcacagggtgatagagttgtgttatttagccaatttaccatgatgctggatatcttagaggttctattaaaacatcatcagcataggtacctcagattagatggaaagactcagatttctgaaaggttggtataattcatgttagttacaaaaaaataactcatttattattattgttaggattttaattgtctaacaaacaattgatagtattttgttgtttttatgtttgattacttcaaatcattaccttaaaataagagtaatttcaatggtcaggcatggtggctcacgcctgtaatcccaacactttgggaggctgatgcgggcggattggttgggctcaggagttcaagactaccctggacaacatgacaaaaccctgtctctactaaaaacaccaatagcaacaacaacaacaacaaaaatagccannnnnnnnnnnnnnnnnnnntcgcacacccattttttgttttatagtagaggctgggtttgcgcatgctgcacagggtggtctagatcttgagagctgaggcaatccgcgtgccggggcctcccaaagtggtgggattacgggtgtgaccccccacgtctgcccgtgttactgtgttatataagagcacatgtgattgcacagagcaacacaaagcgcacatagtaaaaagccccccatcccccatctccctataggcacctcagtttagttttgatttttaatgaacacacacacactgtggagttttctcagtgttgcaatttggcctccgtggaaagctgtctctgagttggagagtgcagggagttcattgaaaaatgctttggggatccccctgtgtgaaatattcttgcaaaagtgtgctgatctgacacaaaagcacttttatattcacacagtactcagtcatcgatgggggtttcctcctccacacacactttgactttgtagacagcaggtccactatcttttgagggagaacgcagctgggatgggatctgtaagttccccgcagtcagaaggtcttagtgcctcagtcgtgaaatggggaatgaatagcacatgtatcacagcatctactacgagtcagcagcattttttttttttttgagacggagtctcgctctgtctgcccaggctggagtgcagtggcgcgatctcggctcactgcaagctccgcctcctgggttcacgccattctgcctcagcctcccgagtagctgggactacaggcgcctgctaccacgcccggctaattttttgtatttttagtagagacggggtttcaccgtgttagccaggatggtctcgatctcctgacctcgtgatccgcccgcctcggcctcccaaagtgctgggattacaggcgtgagccaccgcgcccggcgcaaatacgttttgaaacagctattagaattgtattttttatggttttcacctttaaatttttttcaaagtctaaaacaccttatctttcatcaagattgttttaaaatctttcacattttaagggtaattaaagtttttttaattcccaaaggttgtaaagattgagcttagtaaagaagggattgtcttaataaggacggaattgtgtagtatgtttaaattgcattatatattttgatttattttttttctgttggccagagtggttttttcccacccgcattagactaaaggtaaaagtaatgttttttttttttaaagaagagaatccacttacacaatttgatcatgaagtccttgattcatcagaaatgttgtctgccagtaggagccgatatacttctgagaaggttaaagattgaaaagccatacacagaatttagctaagccacaagtttaaaaaggacaaaatagtcatttaggaattaattgaatctgaatagttgaattgaagtaagagttggtaggggtagcaatatcgtagaaaagaagttggggaattgaggaggctcttcagtgatatagccagaggagaaataactgcaatactaagagatgtacatacatcttcaggtttctttttcatgtgataatgattgttttccattttaattacattatacaactttttagtgagatttaacctaatttgtttatcttacaggattcatctaattgatgagtttaataccgatatggatatctttgtgtttctgctatcaacaaaagctggtggattaggaataaatctgacttcagcaaatgttgttatacttcacgatattgactgtaatccttataatgacaaacaagcagaagatagatgccatagagtaggccagactaagtaagtgtttttagttggaatgtatttttaattcagtgccactttaatttgtgtagaccattagaatatagtgttggatgtcctgccttagtttttgttttttcggcaaagcatggctactgatgtattttataccagcagtgttgaacatcaactgcactacgtaacccttccattttctagtaattatccacccacattccaaatagttctgcagttcatgaagtattaacaattgacggccgggcgccgtggctcacgcctgtaatcccagcactttgggagactgaggcgggcggatcatgagttcaggagatcgagaccatcctggttaacagggtgaaaccccgtctctattaaaaatacaaaaaattagccgggcatggtggcgggtgcctgtagtcccagctactagggaggctgaggcaggagaacggcgtgaacctgggaggcagagcttgcagtgagccgagatcaccaccactgcactccagcctgggcgacagagcaagactccatctcaaaacaaacaaacaaaaaaattgtctacccctttgaaaaagatgagtaattaaaaaaacttgcttgttagatcagttaagtcccagacaaacttggtaatatacaaacttgctgggctgtcctgttaccctttaggaagtaaattgagttgtaaattattttagatgaatggtacattttgacattggtcacagcactgtaaagaggtgaagatagccgggcacggtggctcacacctgtaatcctagcactttgggaggcgaaggcgggtggatcacgaagtcaggagatcaaggccattctggctaacatggtgaaaccccgtctctactaaaaatacaaaaaaaaaaaattagccaggcgtggtggcaggcgcctgtagtcccagctactcgggaagctgaggcaggagaatgacgtgaagccgggaggcggagcttgcagtgagccgcgatcgcaccactgcactccagcctgggtgacggagcaagactccgtctcaaaaaaaaaaaaaaaaaaaaaaaaaaagaaaaaagtaatttccatctgaacacagaactgtttgttgtaatgtagttgtaatgttttgttttgtttttgagacagagcctcactctggctggagtgcagtggcaccatctctgctcacttcaatctccacctcccaggttcaagcaattcccatgccttagcctcccaactgctaggattacaggtgtgtgccaccacacccagctaattttggtttttgttttttttttttttcgtttttttttttaagtggagacagggttttgtcatgttggccaggctgatcggctgatctcgaactgctggcctcaagcaatccacctgcctcagcctcccaaagtgctgggattagaggcatgagccactgtgcccagtcagtaatttactttaaatacaaatatctttctcttttcttccatctgtaggagtgtctaaaagttaaatagtcagaaaatgtcagtctcaagtggcttaaataaaagaatttaaggatatgtttgtcgtaattttcaaagtattctttttgaactcttaaatatagtttacatatatccaaataactatatttagtaaccaatggacatattttgtatttttttttagagaagtactagttataaaactaataagccaagggacgattgaagaatccatgctaaaaattaaccaacagaaattgaaactagaacaggatatgactacagtagatgaaggtgagttgtttgtaagcagaaacttcaatatttatctatatgaccatgcatctaattagtcagtgcaagaggatgacaaagatggctaccttaactagcttacagtttagggatgatgtgtgatgtgggagaaggtaagcatgtttatttcaaaatactaaaataatttttttgaagtttcttaagttcaaaatttttatttttgtatatgtttttgaaaagaatatgttcaaaactcagaaatgaaagaacagacgcctcctagtcgccccatctcccaacttccccaatagaggtgacaagtgttagccttttgtttttgtgtgtgtgtgaccagttattttatgtgtataaaaataaacacgtgttctttcttttatgggagaaagggtgcatgtcaacttacgatacactcttctgcatcttttcttatttaatgttaaattaattggaaataagcaagttttttcattctaattcctaatattgataattgttcattttaatttagcaaatttctgttcatgacagacactgttatgtctgtgttatattaggcactctgttctgtaaaaatcaatatactttaatctgtctacagcgagagagaagtgcgtatgatcaaataattactwgtctttcttgcgtagcatttatttcagggtgctgtggaagcttggggaggtgggcggtagagaaagtttgagtaagaagcaactgagatctttaagagtaaggataagtagagtgatcatagttaaacaattagcagtcattactaggctttgtgtgcatgtggcaacttgccagtttcaggttgtccaggaaatacagtaaagtgaatgcataaggcagattctctttgggcaatgttttccttattattttggtagggcagcttttagaatttagtaaagcatttaaattctttttcagcaatactagcaaatatccaaatatatggattttattctaacaagtttctaaatataatagaaccataatagttgataaaattaactataagtcttttcttatgggctagttcatttcctcagagggaaatttttcaacctcctgtgaagtgaagagaggtagggagagaggtggtatgagaatggccctgagaaatgaaggagggaggtttgttctcttatttaaatattaatagttaatctgcctgttttcagcagcctctttcttctcttctatgacaagtccagagttcctcagactcatgttctccaaagagaataaaccttcagttttatacatttggagcaaatggctggctctcttgggcaagctttakacatcttacctgttcaagctgattataacttcatgtttcccatttacccccatttcctgagctttgaaggtagaagggtaaggattctgggtgtgaactagccttgcatttcccacctgcagacacttaagcttttactttattatcgaaaatcagtttccattctttcatcgttttctttcaaaagttgtagacaactctctgtctgctgttgtctttttctcctattctttctcctttgtctaattcccttacacttttttctcccatcgtattttaatggtattatgggtgatgggaacagaggtgatgtgtatgtttgatcattttcagtcataatgtaaattatttgtatttgtataaatttggtcagtctaaaattttgcctgttatgttcacctacattgtctgttaaaatagcagtgtatttttagctgtgctctcaagccaatagctttgaagtgtttagttatgaagaatcctgccctctccttaccacttttttcagagtcttgctctgtcgcccagactggagtgcagaggcgcaatctccgcgcactgcaagctccgcctcccgggttcacaccattctcctgcctcagcctcccaaatagctgggactataggtgcccgcctccatgcccagctaattttttgtatttttagtagagacggggtttcaccgtatkagccaggatggtcttgatctcctgacctcgtgagccaccgcgcstggcctctccttaccacttttcctagaagttttcctctatcttgttaaagctgtttatatgtgtttttcccagtgtgtattttatttgctagaataaggatgtaatggcgtctcttatttactcgtttagctgtaatcatttgtcttcagctgtgtcccgggtttcatttaggtaattttgacactggactgatgataatacatgtatgcccttctttccatctctcacagtgaggtccttttcctctataaacaaaaatgtatatttgtaattgactatgtattgctttttgttaccaatctgtttgtcccctcttacatgaaactatgaaaggtaaagaccatgattcctctcaaatatgcttatcagatttttgtgttcctagagcttgccttagttgttaccagagtaccagcagcaggagcagcatctcctaagaaattggcartttgaaatgcaaattcccaagccccattctatacctacttagtcaaaaactctggcgatggcacctaataatacttggtttaacaggctattgaagtgattctgataaagctaaaatcagagaaccactgctttaaaataaagattgtgtttgggttttttttcattaacttcccttaatgtattaattgtattaatacattttttaccttttggaactttaaaaatatatatatattaccacaatcatgactacatactttttgaatttttttattacagaaatagtcatacaaaaatgaaagcagtggctgggcgtgtggttcatgcttataatgccagcacttggggagacaggcgggaggatcgtttgagcccaggagttcaaaaccagcctgggcaacatagcaagactccatctctattaaaatatatatatatttttttaattgttgaaagtatagtatgaatgaaaaatacagcgatttaacagttgtgacatttgcagtgtttgttttttctacttcttttttcccattgatccataataaagtcaattgtaaacatggcaatttattttcaatatcacagcatattcctcaaagttggtacaataccattgtagcatctaagaaaataaacagtaattttcagacattatcatatattattcatatccagatttctctcatttgtccccttaatgtcttttatagctttccttaaaacactagggtccaaagttcacacacagcattttattgtattctgtctttagtatcttcaagtttaaaagaatctccttattcttttccttcttttctcttctccctgcattcttcctaacatagtatcagtttatatagtaatttatgaagtgtcaatttggattttatgggctattttcaagtctgtggatgagcttggaagcaaggatgtcagtgaactgacatccctaagagttgatgtactattttgtgttcctgtggatatatgtgttttgttttgttttttgtttttttaacagagaaaagaagagtggatgaaagtactcataattttagattatagctgaggtgtatatttgtgagagaggggaggaggagagaagtggttagttttgctacatttcagccacatctaatttataaaattattcatagttacagatctatcacagatcagcaaatatttgaattgccacctgtgctgttgtcactaactagtaaattaatcaactcatctcaaaatattctcagtgctaaattgaattaatcagggatggctagattatctgccactgtgacacaaagagatttagaaaatctcaaataattcctgtaagtgcttatactggggcctcatttaattaaaatatagggcaaacattggataaaccaggtaatttaaagtggctaatttaatcatcagctggtatgctgtgctcagaatgttgtttatatgtatacagtgtgggtctgagtcagtgattatatctttagatgaaaaataagaatatagattggttttcgttggtttaggtttgggtttgttatccttgttttccctactccatttcttacataaatgttttttatttagcaaatgtgagaagttaagtaccatgaattagatacgatccagtgtattaccgtgtatttttatatagctttataaaattggaaaaataaccttagattgctatgttggcaatatgaacaagaacatagaggaaatagccctaatctaagtagagcttaggaaagtttttaacaggggtgagtgacactgaagcaaactagcccttgaaagatgagtaagaattcaccaaagaaaaaaaataattgagacaatttttttttaagtaaaatatttttataaagcttttaatgctactttctgacctacaggtgatgaagggagtatgccagcagatatagccacattactaaaaacatcaatgggcctgtgaaataagaactgtgaactctcaattgatgaggaaatatcaacttggtgcactcaaggacatttacattatgatgaccatggggtttatgaacatttataactttttataatttccatattacatttctcatagtatggacaactttttgccactaactgaattctccaaatactcacacgtgaaatttcaaaaaagaagccacaaatatgtagttctgaagatgttgaataatcattttacaaagcagttttctgaatggggattagttggtgattgtttgtaacaaatatgctaatgctttagaaatgtcagtatttttgtaattatttctacctccaaatatatatatattgtctttcactggataatgtgtgtagatttttacatgtgccttatttgacaatgcttatgtcttgtttttgcttgtctcatttgaagttcttttttattatgttaaagaatgcagctgtatagattatatagctttcattttattgctatttgaagcagatgttcaccaatgtcagcaagaactcaacctgaatttaaaggtggcattccatatactaacatcccccaggtcctctcaagtacttctgctgaaacaaatttatttggctaggcactaagttgttttccagtgaatagtaactaaagaagcccctaccttgctccatggattaattccttctgttcattttccaactgcactaattgtgcatattactctgcctaatcttgtgcatgttttcattgatttccctctcccggcttttgcttctcttgaaactgttgcccagtcacttctgctccaattctcttcctctctaaatagtagtttattactgccacatctccatgcatcagcaaaatgttggtgacatttttctagcctggcagaacagattacttaaagctatttcayttcaaagcagactgaatgtgacttcatctaaaggcagcattaggtactgcatggaaataggtcattaacttgaaactcttatcaaaatatattttaccagtttccagaatttccagtacaggaccgcctgaagagagagccattgttcaattccaattcagtgtgagtgacaaagtgaaatttagaagtgaagttgtctatttgatatttaactctttattaaatctttctttaaatttctgcctgtcagtctatattgctgtttttattatacatmagtttctttgtataacttgtgagttccatgtgttttgtttttattatgtaaatatcattataaataaacttatttataaatcaaagatttgttaatttttggaaatcatgcttttcaaagcatcctaacttgctaagatgctaggtagtacgaccctctggatttggaaggcaaataaaactcttacagtgattatttagatattaaagactgagaactcacggcttaaccccagtcttgatggtatattgaacagactgaatatattttaccattacagggctaaaaggagtcttcrtgtgttaatactacctccttgtacatcactatacccaaatcagttattcaaattgttaggaattttaccttttaaaatctcataatggatatctcatgttttctgtattaatgtattttcaatgataggctgtttctttttttkttgttattgttgttgttgttatatccatacttttatctctaatgaaatgtagttgggttcttcctgtaatgcgctattatgtcttgggcttaataaaaatatttgtgatcataagttgtattttcacaccctttttaatagtttctaacccttcctcctcctacccttaaaatcatataatattgggcacaaatgagattatcttatgtgcttaatattgcctgtttgccagtaaattggaacttactacttaggatgtattctcattggttccttcattggactgatgtcagtaaatactgtaacccattatcactacagagcaaatgaagcgagagttggagtaatatcttgaccaactgaagcattttttaaatgcaagctacacaaagaagacatgccttatgcatttttataactgtttgggacccccatagagttttaactttatgccagtagatacttactttgaaacattactgtagttcctaacagttggcattatcgtgtagtggagagacggggtatgaggagatttggtttccatttgtgtgaccttacgtgtgatacttcacagtccataaatttaaggaattcggattgttttaactcttaccaaaaatgtatttttgaaattataaattcaatatgcagttcactttctgcttgacttcactctcgcttagccaccctctctttgtatagaagcaaagagacatttaatttgcatacacaatgggataatggaatgtattgtccttcagcgcaaaaagattacctaaaggttataataatgctaaatatttccttatgaaacttgctgtggttatactttatacttgtattatgatttgtataaataggattatcttattttgaattttcataattttgtataagcattggattatcacttttacttagttctgtcttcattaaagcttgatgtgggggaaatttagctatgcagaagagtgaagaaaagctaactacttttattatctagaacattatttgcatttcttttgttaaaggtaatttttcttcagattgcctggattacatgttggagggttttgaatgagattcacatacaacctattatcatttacttatagcaactaataacaagaaaatttgatccaaagaatcaaggtacttagaaaatacactgtttttatgtgtaatccttaataatttatatttgttattgttgttgttgttgttttgagacagagtccctctgtcatgcaggctggagtgcagtggcgtgatctcggctcacagcaacctgtgcctcccagttcaagtgattcttgtctcggcctcctgagtagctgggattacaggtgcccgccaccacacccggcttatttttgtatttttagtagagatggggtttcaccatgttggccaagttggtctcgaactcctgacctcaagtgattcaccctcctcggcctcccaaaggctgggattacaggcgtgagccactgcgcccggcctaaagtattaggtaacttttttttcaatttcataaaacattgagaggaaagaaacaccttaaataagatcatacctatctgggcttttcttttcctcttctttctttctccccaacatcctcctctcttttttgacttcttaattgtgaataaagcttctgtaaatatatgtggacaggtttttatgtggacatgttttcaggtccttgaaataaatatcaaggagcacaattgctagattgtatgataagcatatgtttagttttataagaaattgtcactgtcttccaaggtagctgtaccatttgtactctcatcagcaacaaatgagagttacccgtgctccacatcctcgtcagcgtttggtgttgtctgctgttttggattttttaccattgtgacagtcatatagtggtatcttgttttaatttgcagttccctaatgacattttgttgggcacctcttcatatgcttattgctacctgtatctttgttgaggtgtctattgaggtcttttgcccatcttttgatcagcttgtttgttgtcttattgttgagttttatgagttctttgtgtgtgtgtgtgtgtgtgtgtgtgtgtgtgtgtgtgtgcaacatggctgtttattccacctgggtgcaggtgggctgagtccgaaaagagagtcagtgaagggagatacgggtggggccgttttataggatttgggaaggtaatggaaaattacggtcaaagggggttgttctctggtgggcaggggtggatctcacaaagtacattctcaagggtggggagaattacaaagtcccttcttaagggtgggggagattacaaagtacattgatcagttagggtgcggcaggaacaaatcacaatggtggagtgtcatcagttaaggctgtttttacttcttttgtggatcttcagttactttaggccatctggatgtatacgtgcaagtcacaggggatgcgatggcctggcctgggctcagaggcctgacattcctgccttcttatattaataagacaaaacaaaatagtgttgaagtgttggggtggtgaaaatttttggggggtggtatggagagagaatgggtgatgtttctcagggctgcttcaagcgggattaggggtggcgtgggaacctagagtgggagagattaagctgaagggagatcttgtggtaaggggtgatattgtggggatgtaagaagaaacatttgtcgtatagaatgattggtgatggcctggatacggttttggatgaattgagaaacaaaatggaataagagaaggagaaaaacaggtataaaaggtctaagaattgggaggacctaggacatctgatgagagagtgcctaaggagatgcagcatagtcctgccagcaaagattatttatttacttcaagagtttagagtggcagtttggggatagcaccaggagatatcagctgtgatggctaggagaaagtgtaaaccggcagtgtaaacaagagcacggcatgcatgagtagttgagaacggtgaataggagtatgactagacaaaagatagtagggatgacaagttttttgggggcacagtctaagttggtctggtgtcaaatgagactggggcctaataaaaaggagcgtctatacaggagcttaaatgggctgtaccttgtagcattctgaggacaggcctgaattctgagaagcaaaagtggtaaaagtattgtccagtcccttttaagttggtggctgagcttggtgagctgtgtttttaaaagacctttagtccgttctacttttcttgaagacggaggaccgtaagggatataaaggtttcactgaaacctactaaaagcctgaaaaactgcttggctgatttgactaataaaggctggtccgtcatcagactgtatagaggtgggaaggctaaactgaggaattatgtttgacagaaggaaagaaatgactgcggtggccttctcagaccctgtaggaaaggcctttacttattcagtgaaagtgtctatttggactaagaggtattttagtttccttactcaggcatgttgagtaaaactaatttgccagtcctgggtggggcaaatcctcgagcttgatgtgtagggaagggagggggcctgaataatccctgaggagtagtagaatagcagatggaacactgagaagttatttccttgaggatagatttccacgatggaaaggaaatgagaggttctgagaggcgggctagtggcttgtactatagcatagcctgcctttgctggtatgcggcgattaggcctggtggaactgccatcaataaatcaagcgtgatcagggtgaggaacaggaaagaaggaaatatggggaaatggggtgaatatcaggtggatcagagagatacagtcatgggtgtcaggtgtggtatcaggaataatgtgggaggccggattgaagtccgggccagaaacaatggtaattgtgggacttaaagagtaagtacagctgaaggagccggggagcagaaagtatatgcgtcaggtatgaggaagaaaatagattttggaagttatgagaaatgtagagagtgagttgagcatagtttgtgattttgagggcctctaaaagtattaaagcagcggcagccgctgcacgcagacatgagggctaggctaaaacagtaaggtcaagttgtttggacagaaaggctacagggtgcagtcctggctcttgtgtaagaattctgaccgcactaaccatgcctaggaaggaaaggagttgttgttttgtaagggattgaggtttgagagattaatcggacatgatcagcagggaaagcacgtgtgtttttatgagaattatgccgagataggtaacagatgaggatgaaatttgggcttgactgaagtaatgggggctgtctgtgaagccttgcggcagtacagcctaggtaatttgctgagtcagggccaaagtgaaagcaaagagagactgggatgaagggtgcaaaggaatagtaaagaaagcacgtttgagatctagaacagaataatgggtagtagagggaggtattgaggataggagaatatatgggtttggcaccacggggtggataggcaaaacaatttggttgataaggtgcagattctgaactaacttgtaagccttgtctggttttaggacaggtaaaatgggggaatggtaaggagagtttataggctttaaaaggtcatgctgtagcaggcaagtgataacaggctttaatccttttaaagcatgctttgggatgggatcttgacattgagcggggtaagggtgattaggttttaatgagatgggaaggggtgcatgatcggtcgccaaggagggagtagaggtatcttatacttgtgggttaaggtggggggatataagaggaggacacaaaggaggctttggattgggaagaagggcagcaatgagatgtagctgtagtccaggaatagtcagggaagcagataatttaaagtgtctcagcctaataagggaactgggcaggtggggataactaaaaaggagtgcttaaaagagtattgtctaagttggcaccagagttggggagttttaagaggtttagaagcctggccgtcaatacccacaacagttatggaggcaagggaaacaggcccttgaaaagaaggtaatgtggagtgggtagcctccatattgattaagaaggggacggacttaccttccactgtgagagttacccgaagctcggggtccgtgatggtctacggggcttccgaggcgatcgggcagcatcagtcttcagccgctaagccgaggagtcagtcagagagccttgggccagagttccaggggctctgggagtggctgccaggtgagttgaacagtccaatttccagtggggtcccgcacagatgggacatgtcttaggaggaatcctgggctgcaggcattccttggcctagtggtcagatttctggcacttgtagcaagctcctgkgggaggaggttctggaggaacgcctgtccgctgcagttcaggcatttggaagttcttgtgtgctggagatgtggctggggtttgtctcacagtggaggccaggaattgcaacttttttctattattgtacaccttgaaggcgaggttaattaaatcctgttgtggggtttgagggccagaatttaatttttggagttttatttaatgtcgggagcagattgggtaatacaatgtatattgagaataagatagccttttgaccttttagggtctagggctgtaaagcgtctcagggttgctgccgaacgagccatgaactgggctgggtttttatatttgatgaaaaagcctaaacactatctgatttgggataaagaaaaaggagcattaaccttgactatgcctttagctccagccacctttttaagaataaattgctgggcaggtgggggagggctagtcacagaacgaaactgtaagccagaccaggtgtgaggaggggaggcgataaaaagattatagggtggaggagtggaggctgaggaagaattgggacctagcttggcctggctaggaggggagaggtcagatgggtctgtag

SEQ ID NO: 94734 - DNA, 72220 bp, Homo sapiens
acctgtaagggttttatagctgattataaaaccaccttctaaagaggaccaaaataagacaattttctgtggatgacaaaacgttttagggcagccatagtcaaagacacaattggaaagaaatttgttacctctgtggcatacaataatttaacataattataattattactgataatgtacattaagtcatatcagaattatggaagtttcccataattttagaacacataccaatagcatatttatacaaatacagcccaaagaaaaccaaacatcattttatatttgacaatgctttctgcataatttttataccaaagccaaatatgtcatttttggactttagggaacctaatatcttaaaggattaattaggtaagaaaaaggcatactttataatttgatttggaaagtttgtcaaatatcaaaagtttaaaacacttgatatcacaaaataggatcacaggtcattgtaaaataagtcatttcatttaaccaaagtgataacacaaggataaaaaggcaaaaccttcattctttgggaaaggagacttaattttccaaacaataagcctgaataaaaacagcatgaagccaattaaatttgtttttcaaaattttataaaccataaaattttaattttgaccataagataaaacttccataagccttttataacctttataacctttattaaggagtcagttaatgcttcaagaaaaccttgttaatcagacacagggacccatatgcttgtcttgcatcagtgtgtctttgacattgataattaatttgtagagaaactgaacttatctctcaaaatcagttcctacagtctcatacgcccacctcttccacgatagttcctgggccttgaggagttgaatagctttaatttctggcccagtgtcttaggaatgcagtttgttttgattggcatcttctacctggcctgaagatggggtttaattgctgtcagtgtttaaaatttaacaggacttggtgtccttttcagacacaaaagtcaaaggcctgtaacttaatgtcacaagtaccttaaaagcacatacaaagagatacatggatgcaataaccttaatttaaaaaaaaacttttaatctcagttttttcctaagcaaaccaaaacttaataatatgacaacttgataatataaaagtttatttttaaatcctctcattgtgacttacacagaccgttcatgacatgcttggactttctggtttgtcctgaacatccctctttcttaaacaaccagtcattctactctaggactaaattctctctcgtatgaagaatctcatacaaaattatttttcatttgaaattatttctctttaagctttcttaccaaaaaaaaaattatttttataactttctctacatctcttgtatttcctggttcattttacctggttttatacataacctttaaataagctttgaattagacaaaaattgttcacccttttttaaaaggacacactttttttttaagaaagaatgttttcctacaaatatattttattggaaaatatccaaataatgaaatatctattatttaatttaactttagattctaaattatgacctgtttgtctacaattatttatcccattacatttacctaattattttaattgtttatgtagattatttatgaaaactgtgatagtcatcatttaaagttttggaaccaccattgcaaaattgtaactgaaacagtgaaaaagatttaaactaactgacttcatcttgcttttagcctccaatctgtccttgttcattcctgggtgtaggccaaactatttgggaccttagcttatagtttagctttgaaacaaagacagtaacagtcctttctcaaaacaaacctcagtccctgtggactaaactgcccaaagccacaagattagaagttatggtaatcttactaaattcaagatgtagctattttttattaaaccaatatcaatgtcttgtttattaaaggttacacaaggaaagttcattcagctttgggctaggttcatagttttataacccccatgtcaaattttgacaccttatagtatttggcagggataagtatgaaattgcttgattaataaatgcaaacaagaatgtatgctggcaattcttaagacatttctaatattactttaccaataattttaaagctagcttatttattaaagatttcacttaagttccgtaaacttgaaaaagcatttgattagtctcttattttttcctgataaactatttgattcaagtgcttttttctttaagccaattaattagagctttttaatatattttcagtagtgaaacattgtgtacacaacatataaatgcatagacatgttaggcatgccaatagaaacacatcttagattcataaaaaacgtttttttcctatcctagattttcaagattttgataacctgtttcacaaccttaggtagttgtcagctaaatagccttaaatttgcatattaaaggaaacaactcaggtgaaaatcaaatagcaaaatttgcatcataagatacagagagaaaaagtctagagggagattaaagatggatgccaaatcgaacataaaattataaaaatctatcataggattgcataaggagaccaattttatttagagactacctatcttttaaccagatctctgagccctgggcagagcccacactgaatcctgggtttccaaaaagggagaatttttatgaggctggaccatgtgatgtttttatggttcacttaaaaaaaatttttttaaaacaaagacatttttaagtgtctaaactacacttttctttaaaaacccaagagtagcctctgttgcaataactattttagtcaataaatcaggtaacaatataaaagcaagcagtttaaaagctgagatgaacttgtctgtttacactcttcaagttccataaggagaaacaggtttctccccgaaagggagtctggtgtcttctccattttctttaaggaaccccaggctattataaactagtttaggtccctcatgcagcagagggtgaaagagaaaggagagacagcagaagtaaatgaagaaaacagaatccagtcaactgagaagaaaaaatttaaaaaacgggcgctaggcatggtggttcacatctataatcccagcactttgggaggccaaggcaggtggatcaactgaggtcaggagttcaagaccagcctggccaacatggtgaaacgtcatctgtactaaacatacaaaaattagctgggtgtggtggtacgtgcgtgtaatcccaactacttgggagactggggcaggagaatcccttgaatccaggaggtggaggttgcagtgagccaagatcacacgactgcactccagcctggacaacagagcaatactccacctcaaaaaaaaaaaaaaaaagacaaggtcctgggggagaaaaaaggaataaaaacatgaaggccttttaaatacaaacacatgtaaacgtacagacacacatcttggatggtagttttcaattaagctgactttaaccattaagttcctttaaaaaaacaactctttaaatctcatttccatatttcacgaactaggacaaattgccgctatttcagaagtaccaagtatcaaaccagaaagggcttgatttaggaaacaaaactcaggctgtcatggtgggaaaaaaaaggcagaaccctagctattgaaatgcagtgtggggtgactgcctttgctttcagtttgacctggctagcaaaaaggtggctttgttatgtaaataaagccccttaagtagtcaaaattaaaattctttccttttttttctttttttttcctttttctggctgtttttctccccccattataccaccttaccatactaccttttttgtgtgtgtctatgagaatttagccacttcagtggccttgttccccataatttggaactttccttcggatttgatcaagtcggaagaagttggtcaaacccaatgggaaaaagactgaaacaacaagaaaaagagaaacaataaaaaaaaacagttaagcaaaaaaaaatgattgcacaacttatatgattactgagcactctaatggtaaagacattaagaccagctggttgttgattttaactttagccaagacaaaccccaatttagttatctaggggttgttgggtctcaggctgaagactgctttctatcctagtgaagcagccttgttgtctggggtgatacctgaggttcattgtctcatgcagaggaaatcaaggacatggacacacaaggagtgaggttaaaagcagaggattaataggcaaaaggaaaagaagaactttctcctgcagagagaggggtcccaaatgggtttctgcttcctcagtgaaatgcaggttttatagatgagcttgaggaggtggtgtttgatttacatagggcatgaaagattggttggaccaggtgtgccatttgcataagggtgcaaaaagctggccacccccaccctaatgttttattatgcaaatggattatcttcctggcccacaccatgttgcctgtttctttacacatggtgacaaaaaggaagatggagcctacacgttgaacatacctggcccccaggtagccattttgtattggcacagctgctggcagtaacctgtgcaagcttccagcttgcttatctatgtctgcagctcaatttttcaggctgctcttcattagacaaaagaagtttctcgggctgctttctgttagaagggaagccttgccaagaactcgtaccctcactatctgcctaaataacttctatctcctgtgtcactaggagcaggaaaaaaaaaaaaaaacctcatcttccctgttggaagggaaactccgtaaaggagttacctaccttccatcatcatggaagcaggaaaaacttgcctgccttgtgttggaagcaactaaaactccaaaaaaaaaaaaaaaaaaaaaaggttgtacagcaaaataaactttagatctcaaccagaattggggagatcagggattctctggaatgggtgcttccaggcctcagcaaattgtcctattggtttaagccataaagatagcccaaggttgaaccaagcactgataggagatttgttaaaggtcaggggcacctccactcagaatccctctgtggttaccaaaatgtgaaccctgaaaatctgagacaggtctcagttaatttagaaagtttattttgccaaggttgaggttgcacacccatgacacagcctcgggaggtcttgaagacatgtgcccaaggtggtcagagcacagtttggtttcatacattttagggggatatgagacatcaatcaacatatgtaagatgaacattggttcggtccggaaaggtgggacaactcaaagtggggagaggccttccaggtcataggtagataagagataaatggttgcattcttttgggtttctgattagcctctccaaagaaggcaatcagatatgcatttatctccatgagcagatgtgtgactttgaatagaatgggaggcaggtttgccctaagcagttcccagcttgactttttcctttagctgagtgattttgggaccccgagatattttcctttcaaaataggaatgaatatgttgtgatcattatcttgatgacaaacatttcgtcccaagatttgttcacacatgatgaatgtgctatgtatatttaatcttaatgaaatcccaaggaaaatattaattttaacactaataacgataaatgggcattgtactcacatagtgttcttactcccaggggcacaaagctcttcacaattaattatttcagtcattctcatagcagtcccatgaggtgggtggctgagtgtgtcctcttggaaaaaaaaaagaaaaaaggttactaattggattttcttctgttccacattctgtgttctagaaccgagtagctaccttataaagaccatctgtacatccactgtgaaatggagtttcaaaatcacaagcttctttcccacatgaacataagactaggagcacatatggaagagtaaagttgaagggaatttggatgatgatttggcaagatgctgtaagtggattaggcaaggctgctaaagagagacaggaaatggctgtgttagtgcttcggacctccgttagaagtagcagttcatggtgttgaaggtttgttgttgaaaataccttcctgaggcacctcttcattgtgcttattcttcccacaacattgtgccaagacactgtcaagcctgggcctgtcaaagcctgggatgtcaaaggcctgggtctttctcatcctgctgtaatgtattgatagctgggggctctgcagaaggacaagggaaaggtgagatgtttataattctcagtagtaccttttagctagtctcatgctcccttatcccccatttctctaccaggccagctttccacatgcttttgctttctcagaaacagagcctgtgtgtggacacatcttgtccctggagcagggaaacagtacagctaaacctctcactttacctagtgatcagctcatccctctccttcctttcacaatatgccattcagtcttctccagtagtctttcatcattttagtcctgtctctttggttagactgcaagctctttggctgaatgttcaggtcaggtgtttttcactccttttaatttgccctacatagccttcagcactggggcatttaggtgcacagtaaacacttgtggtttatctatttgccacccataattgtaaacagacattgcctgtacatattgactgccattttcgctgtgttttttttctttcattaaataaaggcttagctgtcatcactttgagtttgtcctcctcagttttccctgaagttaccctgaaacggggaggcaggggakgggggaggtcctttaaaatgcagtggattgtgcttaagttgagcagtgtatccagggagaggactaattacgaggtttgaaaacctcatcaggtggctggtttctgtagcaggactaaaagactgctctcctaaattgagaacagctggggctgtgtgctagcaagtataaaagaggtggcagtggtgccccgtgtccgaaagaagtgtgtgctctctggagcctgtggagctgaagccaaaggtagttatcctcatcagtgtcgtggtgggtgagtcccctgagctggtcctctggaggcccgtttctgttgtttggtagaaattgtggtagctgaatcaaaatattgttagttactaatttatcatgccaattgtagtgaggtatttttatccttcaaataaattctacttgttacctgcgtgagagacatagctaaggcttggtgtatcttttcagagttattttgaaggctgccagcttttcttgtatatggtgtgcgtctctgaatataaaaggataaactgaggctgtgccattttaaaaatcttgaatgtgttgttcttgaatctgttcttaaaagcggtcacttaaaaagacttctgttttttaattagaaaatagaaaattgactattttgacaaatgaagagagtaacaattattcaatgcatataagcctcttaccagttttttattctttctttatggctcatagaaaatacagtcttaggaaggattgatgtgatctctgggtaatttctagcttattatgacttcatggttagcaacaagtgatagtgtctgatgaagtgtttgcaatgttaggtcctgatttttctttaaggaaatttaaagggaactgattgttaaaatgttcctatttctaccaatactagctcaaaaagagacaagaattccaagataaaactgttcagtattttgtaaataaacttgatctcagcagctttaactaggttctgacgttacatttataaagcaaatggctttggtatttgtttccttagtttaagaatgtttctgttttggatggttgacagttggacaagcatagtttctgaacataattttgttttgcttttaggtgggatagtaacatctttttgagggaagaattggcttcctttcttgaaagtggtgaaggtacagcatatagctgcatggaagaaacagtaatcggatggctaccttctacattttgtattaggaaacaaagtccattgtaagagtccatgttgatcttggaaatagaaggattgaaaaaagctaaatttccacaaagaacaagaacttgaccatctcctttttgatctgaagactaggggacaatggatatcatagagacagcaaaacttgaagaacatttggaaaatcaacccagtgatcctaygaacacttatgcaagacccgctgaacctgttgaagaagaaaacaaaaatggcaatggtaaacccaagagcttatccagtgggctgcgaaaaggcaccaaaaagtacccggactatatccaaattgctatgcccactgaatcaaggaacaaatttccactagagtggtggaaaacgggcattgccttcatatatgcagttttcaacctcgtcttgacaaccgtcatgatcacagttgtacatgagagggtccctcccaaggagcttagccctccactcccagacaagttttttgattacattgatagggtgaaatgggcattttctgtatcagaaataaatgggattatattagttggattatggatcacccagtggctgtttctgagatacaagtaagtaaatctaatgttttgaggatttgtcatgggtttgtttttgagtgaatagatgggttattgagattatttttcctttttttcccccaataaattcagtcttacccaaacatttgatgaaagaaaacagtagaaagctctaccacattgaataaattcagtcactattcagtaagtgtttgatgagcaactgtgtatgaaagtggcagtgtacagcagtactgtggtggatgactcagagttgatgaatttaaggtgcagttcctgacttccagcaacttggtgctatggtatttgtatgataaatcaagaggcttggaaaggaataacattcactcccatcatgtttgttatttcaggctcttgacaagtgggaaaaggaataggttgagaaacttttttctccattactcataatgtgatgtctgtattggtctagagtcaatagcctgctttaaggtttgcctagattcaattctcaaattttacatttctgtggggctgggtgtgtggatgtggtttcggttttttgtttgcttgctatctagttacaagtgtttaagagactgagtttagaaccagatccatgcggttttgatttttagatttctaaagtaaacttgccctctgattttccttggacaccacaaaggagctcatggttcactgggttcagcctcctcatttttggaatagtaggaaatcaagaagaaataagtcaggtacttttgctttgaagacacttaagaattggacatagccctgaagtggttatttctgcttctctatgtgaattctgactcctagtccataaaaacgaaggctccttaattcctcctttcctctcattcatcatttagacatttgttttccactgggatggtagtgattaaatcactaaaatatgattttgatcaaaacactgaccataatacagagtttaaaaatgtaatgtatgctaacttggatacaatctgaasattccaagtcaaataggatttcagtattaatgccacaagatcattcttagagaattttggctgtattgttttttagttggtaacacttttcattacttgatcaattatagaactctcaatgtggtatatccactcagaccctaacactgttactgttttgtgattagaggaattcagtctatctttgttaaagagttccccaaatgcaactttgcagtcttaaaaccttattccacaaactgcagtcattcctaagcattttccttaatataactcttcatgtgtttccttaatatgcttaagtaatagacttagctatgagttgtcttttacttaaaaaagtaacctgctcctgaaattgttaaaggatgctttatgctaaaagcaaaaaatgtatttatgaacttcagtgtttttctctttagtgtctggaaattaacacaatgtaagagcctgctaaggcggcagataatttgctttctcctttatttagagcaaggttttattgatatatgtgtgaaaagagaaattgtccagaatctggtaagtatgtggactccaccctgaagtacagtctttccctcaatttagctgtattttcatctagatmctttttgaattttcattagatagttattattaactgcctctacctaccaccttagattttcaacatgtccaaacacacggtcacatagccagaccataaattttaatgatatccactgtttcagtcgcaattcacacaagtttgcctttttacatttgaagtagaattggatcttacattttagtaactagtagaataatttttataacctgttttgaacatcccagctgaatgaggaatgttgcttgctctctcttttaaaagcacctttcaaagctatgggaaaaagtcattagcactagttctttttctaaataaggctgtagagtacatctttcaccttctaagttggttttctgttctgagtacagctgaactcagaatgctggaatgaatgtaattgactcataataatttctgcttattacttccccttgtctaacagcatggagcacaattcaaaacagcactctgttggaacctgaggttggatcaaaggctaaattggttttcccttaaccaagggaagaaactcagcactgtwtattacctgctcctttttagtaccaggaaaggcagaactagaatagcaagcctttaaagaaattccttggggataaataaatactctcatctactagtctaggtggtgttcccttctattttttttttgaccccagaaaccttggaatattcttaaaatagctgttggaaacagacagctgaaatatatatttatacataattcttgaaattagaagttccaaatgttatctgaattagaccttgattcatgtcagaaccacaatcttagggaaaacttaaaatatgtcacattacctgaaactgcctgttttttcagaagtctttgatcactaccagtcttgaaagcttgagacctctgaaaatgagagacctagagtaatatgttttatgcagtaatgaagttacacctagcaagtctaggggctttatgtggagtcccactcatctcttaatccccagagcccagagctgacagacctaactatacaacagaaaaggagctgtcctgttcagctggactaaagacattcagacccatgatgcccattcagatacccatgaggcaatggtacagtggcagagcccttsccttttgaagacaggatcctccgtcatccactgggaagcctgcctcaggctgaggactcaggtcatgaagcacaggggctgatgttaggacaacgttcttctcacaaaaatataaagtgaaaaatgacttgtgggatttttttatcctttttttgatcaagattgaatgaaataatcagcttacacattcactattaaatgtaattaactgtatgagaacactttggacattttcaagatagagttttttgaaaatctagtcatagagaaaatagttcatgcccgtattgtcaaaataccttcagatggtcctcaaataaaccctgcttatataccgtgggctaaatgtgttgtcacatttccctatgtgtctaattatgtaatgtcaccttggctcattagttaattcctctgttactgtggcttgcttattcctttcatatgttctcaagaaagggttttaatgcagtgagttgactgaaaatacagacaggttcattctctggcaaagagtgcttttgaggagaggtgactatgtagactcttcgtctactttagttcccccaccccacacacacacatcctttggaagccaaaccacctagatttattgcagtatgtgaatcttcatttctgaaaactgtggtgcaaatctctccatgaaactgtagggatgggcaactcaaaagtaagcctttaaactctgtgaaactgtggtttgtttgttaatgccattctgtactgattattctttatcctgttaaacattgttttatttttcattaggagtaaaaccaaccagtaaacttgtttttccccatccctattttttcttttaggtcaatagtgggacgcagattctgttttattattggaactttatacctgtatcgctgcattacaatgtatgttactactctacctgtgcctggaatgcatttccagtgtgctccaaaggtcagtacctccaaactgccacttagaagaaatcaggcaaacagttattgatcacttaccctgtattatacattcttctagacacttccctatgtgttagctgaaatctagcatcttttctattttctatttagatttgaggggaagaaattaaaatgtatttataaaatatataccttttgtgctaaaaaaatgtattttctgttaactgaaaattaccattgggggtttgactctgcttttttaccttctcatttacttattcattaatgctttcattctacaggcattaagcttatgtaccagggattgtagtaacccaaacaatgtccctcttctggagcttatattctattgagggatgacaaattataaacaaattcataatttgtcacatgctgataagtcaggtgattgtcaggtgattgtcacaagcagaacagcaaagctgagtaaggtgaaagggtgcttgagggttctatttgatatagaggtcaggaaagccttctttaataacgaggcatttgggcaggaaccaagacaaggaagtgagccatgtggacggcatgagagctgcaggctaaaacattgcttattcacagtgggttaaaggaagagtagggaggccggtgtctcagagtggagttgtgaagggttggggtgtgcagaccacagatcacatagggtcttgcagcctagtataggaactttagccttagtggtagcagtggaaataatgagaagttgttcagttcgggatataggatatgctaataagttggatatgggtttgacagaaagaagtcaaggatgaccccaaggttctttagcagctggaaagagagagtggcctttgactgagatagtgtgtgaggatgtcttctgaaaccatcctaagaaggaattacagtttatccaggaagagcgagttcttgagagagctgttaatcatctcggacttcagtgcaccctggtttacaaaatggaaaattacaaatcatgtgctttctggacaaaggaatgaagtctaacatcatattttactgaacactaagcagatgtctgaggtgaaagaaaaatcaagcttctctgaagacgtccacagtctccctcaccaaatataggtgtggtttggagaagctatacttttccaaagccatcaaagcagaaaatatctgtaattaaaactgtgcatattgaatttaaacactggccgattttagtgaagctaatttaaggcgtgggagaagttcagaagtgtaataaacacttctaaggggctattgcaatgtgttaaatggagaaatggccacagaaaagaaggcaaacccatcttagtaacggatgaggtttgcaggatgaattgctatgattacagaaagaaagtaaattaaagattgtcctctgtggaagagttgcaatctttggaagccacatcagtgccgttggatagccaagctacaaatagtcatagtggaacctctagtaacatccttactaatcatctcccaggttcacttgtcgggaccccttcctgaagcataagcaagccatatatgcctgaatcatggttcagtaaaacaaacacaaatcacttagtttgactagaggtgaggtgcttttacagaacaggcatcagagttgtgttctaaatttggttcatctgctggctttgggtgctgcttagatttttatggttacaaagctattacaaaatcttgtctcctgtgttgctgactctataggaatgtccttcatgagtataagcatggcagaactttgtatgtggaagccactcactatggaaaagtgtcatatctgttatagtaattgatgcctgtacaacttgtaactcaccagacatgcttacaagagccaacacagtgaaagctttgctttcctagttttccagttgcctgctcccttatgtatcctatggttcacttttaattttttgcttataatttgcttcaacctccaacccaagttttgatttacagtcagacaatctgtgttcttcaaagtgtgtttacataagtgttggccccattattataaaaggattatgtgaaatgatttagctttgcaaacctatttttccacatacaagaatgtttggctgggagagcaacattcccttccctgagaaagctttctagggcgagctatccctcatcttggccataggtggccaaacacttacctccttcttcttcttttttttttttttctgagatgagttttgctcttattgcccaggctagagtgcaatggcgcaatcttggctcaccgcaacctccacctcccaggttcaagtgattctcctgcctcagcctcccaagtagctgggattacaggcatgtgccaccatacctggctaattttgttttttccttttttttttttagtagagacagggtttctccatattggtcagattgatcttgaactcctgacctcagatacttaccttcttaatggaagaaacagtgtagatgataagctttcctttttggcagcagccaagttggtctctcctgtacctaatgtgccacccattgcactccagtctgggtgaaagagcaagaccctgtctcaaaaaaaaaaaaggtctttctgtatttctcttccatgtattctattacatgatttttttttctgagcattgttctttgattttctcaatttgctttatacttatctgatctgaatcccccaccctatctagcccctcaataattcagtattccaattttctatgcctacagtttggaccaactccttccagtatgattaaattgtaatggggtacaaacctctctggcccctggcctagcccagcgttgtttctcactgtcatcacagtggctttgcagggctgctgcaccttgtccagaggagctctcccagcctcctgccgtagcacacaggctatttctttaggggatgtttttcctaatcaaagctactcatttttaaagctgccagtacatccctaatccatcattttcaaacctatttaaattatttaatgagttgcaactcctcttcttaattgtaaatgttttgatcagacattaatgcagctatatatctgtccactttaggctgcccacctaatacaagataccaatacactgcagagaatattggtaatgtggtatgcagctgaatcaaatattaaccattcaaaaccctcacttccccctgcaaaaagaaagtagctttgatctgctttttagcacgtagctgtggtgaagtcattggttattaatatttttaaaagctttgcccaaggacacaccaccaccaagacatattattagtaacatattgaataatttaaaacgtcaataaagcttgccaataaatgaataaaacccagtttgargagcttctccttggattctttttgactttctaggttaaaaagaaaaaaaaaatcacaacctggtgtcctttctaagagtcacacaattavactraaacatgattttagccacttgtaaattcccttcttaatcttcttgtgtcattcagctcaatggagactctcaggcaaaagttcaacggattctacgattgatttctggtggtggattgtccataactggatcacatatcttatgtggagacttcctcttcagcggtcacacggttacgctgacmctgacttatttgttcatcaaagaatgtaagtaatagcccattcccactgaactgatagctgtagtgggagggatccctgggccctgaaattgataggagcccttattctcttgggattgataagctgtgaaagagacggatgtgtgtgtatatatgtatgtgaatgtgaatgtgtgtgtgtgcgtgtgtgtctgtatatatataaaatataaaatttcaactagtcatatgtgatttgaaccctgaaggcttaaaacctggccctggcttctctctagcatttaacatgcctctaaaacatctcccttcttggttagtacttcttaaggtatgaaaagctatcttaatattggaattaattgttaattttattgcaaaaaggattggtacattctaaagacagatgtaatgacctttgaattatttgtaggacacttccattctagcattccaaataattcggttaatgtgttcccctttttaaaacatttccaagtcccactttattctaatttcatcatcatctagcactttckgtgctttcataggagtcttcatggaccattttgccaataccgattattttcttctcaataagaaatgtggtggcaagaaataaaaatctctttctatatttgtatgcttagttcacattatacaaaatccttgggttttctagtaggttttatggccaaaatcatgtcttgttctttgtagggttgtactgttttagctgcccagtaggtctcatttttatatatttcggaggatttgtatatttaggcctattacctcaaaatctttttgaagtaataatgcttcttccttcatgtttgcaaagctggtcagtattacccttcatatttagttccaagttacctcatggcagtattttttggaggtttatcttaatccttttcactgggcatatttaaaagggggtctttcagcagagagcagcagaaggcagcttcccctcccctgtcctccttgttcttccctcctctcttggccctttgttcatccaaatagatttatcctaattggtggtgtggaagtcaagggttatcttcagtggtgcagaagtgaattattgcccctttgattacctggggtatttaagttctgctttgagggtaagatgacaagagttgaggttctctgtagtagatgaagtcaagtcttttttgtgagaattgtagcgtctttttgttgcttcctttgtaaattctacatacagacctgcagtagggagaatagtgggatacatgtggggtcttcatacttgacttaaaagctttttccttatttctgttctcacactcttgtggtggtggagtgggtcctggatctgtctctgcaccatcatcagaggatggtctcttccttaaatttagtcactccatttctaatattgagttattggttctggggggttggatggaaggatatatgttgctttggttctaactctaattttcccaaggaaagttccatgagtatgctatgtaagatcagtcattttctagygtagatgtacatttgagtttaggatcttctctataatctgaggatcataaaaaaattacagaagaagatggggatgagggtggaggtgggggaagaggtgcatttcagagtgaaggcactgtaggtttaaagtaataaaaacacccccaggaaacttagattcagttttctaaaataactgaaaaccaactgatattaactgtattagtctgttttcacactgttgataaagacwtaaccaagactgggtaatttataaagaaaaagtggtttagtggactcacagttccacgtggctgaggaggcctcacaatcatggtggaaggcaaaaggcatgttttacatggcagcagacgagaaaatgagaacgaagcaaaaggggtttccccttataaaaccatcagctcttgtgagacttatttcactaccacaagaacagtatgggggaaaccacccccatgattcagttatttcccaccaggtccctcccacagcacatgagaattatgggagctacaattcaagatgagatttgggtggggacactgccaaacctcataaacaataatagcaaatagacataatactctgtcccaggcactattctagggccttgatgtaaattaactcatttgatccttacaaccaccctctgaggratgcagtattttttcccatttttcagatgagtaaacttaagcttagagaaagtgacttggccacagtgcasagccatcattttgagaagcaggtattcatgttgaagsaggctgaatccaggggttttgcttttaatttcttggctctgtttagaactttggaaattcaagctggctaactctatcgtattgccaaggaatagtctacttatctataagcagggacattgctcattattgtacattctttcatctcagagcaacagcaaggcaacttgtgattgattttatactttaatgaaggcctctcagtatgtagagacattttttcccaagacatgattttgactagaggtttctaaaattgtgtacatttatatatagtgtgcaaggaataccattctgctttctccaatatttgattagaaatagagggacaaatctgtaatacttaacacaaactcagtttatagtcagttctgtatgtaagcagagcattccatgtttgtgtctgtttttttctatgcaattaggaaaaacatttatcttctaaattataccatatgttcttgttctgagtaagcagtggttccagtggtttctttgaaaagtctgcttctagaattagatgtatcatttatatatatatttttttactttcccgccttttgatcagtttgggctcttttccttgtttgctctgttgtcatgagtagatttaaatttagttgtgagagcacatgaagatgtggcaccaggaccatttcggggttagcaagggagggcttcatacagtcgtgcaaatattataattggggggtaggttcatgataaaattagcctggagaaatcagactagctgttagtgccaatcatctggctagtagagaacagttttttggttttttgttttttcacctggccaccctaccaagtctctattatttaatgagccctagggctagaattccacacagacagtgatgttagctattatttgtgtcatcatctagctcattgttatccctatgggatgaatgagaagaggattaccattttgccattctatttcaaaacagcttctattcaatcttttctttgggtcagccagtgttctcagttaatgagtggtgggcccaatgtggtagcataacaggaaatacatttttatgagaaagcactgctggggtttccagccgttcctaaaacctcacttgcaattccgtgagtagtaaaaagaagattcaggccacctctggacctacttcaactttgcttcttgtgaataaacaaatgcaaaatagttctagtttgcctaaacattttgaacttctaaggtaaatcccagatgacctgtaagttgggaagcagggttgctaagagaccttgggggtgggaggcgggtagggtctgaggtgctgggaaacgcatatttagtgagacctccagatttctcaatgttcattcaatttttaatgtcctgagtctaacacaacagttatggggactggatctggctcctaagactgcaagagtaaggcctctcccattaaaattctgagattccatgagttttcttccagaacttagtggcagaatgaagtaactgacaagtaataaggaatatatccaaaattagaaaatcagactttcaaatgccatacaggtttattttcttactgtgtgccatttgggaccaacagagcaacggstagttttaccaagagattatatttgaatgatacctgatttggtatttcatttaaagttctggaaatgggctgggcgcagtggcccatgcctataatcccagcactttgggaggctgaggcaggcaggtcacctgaggtcaggagttcaagaccagcctggccaacatggtgaaaccccatctctactaataatacaaaattagccaggcataatggcgcacccctgtaatcccagctactcgggaggctaaaggaggagaatcgcttgaacccaggggacagaggttgcagtgagccaagatcgtgccattgaactccagcatgggcgacaagagcgaaactccctctcaaaaaataaataaataaatataaagttctggaaatggatccttttgctattcaatcatctttctacatgtgaatgtaaatatcactataaatgtaaacatagttaaatatgaaatcaatttcagtttattggattaacttttattgtgagctaatacagctttaaaataaaacagatcaccaagctgctagagatgaactctggtttcagttatatttgtcattaacacttgtgtgagaaggggaggaccatcatgtttaaaccagtgagtgccacagttgtctcttacagctagtaagtagaatgaacttttaagtggctttaccaggaaggctgagtccataagtgaatggttaggaaccctaacctttacagagggaatgttttatagtttctattggcaataacagtgtaaaattgctgagaatcaaaatattgctagccacaatgccattccttctgacccccttaccctacacatacccctggagaaataatataaatttaaaacctgaaattactcctgctttcccatttccccccttattttcatagaccaccaccttttcttttgatccctactatctttctttccagtgggaaagtggctcctttatgtgagccagtatgcagcaattccagcaaacctaataagaaacaattctgttctttcttactaaacagcttattcacgtgggtaaggcctagaatgtctagtgttaccagcttccccagtgaatgactattaygcccgctgccagggagcccctctgcctccctcctacctgagcagatcctgggcagttcatagtgactcagtttaggttatcagttttatccttctggtgacttcctgatcctgggttattctacttaaggtcgttaggacagactgtaatcattacattcatctctgggaatcttattaactctgtaatttttctactgtccagattcgcctcgtcacttctggtggtatcatttaatctgctggctgctgagtgctgcygggatcatctgcattcttgtagcacacgaacactacactatcgatgtgatcattgcttattatatcacaacacgactgttttggtggtaccattcaatggccaatgaaaaggtgagagcagtgaagatgcttggataatttcttttctttgaatgcagtggacccttttcatgtcgtggggttttagatagcctaatggggataaccgatgttgccacattcacttaaacatatatccattactgctttttaaaataaagcaaagaacttcacaaatataaatgccatttatggataaaaatgccataaagttatggagcacagtgcattgctaattcaggtaacttaaactagaatgaaaaaatatatgtactaaattaaaatttaggaaccttctctgtaaaagcattgtagtgcagctgggtaagacataatcctgccttcaacttaaattaattttaaggagaaggtaacagctattttttttaattttttttttttttgagacagagtcttgttctattgcccaagctggagtacagtggtgcaatcttggcttactgcaacctccaccttccaagttcaagcgattcttgtgcctcagcctcccaaatagctgggattacaggtgcacgacaccacgcctggctratttttattttgtatttttagtagagacagggtttcaccatgttggccrggctggccttgaactcctgacctcaggtgatcctcccacctcggcctcccaaagtgccaggattayaggcgtgaaccaccgtgcccagccgatagcagctattgtttaaaatcacacaaaataaatagcttatgaatgactggatttggtatatcctctggtgataatggtgctctctggcttcccttctgattcttcctcatttgctactgctgcttccttgtttccagatgccttttctttcttctcccattgaaacttaaagagctagctcaaatgccacctcttccaggaagctgtctctaactcttgctctcttcctctggtccgaaggcagaattattcctcccagtctctcttttctcctagtcttggtatgtgtccttggtgtaatagagttggtctgtgtaccatgacttacttatctttgaatagacttgccatattgtcaatttggagaatttgtgagcaattgaaatattacatttccaaaggatctacgtccaactcttggtgtccactaataaatgctctttctttggattactttatttctctttgtagctctgtttcctattttgtagtctcccatttccatcttccttcttacacttccatctagttgactactgacaccactgaaccaaaattttcatctttcctcttaaatgtgttcaacttctgagctcttctttcactctttgacttgcttggcccctagatttgatcactcacacatcctgaaaattattcctcctgaataattctgaaatccattcccagagtctccattcttactggaattgcaggcagaagaaattgcatgagccacaaaggaaagaaagacacctaggtgtgttaggggagcggagtcatggtagagttagggaaaggacatgaaaatcattactgccatgtgattctgaattctgttttccctaggttacagtgaatgacaatttaagaaaataattgggatgcaaattgagaaagatatgtctcatttaaatttttttctaccatttacagaacttgaaggtctcttcacagactaatttcttatctcgagcatggtggttccccatcttttatttttttgagaaaaatgtacaaggctcaattccttgctgcttctcctggccrctgtcttggcctcctggctgcttcaaatcatcatgcaaaaagtattcacgggttcagaagattggtgaagacaatgagaaatcgacctgaggagcaaaacaaaggcatcagctcttacaccaaaagagtyaacgctgtaaccaaaggtatagttttgttttttattttaggagaactgactggtaaatgaagaaatggaccaaattttgtgtaaacgattagaaagatgaacaaagtattgccctttgactggttttcttcttcatcctgagaaagatacattctcttgcagctcttcattcattggtgacaagcccccaccccgggactttactaatgagcttgttaaagaggtgccaaagaacatattcctcctttctttattctttctccaccaaaaccctctacttcagaattttttcaggatatttttcagcccaaggtcagaagaatgtgttaatattttaaataaaatatctggacatctacagccactgtgtaaatagaactgcctaatgttgagagtggtttttagcattaggtttagcaagggggagatccgtgggttgtgcgtcagctttgggtgaattttgtttctaccctgtcacggggaaagttcgggttgagtccaggagtgcacactgctgctgccacccaatgcgctacrtatcacttttttttgttttgttttgttttgtttttaaaagatcattttatcttaaaaaggaaagctgatccaagtaaacacgaaagtatttgacacaccccacagattttacatgtgtgtaaatgtttcactttaaaatctctatgacagatacacaggaaacatgagatggtttctgctaatgagtggcccttgagtacacacttagatgctgtctgccctgtaaatttggatctggtgccccagggcagtcaactcttctagcacaggctgaaaacacgtgtgtgtcaactgaggttcacaccacttggggaatgagcctgttttctttccaggtcaggccctggtgtgagatcaattttagggctcctaattggagcacagaaatgtatttggtcaaatttcattgaaggtgatttcttcctttttctgttgtactttatggaaaaaccaagatggaacctgaaagttaatgtatccttgcttttagcaagagactcagtttcttataactagtcctaaggacatatgccgcaattgagtaattttacttttaccctatgaaaataacatggtgctgcactataatatactctcggaatcagtgtgttagttacagctatacagtgaagggggataactgtttctaaatttctttaaggtgatgccaaaaaatggattaaaaaatctgatcagatttaatgttaccagatttagtgcattatttaatgctattggatcttttggataattcttggcttaatttcttagctacttgaaggttaatttgcaagacttttaaaaccttagaaaagttttaaggttgcaaagttatcaacactggggcagagggtggagaggccaatgcgggtagaaggaggcagttatgtttatattgaaggtgaaatttttctttcatttagaatggaaaacatccccaaatgtatcattataaactagtcagccttgactacacaaaattgacctttaagttgcttgagaaaaacacaatgcaaatcgttcagaagggtcaacatcctttggtgctaaaatcttgtgtatgttttcagaatggctttttctgtatgttatagaataatcactaaaggaaaggtagttgaatttaaagtcatgaagcaagactctttaattcagttattttaaacaagaattaaaaccccaaacatccttggcaggctttgaagcacacagaattttctagtatttcttattaaatacaccaataataaacatatacttagtttacctgatgagtttagacataattctatataatgttcgcttatattcatttattaactagcaacacttgtgcaagaacaaggtattctgcttgaaaacactgatttttaagttcctgttgcccgattgtaaagaaaatcatctgacacagaagcctggattttgctctcctaacactggtgttttccttgagcctctaattcaaataaaacaaactgatacaccttacagccttattcatctgtgtctggataactcacttttcatctattgaataagaaaaagtgtttaaacttaataaaataaaaaattgtgcaccaattactacagatccttgaaacagtaagccttggattttagtcaagtaatccagtttttttttaatttaaaaaaaamcatcaccttttaaagaactttaaaaacacctgtgatgccaatgtggacattgccgctgccatgtctttacacgcatgtgtcgtatagctctgtcatcgagttgaggaagtccatggtttgcaaataagggtgggggaatcaaaatttcaagatggaaaaataaaacaaatagtaaaacccatttacatgtaggaaagaaaagttgagcttcaacccaatgtgccactttgatataaaacaagtatgatatatatataaactgaagatataaaacaagtatgatcttgcctttgaaatcataaatgtttggggtacctgttctttgccagttaagatacatatcttattatctttgtttttttcaagtctatgctcctgtttgaagcttttcctgtaatttaggttgtctgtgaaatacctataacatataattcctatagagtatgccacattttttttctaactcatttcaaatgaaattctctcagattctagtttttgagcttgtccactagatctgaaaataaagcatcctttcctgagtccacttgaactaattgtgaatttgttacttaatttactgkcatcttgggaaacaagttttgctgtggcaggaaggctgttttgagagtgagcgttgagtctactctggtttgtggatgacattgcattagggttatttcctgtattaccagtgcccccttgtggcaatatactttatgacttggaatgcaaacaccacttttaaaagcctgttttcaagtttttgaaaggcatttgttttctgttgtttgccaataatctgaaagtatcatgtgaaaggaattattttaaaagcattttaaacctttcccaaaggtaaaatgtgctcagattataggcacttgtaattctaaccttgtatccatttgatcaaagaaaatttgtagaacatttttacctctcatgatcacaatcattagtgtctccctttataacgacctatgttttgtttactttgaaacaccaaatttgttgtcttggttttttttacatgacagaactcatgcagtttcttttttagttgaaagttcacatcttgccccttgaatagtttgaacatttctttcttaattcttttttgtttttgttttgcactgtaaaactgatgaaaactttaagccaatcttaatgcactagcctctgtagtgtaaggaagtgtgagaaggagtttyttaatgagtttacacgtttaaatcaagcatattataagttatatgccatgtgttgaaggcttttctatttatatatataaagatttttagtatttgtttttagtgtccttgtgttgcaataatttaactcctttgactcagttgctgaaaatatttyttytattaagaagtgctcttgacttcaacacccaaacactgaaaatcatgtcaatgttacccaaagataagtttttatacagatacacaccttataagttctgatttattttyttactcattatgctgtgttctaaataaatcatgaatgagaagagtgctttattgtgaaattatttaaaactgtcctttaaaagaaaaagaggaaacgatgaacaaaaactaatctaattgccaagttagaattcattatttaatttacctcctatgcaatgattaatgctgcaaaatgtatggttatgttaccgtatattcacaaaagaaatattattacaaggtttcagaggtagccaattgcattcttttggaaatttactgtactgtttcaatgtgttaagtgccttgttgtaaagtaaaattttaagtctagattcattattttcctgacatatatttttcattatgatatctactgtatgctattgtgatagttttatgaaatgcttacattttaatcaaatatgtaaatttcagaagctcttttttcctacccaccagtaccttaatcattggtttatcacattggattcaaattcaggttccttttttgataaagaggaaatttgttttccatgcttgtgattttgtgtttgtaaacatttcaggaggaatttaggagtgtaactatagtttatacttctataatgttgtcttacatttacatttttaagtgcctaattgttaaaactgatttatgtttctcttctaaagaggatatgtgtacttggtttctaatctctttggttttgctttttaaaaaatgcaagagcctatactttgtatttacctaataaaccacagtgacatcaacagtcttttcaaaattaatattactgtttctttccatttacaaaatgtgtcatttttaaaagagttctagttttagagtacttgttaaaaccgcaagagggatattttcttcaagcactatttttaaaataaagtaataactttcaattagtggatttaaggtgaaaaataattcagaacaatacaaggtcattcatggagaagaaaataatcacacattccatgattctgattttcattgttcacaagaggacaaagtcactcatgaaaagcagacccctttctgtcactaggtctccttatgccttcacaagacagaagcctaaggtaatatcctcaactggagtttgctagacattgcaacagcaaggtgcggtaagtaggttttgaatctgctgatgacaaatgcccctcctccaagataaattttgtaaamgcaattcattggggtgaagtgaataggataagataataaggttcaaagagtaagttacaggagatagtccaggctttatccttagattatctagaaatgatggagcatagatcagaatagtttttctgccacctccacccagaccttggatgaaaagctcatcacagtgacgttcccatcatcctgtggaaacactggcatgctgattttgctggccatatagcttcaaagtctgcccttatctagaatgcatcgtgcaagaaactaacgtgaactcttgttcatcgtgcaagggactaacaggaacttttactaaggggctaattcattctgggttccatttgttttcttcatacaaaagctcttgagtgtgcctcctacgagaggataaaactctctgggcatttttgaaagtactgaggatagtgaagttttttaaagtagtactctgtctcttactccaataaggaatcaataggcactttacaactgcagttaaagtggmattttcaatcacactaatcatgggcaagtttcctaagtaattaaaaccactttaaaacaaaaaagaatggtgatcattcatgcttggtttgagatctctacctcacagctgttgattttagaattagaatgtagtggtgtgtccaaacaagttttgccaccaggattagatgctagtctcactagaaagtgaatttaaattcgcttacttcaacccccatctcatccccaccacatttaaagatagaaaagtatctatatgatctatatgtctacttaacgacagactcagcttcaagtctgtaaggttttttgattgcaggtcattacagtcttgaccctgcgtaatgccttcagtctctccagatgatcatgctattaagaggtcgccacaacttttgataatattcatcttccctgatattttgaatctcctgctgagacacaggaagacaggaaactagactatgttcaccaaccatttgagtgattctgtgtgccatrcactagagctgctgatacataaaattcctgacatttaagtggaaatgtctgcactataagactcgcccataactcctaagtcacatcataagaatttcaattgcataaaatatatgcaagtcttaggaaatgtttgtaagttttaggaaatgttggtcagggccttcatagccagctagatgtttcagaagtggaagtgaattgcttttctggatgcattgtcactgaattttaccattcttttctatttaatattttagcaaaattgcacaatagacatcaaattttatctcatccaaaggttgggagaggtcatattttatctcatccaaaggttgggagaggtcatgttttatctcatccaaaggttgggagaggtaatgtgccatgggctctgagcatccatccagcacattttttgctgggcatgctgagtgcaaggccctaactcctgttacccaggccatttctcaggattgtatttgcagtaagcaatgttaagtaatgaggtagcatatcaccctaaataaagagaagtctttttttctgtttactgtaaagcagtaaaaatgcgaagctcagtggtcctcagttgaggtgaaaacccactgcatatgtaacatctgtcttcacctctccaagtcatccccatgggatttgagagacaagggagccaaagggaccatgctgacactttggatactgctatgctatgtgtagtgaagtcctttgtctctgactcaggagtcttgtgtcttctagcatccaatgaaacaggaacaggctaacttgtgggcttgtaagtaaagtcatagatgcttcacgaattgacatgtaaattttattttcttctaataaataagaatatcagaagcataatactgtattaagttaggatagtaatggattatgtattactgtgtgtgtatatagatatatgtatataatgcacatttaatccrtatgtggcacccgtaatcaaacatagcattttacagttaacgcttggcatacattttttaatctaagttaggatagtaatggattatgtattactatgtgtatgtatatagatatatatatatataaaatgcacatttaatccatatgtggcacctgtaatcaaacatagcattttacagttaacgcttggcatacattctttaatcttcacaaaaccctgtgaagtaagcaaggcaagagaaggtgaccccattttatgacatgaaagggttcataaatgttagagctagaacttgagttttgtttttgtgggctrtagcttgctgcctccctgtcgtaattactatggtcaccatcacagttagggttttgttaggaaattagtttcagaagcaaactgtccttgggacaggttctttgtcacatgctacagatttttcttaaaattacaatttactaatttcaaaggggagaaaagttggctcctagtgcaaaatggccttgaaggcaaaagaactcctcaagaatcctcgagtgtctgaacccacaagtttgttagaataaagcaaactcactgtcaatgagttttaatgtcatatgtctcagattatgtttccaaagcccccactctgcctgcctttcccacattgtgcacactaatcagatacatgaattgtttagccgtaatctctccagaaacttccagaaaagtgaatgatgaattgctagtgtggaaatgtcttttttctaataaaaagagaagatttcattcactaatctatggcacccttgaccatgggattaagagtgatcctgttatcccagtcccaagtattaagttggtgcaaaagtaattgcrgtttttgccattgcttttaatttcaaaaaacacgattacttttgcaccaatctaataactccagctgatccagcacagtgacacaatatgtttagtaccatcctgtaccaccaacaaaattactgtatttcaccagtaactagtgagttgattttttaataacctgcctatatattggagagaatatcagagtttgggcagttctcagaggattttgagattaaattatatcagaattcagttcaaaaacaaataattgttcaatattgttttgtatagcagcctttacaaaagaagtggtgacaagtcttctcctggagctatataaaatgaaattgcccaaactgaaaaaaattgcaaatatgtgggaattaaccaacacacttaactggtggagcaaagaagaaattgcaagggaaatttgataataccttgagacaaataacaaaaatgcagcataccaaaactatgggatgcagcaaaaccagcactgaatgaaatgtatacctacaaatgcatatgttttagaaaagaataatgtaactttagatcttaaggtacttgaaaaagaagacgaaataaaattcaaagttagcaggaggaaggaaataataaagactaaaacagagataaatagagaatagaaaaataatagaaaaatcaatgaaatgaaaagttggttctttgaaaagagcagcagacttgacaaacctttagctagattgcctaagaaaagaaggctcaaattactaaaatcagaaatgaaagtggagatattaccactgattatacagaaataggattataagagtacaatgaacaaatgtacaaaaaacctaccagtaccgaatcatgaagcaatagaaaatctaaacagacctctaattagcagggaggtagaatgagtaatcagaaacttttcaacaaagaaaaccctgaactgtggctttgttggtgaattctactatgcatttaaggaaaaaagtagccagacgtggtggctcacgcctttaatcccagctctttgggaggttaaggtggatggatcacttgagcccaggagtttgaaactagcctgggcaacattaacaaaaccccatctttatcaaacaaacaaacaaaatagctgggcatggtgacacatgcctgtggtcccagatacttgggcacaaaataggaggactgcttgagcctggaaggttaaggctgcaatgagctgtgatcacaccaatgcactccagcctgggcaaaagagcgagatcctttctcaaaaaagaaataaagaattaacatcaatacttcttagacttttccagaaagaagaaagaacacttcctaattcagcctgtgaagccagttatcaccaataccaaagccagacaaaaacactacaaaaaaaaacaaaacttaagactaatataccttataaacattggcacaaaaatcttcaacaaactactagccaactgaattcagcagcatattaaaagggatatataacaagaccaaaagagatttattcctgaaatgcaaggatggtttaacatgaaaatcaatcaacataatacattaacagaatgaagagtgaaaagtacatgatcatttcaattgatgcagaaaaagcattttacaaaattcaacattcttgcatgataaaactaaacatactaggaataaaaagaagttgcttcaacataaggaagttatcatgaaaaagccagctaaccttatgttcagtggtgactgaaagcttttcctctaaaagggaaatgtcaagaatgatcaggaacaagtgaagaatgcccagttctccacctccattcaacatagtattggaagttcttgccagagcaattaagcaagaaaaagaaataagaggaattgaaattggaaaggaagaagtaaaattaactatttgcatatgacatgatcttatatgttaaaaattcaacagaaaaactttagatttcaaatcatgagtctgaatgaaaagttaaaaattaaaaagttaaaaatgaaaaattttaaattgttatatctaatgaatgaattcagcaaatttgcagacaaaaacacacaatcgtttgtatgcactaacaatgaacaatcttaaaaggaaattaagaaaataatatcaattataataacatcaacagaataaagtactttggaatcaatttaaccaaggaggcaaaagacttgtgtgctgaaactacaaaacattgctgaaagaaattaaagatccaaatagatgggaagacatcccatgttcatggattagaatacttgatattgtaaagatgacaatattacccaaagcaatctacagattcaatgcaatctctatgaaaatatcaatggtgttttctacagatatagaacaacctgtccaaaaattcatatggaatctgaagggagtaaaatagtagccaaattgtttgtcagtatgcccaaatttttcagaatagcaaaaactactgaaaaaggaatggttggagaactcatatttcctgatttcaaaacttactccaaatgtacagtagtgaaaacagtgtggtactggcacaaagatagacatacagactaatgggatagaatagagacccccgaagtaaactctcacatatatggtcagttgattttcaataaaggtactaagaccattagatggagaaaggattggggtggggcrggtgggattgctgtttttgttgttattgtttttgtttgtttgttttgagacacaatctcactctgtcacccaggctggagggcagtggcacaatctcagctcacagctacctccgcctcctgggttcaggcaattctagtgcctcagcctcccaagtagctgggactacaggtgcgtgccaccacacccagctaatttttgtatttttagtagagakaagatttcgctatgttggccaggctggtcttactcctggcctcaagtgatccrcctgccttggcctcccaaagtgctgggataacaggtgtgagccaccatgcctgggcagcatagtgtttttaacaaacagttctgtgaaaattggaaatctacatacaaaagaatgaagttagattcttaccttataccccatacaaaaattaatgcaaaaaatggatcaaagacctaaatttaagagccaaaactatgaaactcttagaagaagcagatgaagctctttatgaccttggactgggtaatgacttattaagtatgacatcagaagaataagcaataaaaaacagataaactgaacttaatcaaaattaacttttttgcatcaaattacagtatgaagggagcaaaaagacaatccacagaatgacagaaaatagctgcaaatcctatatctgataaagcagttgtctccaaccttttgacactagggactagttgcgtgaaagacaatttttccacggaccagcagggaggagggagatgatttcgggacgaaagtgttccagctcagatcatcaggtagtagttagattgtcataagaagcatgcaacctagatccttcgcatgcacagttcacaacagggttagcgctcctatgagaatctaataccaccactcatctgaaaggaggtggagctcaggtggtcatgcatgctcacaggccttctactcacctcttactatgcagcccagctcctaacatgccatggactggtaccagtctgcagcctgggggatggggacccctatgataaaggattcatattcagaatatctaaaatgatcctacaactcagcaacaaccaaacaacctaattcaaaaatgggcaaaggatttgaatagacatttctccaaagaatatatataaatgtccagaaagcatatgagaagatgctcagcatcattagtcattagaaaaatacaagtccaaaaccacaatgagatacacgttactaccattaggatggctgttaaggaaaagacaaacacaaaatgacaagtgttggtgaggatataaacaaattgcattcttcatttacagaacccattaaaaaataataaaagaaattgcaacccttattgttgctggtgggaatgtaaaatagtgcagcttctgtagagaacagcatgttgggtccccaaaagaattaccatatgatccagcaattttactcctctgtatttagccaaataaattgaaatcaaggactcaaacagctatttgcacaccagtgttcatagtattattcacagtagcccaaaggtggaaacaatctatgtgtctatcaacagatgaaaggataaacaatgtgatatatacaacaatggagtattattcagctattaaaaggaatggaattctgacacatgctacaaacatgagtaaaccttgaaaatgttattctaagttaaataagccagatacaaaaggacaaatatcatatgattcaccttaaataaggtacctagaataggcaaattcataaagacaaacggaatagagcttatgactaaaggaaagggasaatgacaagttgttgcttattaggtacagagtttctatttggaataatgaaacacttctggaaatagcagtgatagttacacaacactgtgaatgtacttaatgccactgaactgtacacttaaaaatggctaacatggtaaatgttatacatatttttaccacaataaaaaaaccccaaaaaactcctgacatttcagcatatttttaattgaaagaaaccgaarataacttagatatttactaatagaggatttgagtaatacattgtgacatacttaaatcgatttcttaatgggctccttggtttgatctttgcccctttagaggcagcaaaagtgattttgttaaaatacaagccaaatgatggcattccttctcaaaaactcttcagtgatgcaccatcttactgagagtaaagatcaacatctctaaaatgccctacattgctacctctctgattccatctcttaccacctttcccttcctctttccactctagccagatggcctccttgttcctggaaaactcccagcacacctcagcctcagggccttcacacttaccatttcttctatctggaatgctctttccccaggtatctaaaagccgtccatcaggtgatcagctgtctatttaaaagaggccttccctgaacaacctaaatgaaataaaacactcccctacacacacatmcacacacacacacacacacagcaattcctaccatcctcttcgtgtgccttatttcctccatagtacttatcaccaactgacattatacatttgtccatccctttctatatcttttgtagagatggagttttaccgtgttgtgcaggctggtctcaaactcctgggcttgagcaatccacccacctcggcttccaaaagtgctgggattacaggcttgagccaccatgactggcctgtccatcttttgtcttcccccactgaaaagctcttcgaagggcaagcactttgttttgcttagatagtatctccagtgctgagaatagttcatgacaattggtgtgctccagtaaaaatctattgatgaagagtctattcagtgaaattaccagacagctattaaaaaggatgaggctgatggatactcactggcgtggcgagattctcaaaatacattggtaggttaaaagagcaggttaattaaccaaaagtagagtgtgatgccatttatgggggagcaggagggaaattatgtaaacataagaaatccgaaaggatatatcacacttttaatacaagtaactccaagaggtagaaaggcaaaagggtgtgtgtgtgtgtgtgtgtgcgcgtgtgtgcatgtgtacactttatgtatcaatagccttagaggtgtaccagttctttttggtatatttatcctactgaaataatcaaagatgtatatatcccactatggtttataatagcaaaaaaactgtaaggagggtcaataactggctattggttaaactttgaaatatttttaaacaatcractagatttttttaaattcaagtgtcaggaaataaaagcctgcaggctaagcacagctgctgccttttttcttaaagcaaattttattggaaatagccatacccatttatttacttattgtcagtggctgctttcctgctcccacggcaagcagagttacacagttgtgacagagaccatatggcacacaaaatctgaaatatttactatttggtccttttcaggcaaagactgctgatcccggggctagaatatagtaactaaaaatgatttgtgggaggcaagaggatcacttgaggccaggagttcaagaccagcctggctaacatggcaaaacctgtctctactaaaaatacaacaacaacaacaacaacaattaccgaggtgtggtggcacacgcctataatcccagctacttgggaggctgaggcatgagaatcagttgaacctgggaggtggaggttgcagtgagccaagattgtgccactgcactccagcctgggtgacacagcaagactctatctcataaaataataataataataataataataataataaatttttttaaaaatgagccgggcacagtggcttatgcctgtaatcccagcactttgggaggccaaggcaggtggatcatgaggtcaggagttcgagacctgcctggctaacatggtgaaaccccatctctactaaaaatacaaaaattagctgggtgaggtggcaggtgcctgtaatcccagctacttgggaggctgaggcaggagactcacttgaacatgggaggaggaggttgcagtgagccaagatcgcgccactgcactccagcctgggtgacagagtgagactctgtctcaaaaaaaaaaaataccattcaggacataggcatgggcaaagacttcatgactaaaacaccaaaagcaatggcaacaacagccaaaattgacaaatgggatctaattaaactaaagagcttctggacagcaaaaggaactatcatcagagtgaacaagcaacctacagaatgggagaaaatttttggaatctacccatctgacaaagggctaatatccataatatacaaagaacttaaacaaatttacaagaaaaaaacaaccccatcaaaaagtgggcaaaggatatgaacagacatttctcaaaagaagacatttatgcagccaacggacatatgaaaacatgctcatcatcgctggtcatcagagaaatgcaaatcaaaaccacaatgagataccatctcacgccagttagaatggcgatcattaaaaggtcaggaaacaacagatgctggagaggatgtggagaaataggaacacttttacactgctggtgggactgtaaagtagttcaaccattgtggaagacagtgtggcgattcctcaaggatctagaactagaaataccatttgacccagccatcccattactgggtatatacccaaaggattataaatcatgctacataaagacacatgcacacagtatgtttatttgtggcactattcacaatagcaaagacttggaaccaacccaaatgaccatcaatgatagactgaattaagaaaatgtggcatgtatacaccatggaatactatgcagccataaaaaaggatgagttcatgccctttgcagggacatggatgaagctggaaatcatcattctaagcaaactgtcacaaagacagaaaaccaaacaccacatgttctcactcataggtgggagttgaacaatgagaacacatggacacagggcagggaacatcacacactggggcctgtggaggggttggggctgggggagggttagcattaggagaaatacctaatgtaaatgatgagttgatgggtgcagcaaaccaacatgacacatgtatacctatgtaacaaaccttcacattgtgcacacataccctagaacttaaagtattaaaaaaaaaaaaaagatttgtgggagaacaacatggaaaatgttaatgatatcttttcattcatatatttataaatatgtgaataatataaataggaatatttataaagtttagaaatacataagactagaagaatatatacataaatgttataaatgattacctctgagtggtaagaataaaaaggtgatagttggctcctttatagtttcctgcattttcaaattttctatgaaaactgtattactcttttaaaaagcagaataaaatattggctttgaaatatctggtttgcaatgagtatgttcttacctaaaagaagaagtaagtaacctttcaatgtcctttctttctaaaacttcattctcagtgaggtttagaaataagacttcattattaggcagagggccaagcacagttacctaaaccaggaggtaacaatcttgtgttagtttttttttttttttttcttttttgagacagagtcttgctttcttgcccagggtggaatgcagtggtgtgatctcagttgactgaaaccttcgcctccagggttcaagcggttctcctgcctcagcctcccaagaagctgggattacaggcatgtgccaccacgcccagctaattttttttttttttttgtatttttagtagagacggagtttcaccatgtttgccaggctggtctcgaactcctgacctccagtgatctgcctgcctcggcctcccaaagtactgggattacaggcatgggccaccgtgcccaacccccttgtgttagttttattgaagtaactggcttacactttgccatgtaaatataatttattctttcagattttattgactaagcatgctgttaatcagaggccaaagtcaaagtcctaagaatccacttaagaagaatgttagagaccagaggaatctaagagtccttgtgttataactctctcttttgaccagatgaagaaaacaaatcagaaatgttaacagcatagcctggccaacccagttagatttggacagaggtccccatgtggtttccacgatgatttctgcatagtaaatggaagtaaatgaggaagaaataaggaacagagaattcagcaacgctttggcgtacacaaaaataaaatgtcaggaatcagtaacaattgtggccaggctaactaaagtgactaactgttcctgtgggtacccacctcacaatagattcatctcataaattaaacctgctaagtcttcttacttcaccatgtctttttcgccaagatactggcttttttaaaaaaattgttttactgaggtataatttacctatagtgaaatgcacagttaagttttgacaagtgcatacatccaagtaaccaacacttcagtcaagatatagaacatttctaccaccctagaaaaaattttcaatttccctttccaaacaatccaccctgttctaatgtctatcaccataggttcacttygtttgttccagacttcatataaatgcagctatttagtatgtattcttgtgcctggctttttcacttggcatgttttttgatatttatccacactgtagagtgtgtcataactgattgatttttattgtggtgtagtgagctatcaaataagtataccatagtttccccttcccctgcccccctcttttgttgaaggacatctggattgtgttcattttggtgttaaataaaaaatgtgtcctaatcctggcaccaccttgaccaaataaagggatgttttcggaattggattttgtgacttttgagattctgccttacactgttttagatttttttcaggggcctttctcccgtcatctcttctccaagtaaatcatacataatacatgcaagtggagaggaatgaagtaatactgaagataggcacgtttatttattcattatacaagacataaaggctaaatataggaaacaatatcctggcaagtctcacattctaatmttggaaaaagctggtaaatctgcaaggtgtgaataagaggcagcaatagtgacaacctattaagtttaaactattatcaagaacccagtgataactattataattacagcttttatgtattgagtactagttgctagacattgtgctattatttaattattattatttaattattttatttaatccctatgcttggtataggtatatttatcatcccaatttcagttcaggaacatggaggctcagagagtacataaacacatatatagaagacactcaacggaatatatatgaagcaaatcataagaacttaaagggaacaaaggtgttaatttttaaatggccagtggagttgtgcaactaaatagtgctaataacatttctactttctcttttcattagcattttgcaaacccttcttaagccatgcactctctctgttcatgctcattgattctggatgggtgtcgtgtgtggtggcatttacctcccagagaattacaaaccaactgaacaattgtagttttacaaatagagtaatttaataccactctttataacaaaataagtactcagctattttggatatactgtgaccaacaattccggccaaaatccatgtcgaacaaggatataggtaggaaagtgggtggtttaaaattatctttagggtctcaataaaaatgattttttcccataatcctctatctttcttaccacttctgcccacccaaaagatctcttagtattctcttcctttactgcttctgctattatttttttacctatataaaataagagagatgaagcagaaagtattcctttatgtggcaaaatcgccctgaatgtaatttggggaaattcatccttaaggagcactgaatgagctgtgtggtttcatgtttaaaatagtgcatccagctgggcatggtggctctcgtctgtaatcccagcactttgggagactgaagcaggcagattacctgaggtcagaagtcctagaccagcctggccaacagggtgaaaccctgtctctactacaaatacaaaatttgccgggcgtggtggtgcgggcctgtaatcccagctactgggaggctgagacaggagaatcgcatgaacctgggaggcggaggttgcagtgagccgagatcacaccactgcattccagcatgggcgaaagagcgagattccatcgcaaaaaataataataataaaataaaagtgtatccataatattatgaacaatatcccttcctgtattcgtttgctagggcagccataacaaagtactacagactggatgttttaaacaacagaaatttatatttatatcctcaccgttctggagactagaagtcaaaactcaaggtgtcagcagggttgatttcttctgagacctctctcctgacttgtagatggctgccttctgactgtgtcctcacatcctctttcctctctgtgtccttatctcctcttcagacaccagtcatattggtaagagcccatccacaggactccattttagcttaattacctctttaaaggccctttctccaaatacagtcttattctgaggcactgggggttaggacttcaacatatagtggtgaggagaggctgaattcagcccagatttcctatctgccccgcacagctattaacctagtgaaaatgagagatttaggaaaacactacacgtgcagttacatcctgtacaatataaaagggtggctgttggagttgttaaattagtcacagcttcaactattttaaaaycatttatgaatttaaattgcttgtatgggatgatgtatatagtggctactgtttcagagagcaaagccctagaatcagatgacatccagaatgtcatgttgaagatcgtatctgcaaacaagtagtttaaatttttaaaaacttctcttaattcaaaaattcaaaaaaaatgagaaaagtaatctcacaagtagtggttaattatagaagatgagaggtgtggaggttttttttttttgtttggggtgcataagcttaaaataacatgaaaagcatgtcaaaaagaatatgagaacagagtggacttgaaatttaacatatcctactggcatcacttgtttatagaaaaataaaatggatcatgtatttatttgaggactcactatgctttctttgatcacatttttataggtacagcgtggtgttcaaacttttaatgtatggagaaaaatgaaamggctagaaaaatggcccagtacagacaattctatgctcaatccaacttgaacagaaactacaggatttggcctaaacaagactgaaagggaagcccttatcaggaaagccattatctgagaagataaaataaagtaatactttgtttttaaagtattatacaattcatatctaatatttcaacctcagcctttcaagtgttgtctaacaccaataataatattgccacccctccctcaaccggttatcttcttttcatatttctagctacttaaatccaccaagcaaattctggtttcgctatttctggatttaagtacattttctaatgcacccaggccacacgcaggaatggacacagctttcgctctccgcataagttttctagcccagggcaagctctcagaacgtgactcctcgtgcctcgctgcccgcccctcgctccccccactcccgccatcatcccttccgcagagttggctgccaagccgacacccacagattctgcattccacggcttcccagcatcctgctgtctctgcgtggaggaaagggtgctgcgaatcccagtttagataaggaaccccgtcttttcactactacaccgaagcatgcaggaatagggcgttgaccccattctcccagctcagggcacaggtgctaaggccgacccatctcacgggcctgttcaccagtttcccacactcagtacagatcctaacacggtttatgcacttcataaccatgcgtttgtgtttgtcaactgacaaacgagtgataatgacaaacgaatgacacaagggaaaccaacagccaatcagagcgcaaggttgtgttgccagcatcccagtttcagggacagtcaccgccaagcccgaccctgcaaagggtcgtaaccggacttcggggcaaacttcaggtcccccgccygctagcccgccaaccccctccgccaggcagccggcgmgcctccaggttccgcccaggcgtcgctgagtggcggcggcggggagaatgcgcgcggcgcagccaatccgggggcgttcctacaccccctgcccgcccccgaccttccagagcagagcaggacactggcgccgcgggtcaggcagctgcgtgcgcgtctcctccaggcagcaaggggaacccgaggccgccggcgcccggaccatgtcgtctccggggccgtcgcagccgccggccgaggacccgccctggcccgcgcgcctcctgcgtgcgcctctggggctgctgcggctggaccccagcgggggcgcgctgctgctatgcggcctcgtagcgctgctgggctggagctggctgcggaggcgccgggcgcggggcatcccgcccgggcccacgccctggcctctggtgggcaacttcggtcacgtgctgctgcctcccttcctccggcggcggagctggctgagcagcaggaccagggccgcagggattgatccctcggtcataggcccgcaggtgctcctggctcacctagcccgcgtgtacggcagcatcttcagcttctttatcggccactacctggtggtggtcctcagcgacttccacagcgtgcgcgaggcgctggtgcagcaggccgaggtcttcagcgaccgcccgcgggtgccgctcatctccatcgtgaccaaggagaagggtgagcgggaggtcgtgggctgtgggtacgcggatgccgcggatgagtctccaggtgcgtgggggctgcagttcctgtgccccttccggccgcccgcgcccccaggctgcctcacacctgcatcctgaactaacaggtgatggtggtggcggcgcttctcctttctgatgcctttaagatcccatcaagtagtgacggacgcgtgacttgctcatactccaagatcataagtagaaaagtcatccggagattgagggagagtaatagggatggcggaaggacaaggtggcaagccaggttccatctttccaaaagtagccttcccttccaccagctgtgacctcggagagaaactttggcccccatgttagaaagagggaaggatattctttttaccttgtgggtttcgaatgtaagaatttaagaagataatttccaataagataaaaagtccagaaaacacagaagaagcctattaccaaatctccggctttggttcatagcctctgattcctgcgtatgggagtctaaattggacatttttgggggttggaaaacgtgttatctgctgcaataaaatgtccaatctaacctgtctctaccgtccccctttgtcttactggctggcttaggtctctgacttcttttctgagtcactcctacgcatcagtcaggtgttaaatgccttttccttggggaagccttttctcacagcctctgcaagtagggtagcctcccttgttagaaccaggtcccttgcccaagcacttttccttcactacacttttcaaaactgacgctacataactttatgaccttgggcctggatgtcagtcttcaccactgttctgacatctaggaggacagagtcattgctgtctgaaacatagtaggagttcaagtatctattaaatgaatgctatttcctgcccctataacatggcaaagaaagatctaggcttttcagaatctgataaagccagagttttgcatcaggattttaaacggaaaagacaaatattgtatgatccacttatatgaggtgcctcctagcgtagtgaaattcatagggacagaaagtctcagttttgcaagatgaaaaaagttctatggatggatggtagcaatggttgcacaacagtgtgacagtacctaatgccattaaggtgtgcacttaaaaatggttaagatggtaaattttatatgtatttcaccacaatttttaaaaaagaaaagaaaagcaggtaggttttctccaggcacccatgagctcagaagagaattttaggtagaagcagtattacgaaggcatgtagtggatgaggtgtgaactgtgacatttgtttttcagtggggcatttaaagtattatgatctttatccctactcatttaaaatccttagataatgtcttagtgttcatccatgttgtggcatatgtgaaaattttcttttgaagactaatattccatcatatgtacaatcatccctccttatctgtaggggattccttccaggacctcctgcgaataacaaaaccctaggatgctcaagtccctgatataaaatggtgtagtatttgcatatagcctatgcatatcctcttggatactttaaatcatctctagattatttataatacctactacaatgtaaatgctttgtaaatagttgttatacagtattgtttaaggaatgacaagaaaaaaagtctacacattcagtacagatgtgtttttttgatctgcggttggtggaaccaacagatgtggaacccataaatgtggagggtcgactgtatataccacattttgtttacccattcatccattgatagacacttgtgcctccaactttgggctattgtgaataatgctgctataaatagaagggggcaaatatctgagtccctaggagttacttgatcatgtggtaattctaggtttaattttttgaagaaccatcatactattttacagtgagtgcaccagtttacattcccacaggggtcccaatttctccacgtcctcaccaacacttcttttttttttttttttcacacttgcttttaagattgggcttaaatgttacctctttgagaatgtgtaccctgagatgcttccctaccctgcagaaggagatgaacttctatgataccattgtttcattttaagaccttcccagtcccttctaatcaatccataagtcttactgactcctacagcagatatgtgtgctacatccatctacttttctccatctctactgtcagcatcctcatccaagctaccatcatttatttatttttcttttttttctaaagctaccatcatttctaagctgatactttagaagcctcttaaccgacctgcttgcttccgctccagattttcatccacagagcagccaaaagtatctcttacataaaccatgaatcaaatcttgtagctctctggctgaaaccaattgcctctgcactccttacttracctactatggcctgaaggatctggctgctgcctttctcttttttagctctsccttcacttgtacatttcaacctgaccttcctactctagacacactaagctgatttctgccatgcctgggcctgcctcaaggtacgatgtttgtcttctttgggcctggaataacttcttacttgactgattgcttgtcatccctcaggcctctcaggccaattgttacctttcagtgctattttggtcaatgcccagtaccacctcttattttatctcattcatatttttctcagtaaacactggcaagtatttagcctatgaccactcccacctctcaacggaatgtgagtttctttagggcagagattttgttcttttgttaaccactgtatccctacttcttggcacagaatagagaaccaaaagatgaatgaattcgtgcatacaagcatctattgatgtatgtatcacattttattgtaatttgttttgtgtgtctgtctcttcctctggatttcttaaggtaggaattaggttttcttctttgagatctcaacagtgtagtttccaattcttaacaaaacagtttatcagagtgcttcttggtggctactgtttggttgagaatctataacaaggtcatttctaagcattagttggatgactgcttactattaaatctctatttagaaaagggctgggagcctggaggcaatttggtgcttcagtagtatctcaactaaagtatttattcccccaagagacaggattttcttaggcaatgctgctctggtatgttttgggtgaatgtgctgtaaaagaattaatgagagaaatttcagtggctagagaaggtgttgacaagataatgcaaggcaagaaccatatggcatgaagtaaatgcttgtggagttaacatggaataaagaacagatcatctgaataagaaagtgtggctagcagaggatttttttaatagaactttttcaagagtgaagaataaaaagggaggatgtgaatttatttcaagatgatcatcaaaggatgaaggaacagatgaggtgtgagtggacttcccagatcaagaaatggacagcattatcagcctgaagaaaagaggccactgtgactacagtcaagatgctcagctcagcaagacttgaggacagctcaaaccatctttggctactgtgcccagtagcaaagsagtaaatgtgatactgtccagaaacaagatgtgtaggccataagagaaaagaaattatgttaggaattagaggccaataacattattgaatatttattattttttgaaagaactttgctgctgaagttggtgagaatagcagagaagggtatgtttcataacgcaaagagaggctagaaatagttgacttaatacatttgctgaaaagttccagaatgtaggaattttattttttatgtttaaatttttcaaaatttcatgattagacaaggtggtcttcttcttaagcccataaaaactacagtaaactagataggccataaagatgctgtgtccatcattctgattgattcttttcctaagcacaaaaagaaaagaaaattacaaaatcagagctaaggctaccaaaggagcgtttcactcttaagtgtgctgatatggtttgaaggtgtccccaaatgtttatgtattagaaacttaatccctaatgcaacagtgtcaagagatgggaacttaaaagatgactaggtcatgagggctctgccttcatcaatggattagtgctgttatcaccagagtgggttagttattgtgggagtgggtttctgagaagaaggatgagtttggccccctttctctctctctctctttcatcctctcttacccttctgccttccaccatgggatgatgcagcatgaaggcccttgccagatgccagtgctatcctcttggacttcccagccttcagaactgtaagaaataaatctctgttctttataaattacccagcctgtggtattctgttatagcaacacaaaacagggtaagacatgtgatctgtttcttctaaaaggtttgtatacatcacatttttattttaaaatattcaaatataaagcttaaagaacagtataaacttgattatctgcagctcagatttgcttcagatttataaataacacatagctttatttggtatgttcttctaaaacttgcctatgttggatacttaaagtatctttctctaactagcttttgctatttaaaataaccgtattatgcagtattccactaaatagaatgaataaaatggtatcatattctctatttcactgttgataaaaattaggtaaattttgcatttttttgctcttacaaactatgctaccacaagtgcttgtaggacactagtcatgaaagtagaaaaagaaacactgatttgactcttaaaacctgatatggctcggataatatcactggagacttggagcaagagtcaaagcaagttgtaaagccataaaaatagaaggcaaaaagaaattttgaagaattttagaagtatgggatagatcagtctgatatatacctcaaaggggaacaagatgcaaaatgaaattaggaaatgaagataaacagaaaatgaaagttcatctggggaatttgaaaatgaatagggaaacaagttaactgagtatgtaataaaataggtatttgaaatgattttgaaatagttatgcactcacattgagacggcctgaattctccctaataggaacacttctatgatcctatggaagaaaagggtaaatgtaatcagtgtacaacatcctctgttcagtaggtaaagactgagatcgtattgacattttcatgtatcaccttccagtcttttttctacatgtacatgtattttttttttttttgaggtggagtcttgctctgtagcccaggctggagtgcagttgcaaaatctcagctcactgcaagctccgcctcccaggttcatgccattctcctgcctcagactcctgagtagctgggattataggcgcctgcaccacacctggctaattttttgtatttttatcagagggggtttcactgtgttagccaggatggtctcgatctcctaacctcatgatccgcccacctcagcctcccaaattgctgggattacagacgtgagccaccgtgcctggcccatgtacatgtatttttagaaatatatttgcctccttaaaatggaataattttcataattttaaaaattgctttttatcacttaaagtattatgagcatattttcatattattaaatattctcctgtaaagttcttaggagctgtataatatctgtttgtgagaatgtatcaatgtcaatttagtctatactttatttggtttgagttggatttttatgtttccactgtctagcacctgttccttggacaagaatacctgcttcttctgaggaattccttttttctgacctcagtcccttttacccttaactgtggttgaacggsagatgccatatctttacataaactcaccttcttggccacagtgataagtaagttgagggacatactgaccaaaagtagactgatcagaatttctaacctttttgtaactggttaatctgtaggccaggcacagaactcaacaattcacaactatacatcaatcctcacatagttttgggataagaatagcatggcatagttagaaacctcaagccataaaataaatttaagttatctcaagttggtatcaccgcaggacaccttactgaagcatttgaatccttccccagaatttctcaggttgaatctagaaaatagagggcttttccttttggtggtgaaactgggaaaataggcatctcaggatagctcatttttcattgaaaagctggtttgcagttggaaagaatgaagtcagagagagaggagggaaaaataggtacagggaggaagagttctgtgacagtattccctgaggtggcaataccctttccttcctgtttgttcattccatagcctaactggcctgtttgatgaactagcttgagggtatatttttgttattctgaagcaaaagagtcctgatttttgcttcggagccattttgctagaccaaatatttctaaaatacaaatttgtagtttaaaaatggttagatgataagatcgaggacctaacaaaggaaaaataatgttttttgataaataggacaaagcagagatgctatatatgatatattaaataaggagagggccaggcacggtggctcatgcctgttaacccagcactttgggaggccgaggcaggtggatcacctgaggtcaggagttcaagaccagcctggccaacatggtgaagccccatctctactaaaaatacaaaaattagccgggtgtggtggcatgcgcctgtagtcccagctactcgaggctgaggcaggacaatcgcttgaacccaggaggcggaggttgcagtgagccgagatcgcgccactgcactccagcctgggtgacagagtgyggctccgtctcaaaaaaataaataaaaatagggagagagggtaggtgggattggtatcaaatcctgaagctggtgtggaagaccatatctatccaagagaagaggaggcccaccaacacttggcctctgaatactctgcagcagaagacttggtcatggttaaagacaggaggaatgattaaacttttgtagcctaggaaatagtttatgggcctttattacacaaaaggagagttctggtttcaggagtggttaagacatttccattccttctttgtctcaacaatcacataccataccagaggaatgttgaacagaagaacacactctatccacattgaaatgaaatgacacatctacatttctgcaccacaacatctgaagacaragtggctatatgattggcaaatgacttaatagagtggaggatgactacacttaagcatctacagaggggaatgccagtggagtatgagaggacagaatgagaactactcccctagtttaccatgcagaatctcaaaacgggttagaaattggaggtaccagtgatcataggagacagaaatgagccagtagactgagaacaaggatagtttgraatgcacataaaataagatcaggtccttatcactgcccccacccctgcagaaaatagtaggtagatgatctrgagagccttggctgggggatggggggtggggaagagatatggcctggcaaaatgaaaagttgcttctagacaaagacagaactcttgaagtgcttcaactgggygaaagtttgacagagaacactcaacaaccctggccaccgacaaaagaaaacaaggacrtttgtctatcttggcctggaccttagcatagaaaatgttttcctacccctactctaagtggcaactatatacttgaygctgccatttcttcttttttttcctttttttttttttagacagagtctcactgtgtcacccaggctggagtccattggcgtgatatcagcttactgcagccttgacctcccaggctcaagtgatcctttcacctcagcctcccgagtagctggaactacaggcttgagccaccacacccagctaattaaaattttttttttattttttaaagacagggtctcactgtgttgccaaggtggtctgaaactcctgggttcaagcaatcctcccaccttggcctcccaacctgctaggattacaggcatgagccaccatgcccggcagattttgctattttaatgcaaaaacagccatagaacgtatgtaaacaaattagtttttttacatcatgaaccgctgtgttccagttaaactttatttatagatcatgaaattcgaatttcatgatctgtaaatagatctataaatagatctttttgccccttgattttacactaaaggaaagatttaaatttcatatgcttttcacgtatcaaaataacattttggtttttttttcaaccatttataaatgtaaaagctagtcttggctctctggctgtacaaaggcggcaggatggatttggcctttgggctgtagtttgccaaccactcaactagactttaagtaagcgtgttaaaaatgtaagagtgaacattcaccctgtttgtctcaacctaaaggaagatgagaaggaagggggaaaagaatgaataaagcagataaacaaatctcagaatagtatgttagatattagtaattagagtaaatgtaagaggactaaacttactggctaaaggacagcttgccagaatggatttttttaatatccaattatatgttgttttaagagacataatctatcttccccaaaaaagagacattcccccaacataagggtacagaaaagttcaaaatgaaaaggttttacaatactaagaaaatactttaaaaagaaaagtggttcttttttgacaaaaggtactctaagtgatactttattgttaagaaaaaggagggcattcatgataaatggatccacttttaaaaaatttaaaaaacaggaagatagaattctaagcttgaatgtacctaacaatgtcatctaatatatatctgtatttaacagcatatatatatataaatataaatctgtatagctacattgatatttatctacctttagcaaaaacttacagaactgtaaagagaaactgataaatccaccattatagcaaaatagcttaatataagtatctggttgagagatcaagcagttaaaaatttgttaagggtacagaaaatttggctttgaccgttatcaagctttctctattggacatatagagaggacatattcctcaaaattacttggacaaacattcttctcaactttatttagaaatttcattggccacatactagggtaaaaaagcaagcaaatgtcaaatgtcaaatatcagcataagataaaccaggtaaggtagcaaagaagactcaaaatagaaacttttttttttttttacttaaaaccaaataatgaaaatacatggaaacaagacttgtgaactgcagctasagtagtacccagacagaggcaaatgtagagctttaaattatttattaagatagaggtctgaaaattaatgagtcagatggcaaacattatgtattataataaaaagagaacctaaaggaaaagaggaacatgttccaattttagacaaattctttcagagacaaagactacaccctggcttgttttaggaggccagtatattcaagacaaatacagcatgagaaaggaaacttataagccattgtcattcgtgaatatactatttttaaaaagcttacattacgaaacaaaatccagcaattttttaaagaaatttaaaaacaagcaagtttagattcattcttagattacaagttcaataatcataaagaaggcagttttcaaattaacctagaaatgaagtgtatctgcgtgacaatggagacatagacgctacaaagtgagcgtccaagccaagttctgccagcagaaattctgcctctcctggggtcttggtggccacatccagagacaaacagtctcagactggggatggggcctgggggtgaacccaagccctcccaggagacaacttagctgccagtcaccacctattaggctcctccacccactgtctgcacctcagcaaatgcctcctatgctctgtggatcccccagacctctgtgtttaaaaaaaataaaataaaggaaaaagaaattaaatgcagttccaaccaaaatcctaaataagtttgagaaactgattttgaagtttttgaaacagtttttaaaaagaacgaggttttgtagggaaaaggggacttccctattagatataaaaattactataaagactatttatatcttattataaagtaacagtaattaagacaatgtgctttgagcacagtgataaacrcatagaccaatataaccaactagaaagcctgtaaactggcccacccctatataggaaatgtgtatcagagacagcattacagattggtggtgaagggtgaggtagagtggggaccctttgacaaatcatgcttgaacaataggttgtctacatagggaaaaaatgtttggattcctacytcacaataggtagcaatacctaacacaaatataaattccaggtagattatagaaacttaaatgtgaaaacaaaatttaaaatttttacaagaaaatagagaatgtgtttatgaacccatggtaggaggagatttctaaaatatgcagcacaaatcaaaggattgataaatccaactatatttaaaacttctgcttatcaaataataccatttagaaacttaaaaaatcagatgataaaagatctgctatgcatttcaaatatataagaaaaagaaaattgcacagtagataaatgcaaattacagaataggaaatctggccaataaccgtataaaaagctgctctgacccactggtaacaatcagagaaatgcaaataaaaatcgatgagatacgtttcagccttctgattgacaaaactaaaacattgacaagtatcaagtgatggcaactattctgaacaaatgagaacatttaaacacttctgtgaacacgctttcagagtactctccaattcagagagtaaactgcaatgtctagtcatactgaatatgtacatatcttatgacttatcagtcagtccagtcttagcaatgtctttaaaattctgaggaagtccaatggtaaaataaatatcacacataatctttagaaattcgcctcccatgcgtcctttctcagaagctactagaggatgtgcttcagcaaaatgggggagtaaaacaaagaggaagaaayataattcaggaaatgggttctgacacagaagaaaattcccaaatgataactaatagaagtcatagcacctgaaccaaaggcctgcagagcaaccactgcagatttgagcagacatttggaagattccaatgaggaaagtggaactgataaattgtctggtatgtttgactgcatggatgtttacattgaaagacattttcaagggacattaaagaatatgagaaaatttaaccatggagcagggtctttatttcatttgcagctgtatctactgcaccccatgcctggcaaatagtaagaattcagaagtaatgtgggaaggaaggaagctagccaaaatgatagagtacaccatggaaaataggatgaaataggtgacagtaaacaaggaatatttgagaacaatttgatacaacatctgggagcaattttgtggggtttgatggtgggatgtataagtgaaaatcaaataggatgtagttgtggatgaccttaacaagttcatatgttttaaaatcagggctgctgccgacaacagacattttagattacctgccagttatcagattccaaattttgatgtccagtagttctaatctagttgggctattcatttagtcagctaatatttaacaacctctcctatgtaccaagcactatgccagaagctggattttaatggtgagcacaatgagatatggtctgtgccctcatgtcaatctgttgctataattatccttcagttcagaatgtttagaatataggtgtttagaacatggggatatatagcctgaattatttttctgtctttttcttctttttttagaggcagggtcttgctctgtcacccaggctggagtgcagtggcatgatcatagtggactgcagcatccaactcctgggctcaagtgattctccgaccttagcctcttgagtacctggggcttacagatgcatgccaccacacccggctaattttttttttttttaaatagagatggggtcttgttctgttgcccaagctggtctggaactcctggcttcaatcagtcctcccacctcagcttcccaaagctctgggattataggcatgagccactgtacctgtccacctgagaaattttctaagcctggattcastcttatgaaatataatactttgaaatgcacaataactttgaaaatgaaactcattgcttttcatttcaccaggagttactaactataataagctttagagcaaattctccttagatatgatttttgttattattagaaacacatactatcttgataactaaattttgccaatcattcttcttgactagtggtctttatatatacatatatatatatttatatgaggaattttccataagtgacttgaaaaatacagaatgcactccrtggtaggtctgttcagtgttatcaggaatactgtttctcatcttcctttcttggtgtccctttgcaggggttgtgtttgcacattatggtcccgtctggagacaacaaaggaagttctctcattcaactcttcgtcattttgggttgggaaaacttagcttggagcccaagattattgaggagttcaaatatgtgaaagcagaaatgcaaaagcacggagaagaccccttctgccctttctccatcatcagcaatgccgtctctaacatcatttgctccttgtgctttggccagcgctttgattacactaatagtgagttcaagaaaatgcttggttttatgtcacgaggcctagaaatctgtctgaacagtcaagtcctcctggtcaacmtatgcccttggctttattaccttccctttggaccatttaaggaattaagacaaattgaaaaggatataaccagtttccttaaaaaaatcatcaaagaccatcaagagtctctggatagagagaaccctcaggacttcatagacatgtaccttctccacatggaagaggagaggaaaaataatagtaacagcagttttgatgaagagtacttattttatatcattggggatctctttattgctgggactgataccacaactaactctttgctctggtgcctgctgtatatgtcgctgaaccccgatgtacaaggtaattaataggtgtttcctttgttcatggcaaaaccaggtaatttaaatgaggattagcaacctcagtgatctggtggcttctaacactgagcaatgtcttcaggctggcaaacaaatacttgcaactcatagggagttggtaagatgttaacagtgaaacccaagtttctagacagtaggactgaggtcataacttgcttacccctgcttaaatctctacgcgtctgattctatgtgaaatctatgatcatgaaagacctttagagaagaacattctagagctgaagggaatcataatgctgatctgaacacatcttgtttttttgaaattgragaacagaggctcagagaagttgtgtgactttcacaaggtcacacagctagttctaccacctagtcccaatagatactgaaagtctgtggcagttcagagtagaagaatacagggaggatggtgtattattagtttctgttgctgttataacaaattaccacaaaccgagtggcttaaaacaacacaagtttcttagagttctatacattctaagtctgatatatgtctcattggactgaaaatcaggatgttgacagggctgcattcctttctggagggtctaaagaagaatcaatttccatgctgtttctggcttccacagctcatggtttccttcttctgtctttgaaggcagcagtgttgcatctctgtaaccatttgttcatagtcacatcttcctctgactctgaactcaacagggaaaggttatctgacttaaaaacccatgttcttagattgggcacacccaggtgaccaaggataatcttccaatctctgtgtccttaagttaattacatcagtttagtcccttttgccatgtaaggtattatgtttacagactccaggggattagggtgtgtacatcttgtatgggcccgtattctgcctactatagatgtgattatacctacctgtattagttaattattgctgggtagcaaactacccccaaatttgctagctttataaaaactgccaccaggcattatctcccagtttctgagggtcaggaatccaggaatgacttccagtttagggtttctcatgaagttagagttaagatgttggctggggctgcagacttgaatgagaccaaagaatccaggtccagggtggctatccatatgactattggccaagttccttaccactgtgacccttccataaggccacttcacttggtggcttccttccccaaaagtgagcaacctgagagaggagagagtggcaaagatgaggagccactctgatctcagaagtgacatgccctcacttcacccttactctcttggtcacacagaccaacttggtacagagtaggaggggactgcacaaggatataaaccacaagaatagggaatattgggggccaccttaggctatcacatgttgtcacagtctacttagagagtcaatcccatgttcataatgagagtatgacttaggatgctcctgaatccagagtgttttctctttggcccctctatctgttacactatcccacttctaagtcacagagtggcacaggcaccctggggctagctgtctctacctgaaatgtctgaccaatgcttcaacttcactgaggcagartcaggcctgaactgccaactgaccagttatgcattagtggtgatggaaagtatgcagaggagggcacgttcgactctgtcccatgcttatcttctggtttattyttccctttttacatagaaaagrttcatgaagaaattgaaagagtcattggcgccaaccgagctccttccctcacagacaaggcccagatgccctacacagaagccaccatcatggaagtgcagaggctaactgtggtggtgccgcttgccattcctcatatgacctcagagaacacaggcaagtccagggtcttcctctttgaatgcccttgacggaagcagggccctctaatccagggtagttgaggtgaggggtgtggtgactgttgtctagcttgatccttctgaagatttagcattgtgtcatatgtaataaaatgtctagggaatgttcagccctccgctgtgcatcactggttgtactagaattctactactgcttagttttactagtagttctgtagccttcagagcatacacaattatactggcaaaacaaataatgtcaaaatttaaattggctatgttggcagaaaaagctccagaattgacaaaggcacctctccctccttttcatggaggtcagaagagctcatctaaatgtggattaaggattttgcctgaaaattatcttacttcaacttttaaaattctgcagctgaagcataaatatgaaataattagaaggccgggtgtggtggcctacacctgtaatcccagaattttgggaggacgaggcaggtggatcacttgaggtcatgagttcgagaccagcctggacaagatggtgaaaccccatccctactaaaaatacagaaattagccaggcatggtggtgcacaactgtagtcccagctactcaggaggctgaggcaggagaatygcttggacctgggaggttgcagtgagctgagattgcaccactgcactctagcctgggtgatggagcaagcctctgtctcaaaaaaaaaaaaaaaaaaagggctgggtgcggtggctcacacctgtaatcccagcactttgggaggcccaggaggatggatcacttgaggccaggagttcgagaccagcctagccaacatggcgaaaacccatctctactaaaaatacaaaaattagccaggcatggtggcacacttctgtagtcccagctactcaggaggctgaggcaggagaagaatcacttgaacccgggaggcagaggttgcggtgagccaagattgcaccactgcacttctgcacttcagcctgggtgacagagtgagacagcctgtctcaataataataataatmatcatcatcatcatcatcatagttagaagagcccatctttttctaaagtcacctgtttcagcctctcatctacagtgaactctgtctatttggtcatgtccagactctctttaaacatccctattaacaaagaatttacctctggagtcagcccatagtataatgggcttgatctagttttaagacagttatagcatgccgttgcttatacatgacattggatcacttaacgggttttttttggtacaagttagatagactgtttatagtatcttttgggcattgtttaaagcgcatattgacttgtcagctggtaagagccagggttggctaccctgtatatttctttatcttagtttacctcctcattacattgttatatggacataaatgaccctgtaaactaagttttatacatattgggaattttaatttttagggaacgtttacttgaaatcccctattgtttctgttttagtgttttctcttcattgtaatgtttttatggttttatttattaattcagcattcattggagcactgcctgctccctgtctcaggtgggtcctggaatggtgcggggagagggatgccagttggtaagatcttatccctgccctcaagtacctcacagtttggtctcagccaattaaagtgataggtatataactacatttttttttcagataatgatgttcagggagaactactagtaaaagcatactgaataacacccatatgtttccttttgttttagtgctccaagggtataccattcctaaaggcacattgatcttacccaacctgtggtcagtacatagagacccagccatttgggagaaaccggaggatttctaccctaatcgatttctggatgaccaaggacaactaattaaaaaagaaacctttattccttttgggataggtcagttacacttttttaaactgcataatttttaaaagaagtagaactaaaataatattttattatttcatgttgttttaaaaatgtttcwttcttggcaagctaatataagagaagggatcaataatttagacaaggcatctcccctatgttcatttcagattttaataaagcagttggttttaaatctctaaatgtgactagaaattttactttcagagctgatcaggtaattttggggggtcccagggagctacttaagagcaatttctgatctggtctggtgggtgagaggatgggttctctaatctcaacagttcctcttttaggttcctagattaggaacatagaattctttctgtggaaaaagggaggctctagggattcttatctgaatttttttgccttaatcttccaggcaaaagtggaggaaagaggtaagtaggcacagaagagacaggatagctgccacactggatctgtctctagttcctgtctagaatggggataggtttttatgagtaagagttaaaatgtggatttgatatgtaaaaattctgatcagcatatgctgtgggaggctatgtggtatatatggcaatttgacttaaaaactccatctgcatttagaatactcaatttagatatttcatataaatttgtactttttgaaataggagaagggatggtattataatccttcatttttttctgatctcatttttagggaagcgggtgtgtatgggagaacaactggcaaagatggaattattcctaatgtttgtgagcctaatgcagagtttcgcatttgctttacctgaggattctaagaagcccctcctgactggaagatttggtctaactttagccccacatccatttaatataactatttcaaggagatgaagagcatctccaagaagagatggtaaaaagrtatataaatacatatccttctaagcagattcttcctactgcaaaggacagtgaatccagcaactcagtggatccaagctgggctcagaggtcggaaggagggtagagcacactgggaggtttcatcttggaggattcctcagcaggatacttcagccattttagtaatgcaggtctgtgatttgggggatagaaaacaaagtacctatgaaacgggatatctggattttacttgcagtggcttccaccgatgggccaatcttctcatttcttagtgcctcagacatcccatatgtaaaatgagagtaataaaacttggcttctctctacctctcagcactaatgatggtcaaatgccttacatcttttctgatatctctaaaatgctgttaagttctggagaagaacttcaggagaagaagatctatcagctggcttttaaagacctatgacaacatgaaagtggtgttcagcctggaatgctttgtcagagatgggtgtggatttaggttatactgggggagaacttttctcagcacagattctatgccagcttctttgggcttgttctgtcactatctttttgtttatgattttagtttttactttttgtagatgtgggatgaagtggactctgtcgtgtatattgaggaaaaaagaaattataattttaaaaaatcccttgtaggattattatctaaatttatatgtctaacttctactacaactacaggaacagtgagccttgctacttctttagtagcttcttggcagaattcctttctactgagttatttgcaaagatgcagctctacctttttacttaaggcctgaatggtgagcatggggattttgatactgggactcatcaggaaaggattctgctttcaaactatactgaacattcctgtcctagcgtccctgccaccaggcccaatgcatctgatccttgaatatactctcaaagaattcactctckttttattaagagaactaaattgtttctaaatgtagatggtccctctggaaaagcagttttcagcaggggtggtaaccccttcagagggagtttggaaatgtgtgggtatgattcttggttatcataatgatgggggtgctactggccttctgctgccatgggaccaggatgctaaatgtcaaggtagtcctatacagtgaagaattgtcctgctcaagatgccaggatttcccccagtgagaacatgctctaaggaatgaccacccctttcttttattctcccacagtgctccatgtacagaagtaagcatagcagtcatatgagcaaccacattcctgaacctttcctcatgctggctctacacttaatcctttacttgtatgtttctgtaattcttacataaattctattaagagggtggcatactgtagtggatgaagctgaggcttatagtaggtaaggcacaaagttaaaaagtaacatcactgggtttcaaacctactggtctctgtgactaaagaacactttcagaaccacttcttgattctgccaccacttgatcccataacaggctaccccttggcctcatgctggagttgtgtgtgtctgtcttcatcccaggctgagctccttgaggtgaggatgttgtgctgtttgcctccctcacagtgccttggtcttagtggatgcccagtygtcttgtgaatgacttttaagamgtgtacttaagagaaaaatcctaccttatttgaataattacaagtcatgtttttgttgcttaaaggtgataaatcagtgtatattatttgttaatgtccattaaagccagtttttaaaaaaatcactggacttttgtgtttaccatttaaaacaaccattttaaacaaacttagaacgatgccttagctgtttataggtaacagaatgtaaactcccaccacctggagactaggccatatccagggacctcacactgactttcctaaaggagagaagcagctacgctgttcatactgatagagaagagggcaagaaaagatccagagtggctgttactttgaaaattaaacgaaagatgaaattctgaacttaaaacacttctgtttggccttctataactgatcacccttctttgctctgttttccagataaatggagacaccagatctccctaacctctgacttctgccgttagccatactctgtgtagttagatctcagtctgggaatggcattccagggcaattgtgaacatgaggctagatttttcctttgatttagcacattcctaggcagacttttgcaagctcaaaaaatgaaaataatatctgcttaaccaaaacataatcataggaagaagaaaaattttaaaatgattgatttttgactctacattctttatctaccatactgctcttttcctttttagaaatattactaagcactttcmgtatagataaatgaaatacaggctaatctttaggtgtcttaggaatttttgctttttgaaaaagaaaagctaatagcctaactgcagaggaactgagtggatggggtagctgctgtatagatttttagatgagatgatacagtgtggattacactgtaccttgggcgggagagtttgttcttgatatggaattcatatgcttttgaattgcactaataactcagcattaacaagtatattactccttaaattatacatgcattttcaatattcctaaccaaatagtttatagcttattgagaagaagtctgttcttggagagatgttgaaattagatgtttattaaactttaaaatataatgccttaagctgtggcactttaaaaacatctttatatataaattgctaaaaggactgttaatgcttttctcagacacattggcattttacaattttgcacatggtttatttgaaatcaaaaaataactatactttgttttataagtctacctaatatctcatttttgattctcatcgttagcacagttttgttgcttttattaaactattttaactgagaaagtgtcatgtctgttttttgttttgatttaattgctacgcaaaattttgttttaccagatgtcaagttaatgtaaaaagaaaagaaaataggcctccaaagacagatgtccacaatagaatgtaagcatggtccttagaaacaagggtaattctttaaaactttccccatggagtgaagttccttagaggactgcatcaccacccaggtgtcttatattccctgtagaagcccagcatgagttgagttgagaggagatgggcccacatgagcctgctgtggccaagtattgagtgctggtctcacacttcccagctcaggaaaaagagctttttcatacttgaaccatattttgcctgtggagggaccccctgccagctttttccacagcctactcttcttcctgaagtcacagctcagacagcatctcctcagagaggtcacccaccatgacatccaaagtggcctttcctgagaactccctaatctcatcacccaatttcctccagagccctcatcactaactgcaactaccttgtttatttaaaccttctgtttctatcctctctctcatctccactccatgaggatgtcagggactgactatatctgataacttaccaagagtggatgccttatgcagagcaggcatcagtaaatatgttgggcaaatgaagaattaagtgagtttgatggaaggtgattatttgaccctttaggctacagaggtgatgatacaggcaaacctgtcattgttttctgtctgctgcctcagtgactgtggcttgtgccaccagagtatgagttctggtgaaataacagtagtgaaacaaggggaacaccaaataatgtggcaccctcaaatctacttcggttttgctgcactgtttttagaaaccaaattcatttaagtagggtatttgttcattagtaaataatttggtattatcatcattgaaatgatatacttttatattattttatttattttttttgagacagggtctcactctgttgcccaggctagggtgcagtggcatgatcacggctcactgcaggctgaagtgatcctcccacctcagcctcctaagtacctaggactacaggtgtgtgccaccatgcctggctaagatatttcatattcttatcagttcttccctttgtatgagggtcaaataatcagtttttgttaagggaaaaggctaattatccataagactctcagtggattgctcagcaaaatccctgcagccaaggatagagtaggatgatgtattcaaaattctaaaagaaaaaaactgccaaacaagaatattgcattgggcaaaaatagcctttaaaaataaaggataaagtcatcccaagacaaatgaaactgagggaatctgtttgttaccactagacctgtcttataagaaatacttaaggaaattcttcaaattaaaatgaaaacatgttaaatagcaacatgaaaacataaatctcactggtaaaagaaaatatacagggaaatatagaataatgtaacactataatagtacataaattactttttaccctaatataaaagttaaaagatggctgggcccagtggctcacacctgtaataccagcactttgggaggctgaggcaggcagatcatgaggtcaggaaattaagaccatcctggccaacatggtgaaaccccatctctactaaaaataccaaaattagctgggcatggtggcacatgcctgtaatcccagctacttgggaggctgaggcaggagaatcgcttaaaccaagggagttggaggttgcagtgagctgagatcacgccactgcactccagcctggtgacagagcaagactttgtctaaaacacacacacacacacacacacacacacacacacacacacacacaattgttaatggatacacactataaagataattaaacactgaattcaaggacacaaaggttggggagaatggcgtttttgtatgagattgaagttagtatcagcttgaaatagacagttgtaactataagatgctttatgcaagcccaaaacataatcaaatcacaagggaagacagaaagagagggagaaatgaatacagagcaacaaaataaccagaaacagttatcagactggcaatagtaagcctttacctattgataattactttaactgtacatagacttaacctccccagtcaaaagacatagagtaactgaatggatttaaaaagaagattcaactgtatgttgtctacaagagactcacttcagatttaaggacacacataggctgaaagtgaagcaatggaaaaagatattccatgcatatgttaattaaaagagagcaaggatggctatactcatgccagatgaaatagactttaagtaaaaaactgtaactagagacaaaaaagaccattatataatgatgaaagggccaactgaacaagaagatacaattataaatatatacacatccaacatcagtgtacctagatatataaaagcaaatattgatctatctaaagagagaaatggacagtaatacaataacagtaggagacttcaacaccctgctttcaataatggatacaacatctggacagaaaatcaattaaaataaaaacaggtgacttgaacaacactatggaccagatggacctaacagacaaatatagaactttccatccaacagaagaatatacattcttctcatgtgtacacaaaacattctccaggatagatcatacattgagtaacaaaacaagtcttaacaaatgtaaaaaaaatggaaatcataccaaacatcttttctaaccacaatggaatgaaactagaaatcaaaaacggtaagaaaatgaaaaaattcacaaatatgggaaaacaaaacaatacactctaataaagattgggtcaaagaagaaatcaaagggaaattcaagaaatatctttggacaaataaaaacctaaacacaacatactaaaatgtaggggatgcagtaaaagctgtgttatgagaggagtttatagtgataaatgcatacgttaaaggagaaagatctcaaataaacagcctgactttatacctcaagagaccaggcagaacaaaccaaactaagctcaaagttagtggaggaaaggaaataataaagattacagcagaaataaatagaaaatagaaaagcaatagaaaaatcaacaaaaccaagagttgattttttagaaagataaaatcaacaaaccctcaactaaactaagaaaaaaaagaagacaagaggttccaagacggccgaataggaaaagctccagtctacagctcccagtgtgagcaacacagaagacgggtgatttctgcatttccaactgaggtaccgggttcatttcactggggcttgtcggacagtgggtgcagcccacggagcagggcggggcatcacctcacctgggaagcgcaaggggtcggggaattccctttcctagacaagggaagccgtgacagatggtacctggaaaatcgggacactcccaccccaatactgcgcttttccaactgtcttagcaaacggcacaccaggagattatatcccgcacctggttcagagggtcccacgcccacagagcctcgctcactgctagcacagcagtctgagattgaactgcaaggctgggggaagggcgtccgccattgctgaggcttgagtaggtaaacaaagtggcctggaagctcgaactgggtggagcccaccgcagctcaaggaggcctgcctgcctctgtagactccacctctggggacagggaatagctgaacaaaaggcagcagaaacttctacagactttaacgtccctgtctgacagctttgaaaagagtagtggttctcccagcacagagtttgagatctgagaatggacagactgcctcctcaagtgggtccctgaccctcgagtagcctaactgggagatacctaccagtaagggcttactgacacctcatacagccgggtgcccctctgagacaaagcttccacaggaaggttcaagcagcaacatttgctgttctgcagcctctggtggtgccacccaggcaaacaggatctggagtggaccctcagcaaactccaacagacatgcagctgagggttctgactgttagaaagaaaactaacaaacagaaaggacatccacaccaaaatcccatctgtattcaccatcatcaaggaccaaaggtagataaaaccacaaagatggggagaaaccagagaagaaaagctgaaaattctaaaaatcagagcacctcttctcctccaaaggaacacagttcctcgtcagcaacggaacaaagctggacagagaatgactttgatgaattgagagaagaaggcttcagatgattggtaataacaaacttctccaagctaaagggaatgttcgaacccattgcaaagaagctaaaaaccttgaaaaaatattacatgaatggctaactagaataaacagtgtagagaagaccttaaatgacctgatggagctaaaaaccatggcacaagaactacgtgacgcatgtacaagcttcagtagccgattcgatcaactggaagaaagggtatcagtgattgaagagcaaatgaatgaaatgaagcgagaagagaagtttagagaaaaaagtgtaaaaagaaacaaacaaagcctccaagaaatatgggacgaggtaaaaagaccaaatctacgtctgactggtgtacctgaaagtgacggggagaatggaaccaagttggaaaacactctgcaggatattatctaggagaacttccccaacctagcaaggcaggccaacattcaaattcaggaaatacagacaatgctacaaagatactcctcgagaagagcaactccaagacacacaattgtcaggttcaccaaagttgaaatgaaggaaaaaatgttaagggcagccagagagaaaggtcgggttatcctcaaagggaagcccatcagaataacaacgactctctcggcagaaactctacaagccagaagagagtgggggccaatattcaacattcttaaagaaaaaaattttcaatgcagaatttcatatccagccaaactaagtttcataagtgaaggagaaataaaatcctttaccagacaagctaatgctaagagattttgtcaccaccaggcctgccttacaagtgctcctaaaggaagcactaaacatggaaaggaataacaggtaccagccactgcaaaaatacgccaaattgtaaagaccatcgctggtaggaagaaactgcatcaactaacgagcaaaataactagctaacatcataatgataagatcaaattcacacataacaatattaacctttaacgtaaatgggctaaatgccccaattaaaagacacagactggcaaattggataaagagtcaagacccatcagtgtgctgtattcaggagacccatctcacgtgcggagacacacataggctcaaaataaagggatggaggaagatctaccaagcaaatggaaaaaaaaaaaaagcagcaattccaatcctagtctctgataaaacagactttaaaccaacaaagatcaaaagagacaaagaaggccattacgtaatggtaaagggatcaattcaacaagaagagctaactatcctaaatatatatgcacccaatgcaggagcacccattttcataaagcaagtccttagagacctacaaagagacttagactcccacacaataataatgggagactttaacaccccactgtcaacattagacagatcaacgagacaggaagttaacaaggatatccaggaattgaactcagctctgcaccaagtggacctaatagacatctatagaactctccaacccaagtcaacagagtatacattcttctcagtaccacattgcacttattccaaaattgaccacgtagttggaagtaaagcactcctcagcaaatgtaaaagaac

SEQ ID NO: 94735 - DNA, 77588 bp, Homo sapiens
  misc_feature (1)...(77588): n = A,T,C or G
tcctagtaagggacatttttttcaaaaactcacaggttctaggcccataatttttgtgcataaagttagctggcataccaaaaagtggagtcccagattcttggaatcccagacttttctttttcttttcttttcttttttttttttttttgagggagttttgcactgtcacctaggctgaagtgtagtggcacaatctaggctcactgcaacctctgcctcctgggttcaagtgattctcctgccttagcctcccaggtagctgggattaaagtcgcctgccaccatgcctggctaatttttataattttagtagagatatggtttcaccatattgggcaggctggtctcgaactcctaacctcaggtgatctgcatgcctcagcctcccaaagtgctgggattacaggcatgagtgcctggctggaatcccagactttttttttttttttttaatttggagaaacctattttcaaaagatactgacctcaagcctctgactggatccaattcagttacttagatccaatcacatcccagatccactccactaaaattgctcaaataaagtcagagaggtcaaaacaaaaattcatagagcttgaatttaagagagaactctgccatgatcccagttgctgtgagagatgagtgggcacataatccctggtgggtaccttcacttggccataccgtgctcctgtgtgtccctggaggtctgctttgggtcccacttctgacaccaatctattaaaataaatactttagacaaataaaatttagtagagtttatttgagcaaagaagtggttcatgaattgggtagcaccttgaaccagtaacaattcagagagcttcacccagcaatagtggataggtagtatttatagacagaaaaagaaagtgacatatagaaataacctgatttgttacaactgtttatctgccttattttatcatggtctgagcagttgcagcctgtaattggctgaaatctcagttgctatgattggctgagacctagctacttgttacaagaatatactctcaagttagattgtagtttgtttacatattaagataggttacagtttactatgtatggagagaactttaggccatatttaatttaatagtatataataaagacccacgaacatcaaagaagtcctccgcctactagaagtaactgtcatagtggatcctgtgttcactttttttttgctttgatctcatctttatatataattctgtaaaaaaaatttcagaaagcactgttgttgagccccatgttaggcttgggagatcactactggctgaagagaaagtgttaggttcaaataataaaatctgttaagtgctagactgtagcaaatgcaaaaacctatagggtataaatgaaaaatgaagattgcatagacaaacttagtaacttgaagcatgagtcaatttatgaagaacagagaatttgcttcagaggaagcaacaaattcaaaggcagaagcatgagaaattaaagcaacaggaaaagggggtgaggaattaggtgtggttagagatgaagctaggatgatagattgggaggatgattaggtgggtttttagtcctcatttacaacttgtgtcaatccaaggccgaacatagtctaattacagtgttgtcatatattttttaatgaaatttgtgtgtaatggacagcagtgatgcttcagaatggtacattttcagatctgtaattattttccttgggaaagaaaaaatagccacttgtcttagtctacttgggatgctataacaaaataccactagtttggtgggttataaacaatagaaatttatttctcacaattctggaggcttggaagtccagatcaaggcacaagcagattcatcctccttcctggttcacagatgactccttctcattgtaacctcacgtgatagaagggacaagggagctagctctctggggtctcttttataaggtctaatcccattcatgagagcctgccctcatgacctaatcacctccctaaggctcacctccagatatcttcacattaggattcaacataagaattttgagaggacacaaacattcagtccacaatactgctgcagtattttttttttaacaattctcaaatctgaggtatctatagtatgtaaagatgtgatgtggccaggtgcagtggctcatgcctataatcccagcactttgagaggccaaggtggacagatcacttgggcccaggagtttgagaccagcctgggcaacatggtaaaaccctgtttctacaaaaaaaaaaaaaaaattagctggacatggtggtgcttgcctgtagtcccagctactagggaggctgcaatgggaggatcacctgagtccaggaaggtcaaggcaacagtcagctgtgatcatgccactgcactccagcctgggtgatagcgtgagaccctgtctcaaacaaaacaaaacaaaaagtgatgtaaagaaaggagcactgtagccagaattcagtgtcctggcatagtcactagtgtgccgtatgaccttctacaaacaccctcctttggctccaatgtcatctctcaaaagaaatagttggacaaacaacattccagctgttttctactaatagtctaacaccacttaccatcttctaaagtgggagggccaccactgcccctcctcctgcctagtgctgatcagatgacagttacaatagaatcattcttcttttgccagaagtgcaaatcatttcccaaatgtggccttgggttttcaggagcccagtagtgacttctgtggtccctgacttgcaccctcaccctattattggagttgtgcttcatttctctgtgtggaaagagtgaagtattgggaaatatgaccctggtcaccaaaccaactcagagacagcaagtgctttggcaaaggaaagggctggcacagagaacagagtaagtaatgactacttttatttttgtactataaatggataattatagtacttaaaaaatagacatcaaagaagcattatctaacaacatacatgatggtgggctctgagtgcagcagaagcagtgcgtaaagtaggtcctttgcctccaacagagcagtggtgggcaaaaaatatcaatgcttttctggtcttcaagctttatgaagtaggcaggcagagagagtcgagctgacacagtactgacactgtcaggtgatagatgcatcgacccaagcacaggattttttaacagccaggagcatttggggttgggattcattgagtaagttgggattttccttctatttgtgagaaattaataatttctggcttatggataaaaagtgaaaaattaatgttgcctctcctgttttgttgagcaatttaaaaatttcatatggcagaaaaccagaggctgtggctgctcagggtggcatgacagcaaagtccagaaagttcaatcaaaagcttacctactgcaaaattaaagatgggtgacattgccactcttgtcagcagagttttcaaggaaataatcatatgatttgcataattaagacatcattagttcagaagggaatgatcatgtatttgtatggcaaactgaaacatgctctcaggatgacttataagacatataaagtaaaatctctaataatactgaataacttatcaagtaattctgtgctcttgagcttttagaaaaaaaatttatcctggcagaccttaaatatcttggtttttctcatcatgctagcagttgttgtaataccaggtgctttctacctccattttctcctctacttagaaaacctttattccacttacagagcattatggccttccaaaataacgagttgaaattaaagtctagaaactgcgaagcataggattcctgggatcgaagtagtcaaaacacacgcaaaacaaacatttgtataaaatgctgcctttggaaaaaagaaggtgatgtgtagtacagcttatgcaatcttgattcagggttttaggcatattctgcaatctgggtgagaatttatttggactcttgctaaggagatgaaatgttcatttcaccccaaacacagattttgcacacagagggtgacaatagcctattttaccataagtattagtggctctggggtttcattgagtataggtcaggattctttttctattttatgggaagggaaggatttctgaattattgagaatgaactatttttctaacctcagccagcagtctccaaaatgcttgcatgagatcataagactcactaagttggacaatgagaaccatgcagtacacattcattactacccaaggggggaaccacctacagaatgtggcctttcacataaattataccttctgatttgttttcttaggatttccaggtatgaagttttatgcaatgaaaactaaccattcactagccttaaaaacaatgataataatgatggccatccctttgagcaatttttatataccactcagttaggttaaatggttttgcatgtaatatcagcatttattgagcccattgctatttttacaccattctgggtactacatgtgaattcattcattaaattctcacaataaccctatgtggtaggtgctaagggtacccatcttttacgggtaagaacgttgaggcccaaaaaggttcagaaacttagccaaggccacacagctaatgaatggcactggcagacttcaaattcaggacagtttgttttcaggggtcgtgttcttgactacatgctgttttgccttttcataacaaccctcaggctttcgtgctatcctcatctaaaatgaagaaacaggtttggagcatttcaaccatttattaaatgtagctcacgtaataactgaccaggctcagattttatcccactctgacctcaaggctctcatgcttttcacaattccatacttgttagacagtacccctgcttctagaggggaaaaaaggagggagatgttctccagtaaacattatctacgtttagatttggagcttttgctgttatagtaatattatcataaaaattaggccaattaatatatttggacattcttactaataaaccccagagctgcaagtttcccacagtgattcccaatggttctacctgaagactgtaagagtcatatgtttataccatctgatttccggcatgcagaatcttgtttctcaaacacaaacatccatttttaattgtttattgctcacctctccttgatacttcaaatacttatcagatacttcaaacgtaacttatcaaaatttgagcctattatttcctgcccccccacctcactcaaatagcttccacctcttcttgcatttgatgcctcagttcaaggggccttatgatgtaccgtgtatcagctgttagttactttttattgctgaatagtattccattgtatggctttaccagttttgtctatacatttagcagttgatagacattgaggttggttccagtttggaattatgaataatgctgctatgaacattcacaagcaaggagtcttgctatgttggccaggctggtctccaactcctctcaagcagtcctctcacctcagctttctgagtagctggaattacagacatgtaccactgcacccagcttggacgtacattttcatttctcttgggtagttttgtgtttaactttttgagaaactacaaaactgtttccaaaatgactacacaaattttataaccaccagcaatatatgagttcctttttctccacatcttcaccaacacttgttattttctgtttatctgttatagccatcctagtgtgtgtgaaaaggtacacttaattctcttccctaattactaatgatgttgagcatttttatgtgcttattagccattcgtgtatcttctttattaaaatatttcttctggggccaccactgcccctcttgcacttttgccagaagtgcagatcgtttcccaaatgtggccttgggctttcaggagcccagtagtgacttctgtggtccctgacttgcaccctcaccctgttattggagttgtgcttcatttctctgtgtggaaagagtgaagtattgggaagtatgaccctggtcaccgaaccaactcagagacttattttcaatatgtactcatgaattcttagtctttccaaaggtatataattcattactgtatttatttaattattttgattttccaattgaaccagatttggccagtgggaatctctccaagatggttcctttgtgacatttccccactatcttctcacttcttgattcctcaccatcttctcacttcctgatttttggacataacaaggctcatcttgtacctcttctgacctagctccagaaacagccattttcatttagaagctctggttcctctgagtggaaatggtattagaaaccaaggtctgggcacaaccgtaccttaaagagagtaatctggcagctgagtgaagtatgcattagttctctattaccctgtgtattagtctgttctcccgctgctatgaagaaataattgagactgggtaatttataaagaaaagaggtttaattgattcacagttccagatggctggggaggcctcaggaaacttacaatcatggcagaaggtgaaggggaagcaaggcgctttcctcacaaggcagcaggaaagagaagtgccaagaaaaggggggaaagccccttataaaaccatgagatcttgtgagaactcactatcatgagaacagcatggggtaactgcccccatgattcagttacctcccaccaggtccatcccatgacacgtggggattatgggaactacagttcaagatgagatttgggtggggacacagccaaaccatattactgtgtgacaaattaccacagctttgtggtcaaaaaaagaaaaaaaaaatctcacactttgttttgatcaaggaatcaggggtgacttagctgggtggctgtagctaatggttcttcatgaaactatagtcaaaatgttgtctaagtctgcaatcatctaaaggctcgacaggaacaggaatgtctgttttcgagatggcttgctcacatatggtacatggctgttgacaggatgtaccatattcttactggctgttagcaggaggccttggtgccttgtcacgtaagcatctccacagggctgcttgtgtgtcctcatgtgacagcagctggcttcccttggagcaagtgacccaaaagagcaaggcaggaaccacaaygtttttttatgacctagcttcaaaagctgcacatcatttctgcaatagcctagtggttatacaagtcagtgttattcagtgtgggagggaaccatataaagaatcatcaggggccatcttggactctggctaccacacaagcccaagatggtaaagagacttttctgtgttatttttatgttattttctatgctgtgttttacttttcacttgtaggtctatcacccgtcaggaattgtttttaagacatggtgtgagatagggagtcagggttcatttattcctttactgataggcagttaatatgcaccatttattgaaatttccactctttcccccagcatactgcaggggcatctttgtgacaaatcaggtgctcttatgtgtgtaggtctattggtctatttgtcttcgtgccagtgctaccctgccttgcttattgtagttttataaggagtcttgacatctgctaccatgattgttttgactattcttggccctttgcttttacaaataaattttatttagcgttggccactttttgcaattatttctgctcaggcctaaccctggtaaggttctgatttaattggcctggggtgaaatctaggcatcagtatttttatcaaacaccccaagtggttctaaaatactgccatagatgagaaccatggatctagaagaactctagtctgtggcagcagggaaaattaaggcccaagaaagttgagtgcttaccaaaagttacacagagaggcagttgcagaaccagggctccagcccaggtgccttgttttccagtgcagtcctctttccaccatctatatttactcctggacatgccactgtaggtaagtagcagaaaggcagagaggagagagttacccagagactttttaactccttacatctgagagcttcagaggaaatggcagttgggggacaacggagacattagattattagtttacagacacagccaagatgctcagcagggagggtgtaacaatggaataataaagctacacagagatctgagagatcatctttctaatctttgatagatgaagaaacagaccaaagagatcacatagctagttataagcaggggcaggacttgggtctgaagtgtgccacactcctggttcagtcctcattgtcccatcgttgtcatagactgacaggttcttcttgcctgctgctcagaaaaaccaatgcactgagaacagcaagtattgcagcaaagaaagagtttaattattgtggggccagacaaatgaggggaatgggagaaatttctcaaatctgtctctccaataattcagagggtaaagtttttaagggtaaattggtaggcaggtagtggggaaactgaaacaattgattggctgaagatgaaatcacagaggtgtctaaattgtcttcacacagctaagtcttcccagggaagggggaaagggtgttctcagaaccaagtggtatctctttgttgaaatgctaaatctgaaaaatatcttaaagaccagttctttaggtttcacaatagttatgttatctataggagtagctggggagttacaaatcttatgacctctcatgtgactttggagcagaaagcaatgtatagaaaagcaagctaagcagcagtaggttattgtttaaccatgcttattctttagcaaggttcaagccccaaccataattctaatcttgtgttatgaatgcagcattagtctccagcaagaggggattcagttttccttgcttcaaagtttaactataaactaaattcccttcatattatcttggcctccatgctagaataaacaacaacaaaaagaaagaaaaaagagaaaagaaaaagaggagaggaaaagagaagagcctgtgaggttgaggttaaaagcaagacagtcagtcatgttagatttctctcattacttaacaattctgcaaaggtagtttcactatgttcagagttatactgaggtgcatttagggaaaattcttcatcttaaagattttaacagtgttggcatatactaaccattcaacatattttttgaatgaataagtgaatagcttgaaatttatggctatttaaaaacaatgccatttcatgcagtaactcccaccacaggcttgagttgtggtcccttaggagtttctgtctccaacttatctttgtgtacctggtcagatgtttcctgagaggagcaagcctttattgtttttcctacaattacgtttcttattaatagggcagaaagaatatacagcatatacagatatacagctaaatggtattacattaatcccaggcccccagggaaaattatttaacaaccaatgtaactttttttttttttgagatagagtcttgctctgttgcccaggctggagtgcagtgagctatcttggctcactgcaacctctgcctcctgggttcaagcgattctcctgcctcagcctcccaagtagctgggactacaagcgtgtagcaccatgcccggctaatttttttttttgtatttttagtagagacagagtttcaccattttggccaggctggtctcgaactcctgacctcaggtaatctgctcaccttagcctcccaaagtgttggtattacaggcgtgagccactgcacccagcctccaatgtaacttttgcctttaagatttttttctttgagacagaaaaaaaaatcttcaaaattcttcatcttaaatattttaacagtgtttggcatatactaaccattcaacatatttcttgaatgaataagtgaatagctttacatttatgtatatttaaaaataataccatttaacgtaggtgcttgaaacaatatgaagtaagaatcctacctgcgattgtttttggtaggtccttaagatttggcagcttactctcaatatatctctcttactctctctctctctctctcttttttttttttaatatggtgaaattagaccaggggtcagaacatagattttagtctcctttagttcatctactaggagactaaattagataatctctaaactcccttttagttctaaaattctgtaattaaactctagcatatcatcattttagactaaaagttttcttcttcttcttctttttttttttgtttttttgagatggagtctcgctctgtcacccaggctggagtgccatggtgcaatctcggctcactgccacctctgactcccgagttcaagcgattctcctgcctcagcctcctgagtagctgggactacaggtgtgtaccaccatgcctggctaatttttgtatttttagtagagatggggtttcactgtgctggccaggctggtctggaactcctgacctcaagtgatccacccgtctcagcctcccaaagtgctgggattacaggcatgagccaccgcacccggcctagactaaagatgttttcaattaaacattcttagtatgctttagtaagagctattgaggctttcattttacagatgagtattaaagtatcatgaaccaaataggctctgtgctataagaaataactcaataagaaataactcaatggtggttcatgcctgtaatcctagcacattgggaggccaaggtgggaggatcgtttgagcccatggattcaagaccagcctgggcaacatggtgagaccctccccccccccgccccatctaaaaaaaagtacaaaaattagctgggcacattggtgcatgcctatggtcctaggtcttcaagagacagaggtgggaggctcgctccagcccaggatgtccaggctgctgtgagccatgatcgcgccacgacactccagcctggatgacagagtgagaccctgtctcagaaaaaaaaaaagaaagaaataactcaattgtttccaggcaagctatcgcaatctggtaggacattgttcctttattttttcaaggaatagatgttcgttatagaaaatttgagaaatgtagaaaagaattaagagtaaaacaaaaatcaaacatatacattgtaagtcagatcatgtcccttctctgctaaaaactctcccatagctcccattttattcagataagagcaagtctttaccccacgcactcccccgcaccactatccgctactctcttttgtccattcactctgcttcagctgtgctgtttccctgctgctgttcctcagaccttgcaggcacacgctcactatgagggctttggacttgctgttccctctgcctggggtgttcctttcctagatatctacagggctcacacctcaattccttggctgttcacttaaaaatcaccctcccagtgaggccaccttccctggtctcgccacctaaaattgtaacctctccctgacattttgtatccccttgctagttttatttcttaacacttatcactaacatgctacacattttgtttctcttatccattcaactttttttcccctttcaggaattaagcctcttcttttttttttcttttgagatggagtctcactctgtcacccaggctggagagtggtggtgcaatctctgctcactgtcacctccacctcctggggttcaagcaattctcctgcctctgcctctcgagtagctgggattgcaggtgcctgacaccacgcccagctaattttttgtatttttagtaaagacagggtttcaccatgttagccaagctggtctcgaactcctgacatcaagcgwtccacctacctctgcctcccaaagtgctgggattacaggcatgagccacaatgcctggccaggaattaagcttcttacatcacagatttttcttttgttcactgctgtgccccaacatctagaacaggcctcataattgttttgtgcatggatgagggtgggtattccattgaccatagtgttgagcatgtggattttttatccctttttttcttttctttccatttctcttctccattgctctcaaatatatcactgcaatgaataacgtatcccaaactatttttcatctgattatctcccatagttagtatcttagagtagaatttattgggctaaatgacataaatgcctaatttttaaaatttggggatgattttaagttacagaaaaattgcaaaaatggtccaaagttcttatatttccttcacycaacctctactaattttgacatcttacataaccatggttcatttgtcaaaactaagaaattaacattggtatgatactattaactaaactacagatgttatttgagttcaccagtttttccactaaagtcagtattctgttccaggattcaatctaggatgccactgtgcatttaggaataattagaatcttggtacatattcttaaattttctccagatatgtggttccagtctgtattgccaacagcaatgtatgactgcttctctcttakcaatacttagtattttcctttttcaaaaatatctttaaaattcaatggttaaaaatggtgtctcactgtaatagttccatttcaatgaatttgaaaaatgttttatattattggccatttgtattcctaaaaatttttggccaggcatggtggctgatgcctgtaatcccagcactttggaggctgaggcaggtggatcacttgaggccaggagttcgagaccagtctggccaacagggtgaaaccttgtctctactaaaaatataaaaattagctgggggtggtggcacgtgcctgtaatcccagttactcgggaggctgaggcacaagaattgcttgaacctaggaggtggaggttgcagtgaatcgagtttgagccactgcactccagcctgggtgacagagagagactgtctcaaaaaaaaaattatatctcaaaaattaactcaagatggattaaagacttaaatgtaaaacccaaaactataaaaactctagaagataacctaggcaataccattcaggacataggcactggcaaagatttcatgataaacataccaaaagcaattgcaacaaaagcaaaaattgacaaatgggatctaattaaactaaagaggttctatacagcaaaagagactatcaacagagtaaacagacaacccacagaatgggagaaaaattttgcaaactacattcaacaaaggtctgatatcaaaagtctataaggaacttaaacaaatttacaagaaaaaacaaacaatctcattaaaaagtgggcaaaggatatgaacagacacttctcaaaagaagacatacatgtggccaacaattatataaaaaagctcagtatcgctaatcattagagaaatgcaaatcaaaaccacagtgagaaaccatttcacaccagtaagattggctgttaagaaaataaaaaaataacagatgctagtgaggttgtggagaaaaaggaatgcttatacattgttgatgggagtgtaaattagttcaaccattgtggaagacagtgtggtgattcctcagagacctaaagacagaactactttttgagccagcaatctattactggatatatacccaaaggaatataaatcattatattataaagacacatgcacacatgttcattgcagcactattcacaatagcaaaaacatggartcaatctaaatgcccatcaatgatagactgggtaaagaaaatgtggtacatatacaacatggaatactatgcagccataaaaaagaatgagatcatatccttcacagggatgtggatggagctggaggccattatccttagcaaactaatgcaggaacagaaaaccaaatacctcatgctctcacttataagtgggagctaaatgataagaacacatggacacatagaggggaacaacacacactggggcctatctcaaggtggagggtgggaggagggagaggatcaggaaaaatcactaatgggtactaggtttaatacctgggtgatgaaataatctgtacaataaacccccatagaagtgactatgttgtctggggtatataccctggggttcatggtcgtgcaccaggaaaatgttaagacatggacaaacaagaggagtttaggagtggaggtttaataggcagaagagaagagaaagagaaacagctttctctatagagagagtggggtccctgaatggaaaagacctgcaggtggcattgaattttatagtcaggtttgaggaggcagtgtctgatttacaaagggttcacagataggttcgatcaggtatgacatttacatagcagatggggaaaggccggttgtctcaccctaatcttattatgcaaatgggctttccagttgatctgagccatcttgtctgcttcttactgtacacatggctggcagagaagggaagatgaagctgccatcttaaacatgtctagcccctagttcctgccagcattcacccatgcaagctcccagcttcctcgtctatgtctgccgcttgactttacaggctgctctttgttagacaatgatttggggctgcttttcattaaagagaaaagccttaccgaggacttctgtaccctcactatctgcctaagtgatttcttcttaactcctgtatcaccatgacacagttatcctatgtaacaaacctgcacatgtacccctgaacttaaaagtttaacacaataatttgtatcttttgcctgtttttaaaattagggtattctactactgaattatagcacttacagttcactagaagaaatactatgctatagtatatgaaaatattaaagatactatatattatagtatatatggatttataagcactgacttataagcactttatatattaaggatattgaatttttggcaaggctgatacaaacattttttcatgatttgccagccgttttttggaatacaagagttttctatttttatgtcattaagtgtatgctgttttagttttctgattgattctattatttttttaagagttggattttttctttttttctttaaacagccttattgaagaacattgatggataaaaattgtacatatttaaggtatacaacttgatgttttgatgtatgtatacattgtgaaatggtcttcacaatcaaaccaattaacatatctrtcacctcaccaagttaccattttctttttcttcttttattattatctttttttgtggcaaaaacatttaagatctacttcttagaaaatttcaagtaaggaatattgttaatcatagccaccaggctgtacattagatctgtagaacgtattcatcctgcatattgaaactttttatcctttgaccagcattaccgtttctccctccctactgcccctggcaaccaccattcgctttataattctatgagtgcgactattttaggtttcacacatcaatgggatcaagcagtatttgtttttctgtgtctgccttatttcatttagcataatatcctccaggttcatccatgttgttgcaaatggcaaaatttcattctttcctgaggctgaataatattccattgtgtgtgtgtgtgtgtgtgtgtgtgtgtgtgtgtgtacaccacattttcttttatccattcatccatcagtggatacttacactcttttcatatcttagctgttgtgaataatgctgcagtgaacatgggagtgcagataaatcttcaagatcttaatcttgatttccatttctgtgggtatatcccaaaagagggattgctagataatatggtcgttctattttttattttttgaggaccctgtatactgtttttgataaaggctgtcccaatataaattctcatgaacactgtacaagggttccctttttcctgcatctttgtcaacacttttaatctcttgtctttttgattaatagccatcctgatagttatgaggtgatgtttcattgggttttcatctgcatttccctgatgattagtgatgttgagcaccattacatatacctgttggccatttgtatatcttctttctagaaatgcctatttaggtcctttgcccattttataattggattatttgcttttgctattgactcgtgtgagttccttatatattttggatattaactccttgtaagatatatggtttacaaatattttctcccattccataggttgttatttaactctgtgatttttttttctttgctgggcagcagttttttaatttgatgtgattctacttgtctatttttgcttttgttgcctgtactcttgctatcttattcaaacatattattgccaagacaaatgtcagaaagctttttccctatgctttcttctagtagttttacggttctgagtcttatgtttaagtttttaatccattttgagtttatttttgtttatggtgtcagatgagggtctaatttcattcttttgcctgtgaatatccagttttcccaacattagttattgaagagactatcctttcaccattgtgtgctcttggcactctagtgaagattgactgtgaatgcatggatttatttatgggctctctattctgttccgttaatctatatgtctgtttttatgtcagtaccatcgcacttaggttactgtagctttgaaatatcttttgaaatcaggaagtgtgatgtcgccagctttattattctttctcaagattgctttcaacctgggcaacatgtcaaatctccatctctacacacacacacaaaatacaaaaattagctgggtgtggtaatgtgcatctgtagttccagctattcaggggggtgggggggtgggggggaaggatcacttgagccccaaggctggagtgagccatgtttgcgccaccacactccaacctgggtgacagagcaagaccctgtcttaaaaaaaaaaaaaaaaaaaaaaaaaaaaaccaagcaagattgctttggctgtttggggtcttttgaagttccacatgaattttaggattgtttttctctatgcgtgtgtagggagtgctgtttgaaatttgttagggattgcattgaatctgtagatcattttggatagtataaacactaattcacaaacatgggatgtccttccatttatctaatcttctttaatttccttcatcattgttttgtacttttgagtgtacaagtctttcccctctttaagtttatttctatgtattttattctttttgctgctattatatatgggaatgtttgcctatttcctttttggataatttattgttagtgtatagaaacactgctgaattttttatgttgattttatatcttgcaactttattgaatttgctaattagttctaacagatttttttgttgagcctttagggttttttacatgtgtaaataatattttctttttttttttttttgagacagggtctcactctgtcgcccaggctggagtgcagtggcgcgatctcggctccctgcaacctttgcctcccgggttcaagcatttctcctgcttcaacctccctagtacctgggattacaggcacctgccaccacgcctggttaatttttgtatttttagtagaggcagggtttcaccatgttggccacactggtcttgaactcctgacctcaagtgatctgccttccttgtcctcccaaagtgctggaattacaggcatgagccaccatgcctagccatgtgtaaataatcttgtcatctgcagagataattttatttcttcctcttcaacttggatgcctttttatttcttttttctgtctagttgttttggttaggttttccaacattatattgataatagtggtaaaagtgggcatcccttccttgtatcagatcttagaggaaaagctttcagtttttctccattgattatgatgttagctgtgacctttacatatatggcttttactgtgttgaggtatgttccttctatacctatattgttgaaagttttttatcatgaaaggatgtcaaattttgtcaaatgctttttctgttatctattaagatgatcatgtggttttttacatgtcattctgttaatgtagtatatggcattgattgatttgcatatactgaaccattcttgcattccagagataaatcccacttgttcgtggtgtatgatcttttaaatatgctgttgaatttggtttgctggtattacattgaggatttttatggctatgttcatcagtgatgttggcctatggttttcttttcttttgatatctttggctttcgtattggggtgatgctggcctttaaagtgagtatgaacgtgttccctattctattttttaaggagtttaagagggattggtattagttcttctctgaatgttagaaaaagccatggtcctgggcttttctttgttaggaggtatttgattactgattcaatgttcttatttattttcagaatttaatttcttcttaatttagttttggcaggttgtatgttactagggattttctgtttcttctaggttatccaatttgttgctgtatagttgttcataagttgtctcttataaccttttaatttctgagtcatccattgtaatgtcttctttcttatttctgatttgtcttttttttatagttcaattttttttttattatactttaagttctggggtacatgtgcacaacatgcaggtttgttacatatgtatacatgtcccatgttggtgtgctgcacctgttaactcatcatttacattaggtgtatctcctaatgctatccctcccccctccccctaccccatgacaagccccagtgtgtgatgttccccaccgtgtccaagtgttctcattgttcaattcccacctatgagtgagaatatgcggtgtttggttttctgtccttgtgatagtttgttcagaatgatagtttccagcttcatccatgtccctgcaaaggacatgaactcatccttttttatggctgcatagtattccatgttgtatatgtgccacattttcttaatccagtctatcattgatggacatttgggttggttccaagtctttgctattgtgaatagtgctgcaataaacatatgtgttgatgtgtctttatagcagcatgatttataatcctttgggtatatacccagtaatgggatggctgggtcaaatgatatttctagttctagatccttgaggaatcgccacactgtcttccacaatggttgaactagtttacagtcccaccaacagtgtaaaagtgttcctatttctccacatcctttccagcacctgttgtttcctgactttttagtgatcgccattctaactggtgtgagatggtatctcactgatttgcatttggttttgatttgcatttgtctgatggccagtgatgatgagcattttttcatgtgtctcatggctgcataaatgtcttcttttgagaagtgtctgttcatatccttcacccactttttgatggggttgtttgatttttttcttgtaaatttgtttaagttctttgtagattctggatattagccctttgtcagatgggtagattgtaaaaattttctcccattctctaggttgcctgttcactctgatggtagtttcttttgctgtgcagaagctctttagtttaattagatctcatttgtcaattttggcatttgttgccattgcttttggtgtttgagtcatgaagtcattgcccatgtctatgtcctgaatggtattgcctaggttttcttctagggtttttatggttttaggtctaacatttaagtctctaatccatcttgcattaatttttgtataaggtgtaaggaagggatacagtttcagctttctacatatggctagccagttttcccagcaccatttattaaataaggaatccttccccacttcttgtttttgtcaggtttgtcaaagatcagatggttggagatgtgtggtattatttctgagggctctgttctgttccattggtctatatctctgttttggtaccaataccatgctgttttggttactgtagccttgtagtatagtttgaagtcaggtagcatgatgcttccagctttgttcttttggcttaggattgtcttgccattgtgggctgttttttggttccatatgaactttaaagtagttttttccaattctgtgaagaaagtcattggtagctggatggggatgtcattgaatctataaattaccttgggcagtatggccattttcactatattgattcttcctatccatgagcatggaacattcttccatttgtttgtgtcgtcttttatttcgttgagcagtggtttgtaattctccttgaagaggtccttcacatcccttgtaagttggattcctaggtattttattctctttgaggcaattgtgaatgggagttcactcatgatttggctctctgtttgtctgttattggtgtataagaatgcttgtgatttttgcacattgattttgtatccagagactttgctaaaggtgcttatcagcctaaggagattttgggctgagactatggggttttctaaatatacaatcatataatctgcaaacagggatgatttgagttcctcttttcctaattgagtaccntttatttctttctcctgcctgattgccctggccagaacttccaacactatgttgaatagaagtggtgagagagggcatccctgtcttgtgccaagagaatgcttccagtttttgcccattcagtatgatattggctgtgggtttgtcagaaataactcttattattttgagatgtgtcccatcaatatctagtttattgagagtttttagcatgaagggctgttgaattttgttgaaggccttttctgcatctattgagacaatcatctgattttggtctttggttctgtttatatgatggattacatttcttgatttgtgtatattgaagcagccttgcatcccagggatgaagccaacttgatcatggtggataagctttttgatgtgctgctagattcggtttgccagtattttattgaggatttttgcctcgatgttcatcagggatattggtctaaaattctctttttttgttgtctctctgccaggctttggtatcagtatgatgctggcctcataaaacaagttagggaggattccctctttttctattgattggaataggttcagcaggaatggtaacagctcctctttgtacctctggtagaatttggctatgaatccgcctggtcctggccttttttgattggtaggctattaattattgcctcaatttcagaacctgttattggtctattcagggattcaacttcttcctggtttagtcttgggagggtgtatgtgtccaggaatttatccatttcttctagattttctagtttatttgtgtagaggtgtttatagtattctctgatggtagtttgtatttctgtggaatcggtggtgatatcccctttatcattttttattgcatctatttgattcttctctcttttcttctttattagtcttgctagcggtctatctattttgttgatcttttcaaaaaatcagctcctggattcatcaattttttgaagggatttttgtgcctgtatctccttcagttctggtctgatctgttatttcttgccttctgctagcttttgaatgtgtttgctcttgcttcgctagttcttttaattgtgatgttagggtgtcaagtttagatctttcctgctttctcttgtgggcatttagtgctataaatttccctttacacactgctttaaatgtgtcccaaagattctggtatgttgtgtctttgttctcattggtttcaaggaacatctttatttctgccttcattttgttatgtacccagtcgtcattcaggagcaggttgttcagtttccatgtagttgagcggttttgagttagtttcttaatcctgagttctagtttgattgcactgtggtctgagagacagtttgttataatttctgttcttttacatttgctgaggagtgctttacttccaactacgtggtcaattttggaataagtgcaatgtggtactgagaagaatgtatactctgttgacttgggttggagagttctatagatgtctattaggtccacttggtgcagagctgagttcaattcctggatatccttgttaacttcctgtctcgttgatctgtctaatgttgacagtggggtgttaaagtctcccattattattgtgtgggagtctaagtctctttgtaggtctctaaggacttgctttatgaaaatgggtgctcctgcattgggtgcatatatatttaggatagttagctcttcttgttgaattgatccctttaccattacgtaatggccttctttgtctcttttgatctttgttggtttaaagtctgttttatcagagactaggattggaattgctgctttttttttttttccatttgcttggtagatcttcctccatccctttattttgagcctatgtgtgtctccgcacgtgagatgggtctcctgaatacagcacactgatgggtcttgactctttatccaatttgccagtctgtgtcttttaattggggcatttagcccatttacgttaaaggttaatattgttatgtgtgaatttgatcttatcattatgatgttagctagttattttgctcgttagttgatgcagtttcttcctaccagcgatggtctttacaatttggcgtatttttgcagtggctggtacctgttattcctttccatgtttagtgcttcctttaggagcacttgtaaggcaggcctggtggtgacaaaatctcttagcattagcttgtctggtaaaggattttatttctccttcacttatgaaacttagtttggctggatatgaaattctgcattgaaaatttttttctttaagaatgttgaatattggcccccactctcttctggcttgtagagtttctgccgagagagtcgttgttattctgatgggcttccctttgaggataacccgacctttctctctggctgcccttaacattttttccttcatttcaactttggtgaacctgacaattgtgtgtcttggagttgctcttctcgaggagtatctttgtagcattgtctgtatttcctgaatttgaatgttggcctgccttgctaggttggggaagttctcctagataatatcctgcagagtgttttccaacttggttccattctccccgtcactttcaggtacaccagtcagacgtagatttggtctttttacctcgtcccatatttcttggaggctttgtttgtttctttttacacttttttctctaaacttctcttctcgcttcatttcattcatttgctcttcaatcactgataccctttcttccagttgatcgaatcggctactgaagcttgtacatgcgtcacgtagttcttgtgccatggtttttagctccatcaggtcatttaaggtcttctctacactgtttattctagttagccattcatgtaatattttttcaaggtttttagcttctttgcaatgggttcgaacattccctttagcttggagaagtttgttattaccaatcatctgaagccttcttctctcaattcatcaaagtcattctctgtccagctttgttccgttgctgacgaggarctgtgttcctttggaggagaagaggtgctctgatttttagaattttcagcttttcttctctggtttctccccatctttgtggttttatctacctttggtccttgatgatggtgaatacagatgggattttggtgtggatgtcctttctgtttgttagttttctttctaacagtcagaaccctcagctgcatgtctgttggagtttgctgagggtccactccagatcctgtttgcctgggtggcaccaccagaggctgcagaacagcaaatgttgctgcttgaaccttcctgtggaagctttgtctcagaggggcacccggctgtatgaggtgtcagtaagcccttactggtaggtatctcccagttaggctactcgagggtcagggacccacttgaggaggcagtctgtccattctcagatctcaaactctgtgctgggagaaccactactcttttcaaagctgtcagacagggacgttaaagtctgtagaagtttctgctgccttttgttcagctattccctgtccccagaggtggagtctacagaggcaggcaggcctccttgagctgcggtgggctccacccagttcgagcttccaggccactttgtttacctactcaagcctcagcaatggcggacgcccttcccccagccttgcagttcaatctcagactgctgtgctagcagtgagcgaggctctgtgggcgtgggaccctctgaaccaggtgcgggatataatctcctggtgtgccgtttgctaagacagttggaaaagcgcagtattggggtgggagtgtcccgattttccaggtaccatctgtcacggcttcccttgtctaggaaagggaattccccgaccccttgcgcttcccaggtgaggtgatgccccgccctgctccgtgggctgcacccactgtccgacaagccccagtgaaatgaacccggtacctcagttggaaatgcagaaatcacccgtcttctgtgttgctcacactgggagctgtagactggagcttttcctattcggccgtcttggaacctcttgtcttcttttttttcttagtttagttgagggtttgttgattttatctttctaaaaaatcaactcttggttttgttgatttttctattgcttttctattttctatttatttctgctgtaatctttattatttcctttcctccactaactttgagcttagtttggtttgttctgcctggtctcttgaggtataaagtcaggctgtttatttgagatctttctcctttaacgtatgcatttatcactataaactcctctcataacacagcttttactgcatcccctacattttagtatgttgtgtttaggtttttatttgtccaaagatatttcttgaatttccctttgatttcttctttgacccaatctttattagagtgtattgttttgttttcccatatttgtgaattttttcattttcttaccgtttttgatttctagtttcattccattgtggttagaaaagatgtttggtatgatttccattttttttacatttgttaagacttgttttgttactcaatgtatgatctatcctggagaatgttttgtgtacacatgagaagaatgtatattcttctgttggatggaaagttctatakttgtctgttaggtccatctggtccatagtgttgttcaagtcacctgtttttattttaattgattttctgtscagatgttgtatccattattgaaagcagggtgttgaagtctcctactgttattgtattactgtccatttctctctttagatagatcaatatttgcttttatatatctaggtacactgatgttggatgtgtatatatttataattgtatcttcttgttcagttggccctttcatcattatataatggtcttttttgtctctagttacagttttttacttaaagtctatttcatctggcatgagtatagccatccttgctctcttttaattaacatatgcatggaatatctttttccattgcttcactttcagcctatgtgtgtccttaaatctgaagtgagtctcttgtagacaacatacagttgaatcttctttttaaatccattcagttactctatgtcttttgactggggaggttaagtctatgtacagttaaagtaattatcaataggtaaaggcttactattgccagtctgataactgtttctggttattttgttgctctgtattcatttctccctctctttctgtcttcccttgtgatttgattatgttttgggcttgcataaagcatcttatagttacaactgtctatttcaagctgatactaacttcaatctcatacaaaaacgccattctccccaamctttgtgtccttgaattcagtgtttaattatctttatagtgtgtatccattaacaattgtgtgtgtgtgtgtgtgtgtgtgtgtgtgtgtgtgkgtgtgtgttttagacaaagtcttgctctgtcaccaggctggagtgcagtggcgtgatctcagctcactgcaacctccaactcccttggtttaagcgattctcctgcctcagcctcccaagtagctgggattacaggcatgtgccaccatgcccagctaattttggtatttttagtagagatggggtttcaccatgttggccaggatggtcttaatttcctgacctcatgatctgcctgcctcagcctcccaaagtgctggtattacaggtgtgagccactgggcccagccatcttttaacttttatattagggtaaaaagtaatttatgtactattatagtgttacattattctatatttccctgtatattttcttttaccagtgagatttatgttttcatgttgctatttaacatgttttcattttaatttgaagaatttccttaagtatttcttataagacaggtctagtggtaacaaacagattccctcagtttcatttgtcttgggatgactttatcctttatttttaaaggctatttttgcccaatgcaatattcttgtttggcagtttttttcttttagaattttgaatacatcatcctactctatccttggctgcagggattttgctgagcaatccactgagagtcttatggataattagccttttcccttaacaaaaactgattatttgaccctcatacaaagggaagaactgataagaatatgaaatatcttagccaggcatggtggcacacacctgtagtcctaggtacttaggaggctgaggtgggaggatcacttcagcctgcagtgagccgtgatcatgccactgcaccctagcctgggcaacagagtgagaccctgtctcaaaaaaaataaataaaataatataaaagtatatcatttcaatgatgataataccaaattatttactaatgaacaaataccctacttaaatgaatttggtttctaaaaacagtgcagcaaaaccgaagtagatttgagggtgccacattatttggtgttccccttgtttcactactgttatttcaccagaactcatactctggtggcacaagccacagtcactgaggcagcagacagaaaacaatgacaggtttgcctgtatcatcaccyctgtagcctaaagggtcaaataatcaccttccatcaaactcacttaattcttcatttgcccaacatatttactgatgcctgctctgcataaggcatccactcttggtaagttatcagatatagtcagtccctgacatcctcatggagtggagatgagagagaggatagaaacagaaggtttaaataaacaaggtagttgcagttagtgatgagggctctggaggaaattgggtgatgagattagggagttctcaggaaaggccactttggatgtcatggtgggtgacctctctgaggagatgctgtctgagctgtgacttcaggaagaagagtaggctgtggaaaaagctggcagggggtccctccacaggcaaaatatggttcaagtatgaaaaagctctttttcctgagctgggaagtgtgagaccagcactcaatacttggccacagcaggctcatgtgggcccatctcctctcaactcaactcatgctgggcttctacagggaatataagacacctgggtggtgatgcagtcctctaaggaacttcactccatggggaaagttttaaagaattacccttgtttctaaggaccatgcttacattctattgtggacatctgtctttggaggcctattttcttttctttttacattaacttgacatctggtaaaacaaaattttgcgtagcaattaaatcaaaacaaaaaacagacatgacactttctcagttaaaatagtttaataaaagcaacaaaactgtgctaacgatgagaatcaaaaatgagatattaggtagacttataaaacaaagtatagttattttttgatttcaaataaaccatgtgcaaaattgtaaaatgccaatgtgtctgagaaaagcattaacagtccttttagcaatttatatataaagatgtttttaaagtgccacagcttaaggcattatattttaaagtttaataaacatctaatttcaacatctctccaagaacagacttcttctcaataagctataaactatttggttaggaatattgaaaatgcatgtataatttaaggagtaatatacttgttaatgctgagttattagtgcaattcaaaagcatatgaattccatatcaagaacaaactctcccgcccaaggtacagtgtaatccacactgtatcatctcatctaaaaatctatacagcagctaccccatccactcagttcctctgcagttaggctattagcttttctttttcaaaaagcaaaaattcctaagacacctaaagattagcctgtatttcatttatctatackgaaagtgcttagtaatatttctaaaaaggaaaagagcagtatggtagataaagaatgtagagtcaaaaatcaatcattttaaaatttttcttcttcctatgattatgttttggttaagcagatattattttcattttttgagcttgcaaaagtctgcctaggaatgtgctaaatcaaaggaaaaatctagcctcatgttcacaattgccctggaatgccattcccagactgagatctaactacacagagtatggctaacggcagaagtcagaggttagggagatctggtgtctccatttatctggaaaacagagcaaagaagggtgatcagttatagaaggccaaacagaagtgttttaagttcagaatttcatctttcgtttaattttcaaagtaacagccactctggatcttttcttgccctcttctctatcagtatgaacagcgtagctgcttctctcctttaggaaagtcagtgtgaggtccctggatatggcctagtctccaggtggtgggagtttacattctgttacctataaacagctaaggcatcgttctaagtttgtttaaaatggttgttttaaatggtaaacacaaaagtccagtgatttttttaaaaactggctttaatggacattaacaaataatatacactgatttatcacctttaagcaacaaaaacatgacttgtaattattcaaataaggtaggatttttctcttaagtacacktcttaaaagtcattcacaagacractgggcatccactaagaccaaggcactgtgagggaggcaaacagcacaacatcctcacctcaaggagctcagcctgggatgaagacagacacacacaactccagcatgaggccaaggggtagcctgttatgggatcaagtggtggcagaatcaagaagtggttctgaaagtgttctttagtcacagagaccagtaggtttgaaacccagtgatgttactttttaactttgtgccttacctactataagcctcagcttcatccactacagtatgccaccctcttaatagaatttatgtaagaattacagaaacatacaagtaaaggattaagtgtagagccagcatgaggaaaggttcaggaatgtggttgctcatatgactgctatgcttacttctgtacatggagcactgtgggagaataaaagaaaggggtggtcattccttagagcatgttctcactgggggaaatcctggcatcttgagcaggacaattcttcactgtataggactaccttgacatttagcatcctggtcccatggcagcagaaggccagtagcacccccatcattatgataaccaagaatcatacccacacatttccaaactccctctgaaggggttaccacccctgctgaaaactgcttttccagagggaccatctacatttagaaacaatttagttctcttaataaaamgagagtgaattctttgagagtatattcaaggatcagatgcattgggcctggtggcagggacgctaggacaggaatgttcagtatagtttgaaagcagaatcctttcctgatgagtcccagtatcaaaatccccatgctcaccattcaggccttaagtaaaaaggtagagctgcatctttgcaaataactcagtagaaaggaattctgccaagaagctactaaagaagtagcaaggctcactgttcctgtagttgtagtagaagttagacatataaatttagataataatcctacaagggattttttaaaattataatttcttttttcctcaatatacacgacagagtccacttcatcccacatctacaaaaagtaaaaactaaaatcataaacaaaaagatagtgacagaacaagcccaaagaagctggcatagaatctgtgctgagaaaagttctcccccagtataacctaaatccacacccatctctgacaaagcattccaggctgaacaccactttcatgttgtcataggtctttaaaagccagctgatagatcttcttctcctgaagttcttctccagaacttaacagcattttagagatatcagaaaagatgtaaggcatttgaccatcattagtgctgagaggtagagagaagccaagttttattactctcattttacatatgggatgtctgaggcactaagaaatgagaagattggcccatcggtggaagccactgcaagtaaaatccagatatcccgtttcataggtactttgttttctatcccccaaatcacagacctgcattactaaaatggctgaagtatcctgctgaggaatcctccaagatgaaacctcccagtgtgctctaccctccttccgacctctgagcccagcttggatccactgagttgctggattcactgtcctttgcagtaggaagaatctgcttagaaggatatgtatttatatayctttttaccatctcttcttggagatgctcttcatctccttgaaatagttatattaaatggatgtggggctaaagttagaccaaatcttccagtcaggaggggcttcttagaatcctcaggtaaagcaaatgcgaaactctgcattaggctcacaaacattaggaataattccatctttgccagttgttctcccatacacacccgcttccctaaaaatgagatcagaaaaaaatgaaggattataataccatcccttctcctatttcaaaaagtacaaatttatatgaaatatctaaattgagtattctaaatgcagatggagtttttaagtcaaattgccatatataccacatagcctcccacagcatatgctgatcagaatttttacatatcaaatccacattttaactcttactcataaaaacctatccccattctagacaggaactagagacagatccagtgtggcagctatcctgtctcttctgtgcctacttacctctttcctccacttttgcctggaagattaaggcaaaaaaattcagataagaatccctagagcctccctttttccacagaaagaattctatgttcctaatctaggaacctaaaagaggaactgttgagattagagaacccatcctctcacccaccagaccagatcagaaattgctcttaagtagctccctgggaccccccaaaattacctgatcagctctgaaagtaaaatttctagtcacatttagagatttaaaaccaactgctttattaaaatctgaaatgaacataggggagatgccttgtctaaattattgatcccttctcttatattagcttgccaagaawgaaacatttttaaaacaacatgaaataataaaatattattttagttctacttcttttaaaaattatgcagtttaaaaaagtgtaactgacctatcccaaaaggaataaaggtttcttttttaattagttgtccttggtcatccagaaatcgattagggtagaaatcctccggtttctcccaaatggctgggtctctatgtactgaccacaggttgggtaagatcaatgtgcctttaggaatggtatacccttggagcactaaaacaaaaggaaacatatgggtgttattcagtatgcttttactagtagttctccctgaacatcattatctgaaaaaaaaatgtagttatatacctatcactttaattggctgagaccaaactgtgaggtacttgagggcagggataagatcttaccaactggcatccctctccccgcaccattccaggacccacctgagacagggagcaggcagtgctccaatgaatgctgaattaataaataaaaccataaaaacattacaatgaagagaaaacactaaaacagaaacaataggggatttcaagtaaacgttccctaaaaattaaaattcccaatatgtataaaacttagtttacagggtcatttatgtccatataacaatgtaatgaggaggtaaactaagataaagaaatatacagggtagccaaccctggctcttaccagctgacaagtcaatatgcgctttaaacaatgcccaaaagatactataaacagtctatctaacttgtaccaaaaaaaacccgttaagtgatccaatgtcatgtataagcaacggcatgctataactgtcttaaaactagatcaagcccattatactatgggctgactccagaggtaaattctttgttaatagggatgtttaaagagagtctggacatgaccaaatagacagagttcactgtagatgagaggctgaaacaggtgactttagaaaaagatgggctcttctaactatgatgatgatgatgatgatkattattattattattgagacaggctgtctcactctgtcacccaggctgaagtgcagaagtgcagtggtgcaatcttggctcaccgcaacctctgcctcccgggttcaagtgattcttctcctgcctcagcctcctgagtagctgggactacagaagtgtgccaccatgcctggctaatttttgtatttttagtagagatgggttttcgccatgttggctaggctggtctcgaactcctggcctcaagtgatccatcctcctgggcctcccaaagtgctgggattacaggtgtgagccaccgcacccagccctttttttttttttttttttgagacagaggcttgctccatcacccaggctagagtgcagtggtgcaatctcagctcactgcaacctcccaggtccaagcrattctcctgcctcagcctcctgagtagctgggactacagttgtgcaccaccatgcctggctaatttctgtatttttagtagggatggggtttcaccatcttgtccaggctggtctcgaactcatgacctcaagtgatccacctgcctcgtcctcccaaaattctgggattacaggtgtaggccaccacacccggccttctaattatttcatatttatgcttcagctgcagaattttaaaagttgaagtaagataattttcaggcaaaatccttaatccacatttagatgagctcttctgacctccatgaaaaggagggagaggtgcctttgtcaattctggagctttttctgccaacatagccaatttaaattttgacattatttgttttgccagtataattgtgtatgctctgaaggctacagaactactagtaaaactaagcagtagtagaattctagtacaaccagtgatgcacagcggagggctgaacattccctagacattttattacatatgacacaatgctaaatcttcagaaggatcaagctagacaacagtcaccacacccctcacctcaactaccctggattagagggccctgcttccgtcaagggcattcaaagaggaagaccctggacttgcctgtgttctctgaggtcatatgaggaatggcaagcggcaccaccacagttagcctctgcacttccatgatggtggcttctgtgtagggcatctgggccttgtctgtgagggaaggagctcggttggcgccaatgactctttcaatttcttcatgaaycttttctatgtaaaaagggaaraataaaccagaagataagcatgggacagagtcgaacgtgccctcctctgcatactttccatcaccactaatgcataactggtcagttggcagttcaggcctgaytctgcctcagtgaagttgaagcattggtcagacatttcaggtagagacagctagccccagggtgcctgtgccactctgtgacttagaagtgggatagtgtaacagatagaggggccaaagagaaaacactctggattcaggagcatcctaagtcatactctcattatgaacatgggattgactctctaagtagactgtgacaacatgtgatagcctaaggtggcccccaatattccctattcttgtggtttatatccttgtgcagtcccctcctactctgtaccaagttggtctgtgtgaccaagagagtaagggtgaagtgagggcatgtcacttctgagatcagagtggctcctcatctttgccactctctcctctctcaggttgctcacttttggggaaggaagccaccaagtgaagtggccttatggaagggtcacagtggtaaggaacttggccaatagtcatatggatagccaccctggacctggattctttggtctcattcaagtctgcagccccagccaacatcttaactctaacttcatgagaaaccctaaactggaagtcattcctggattcctgaccctcagaaactgggagataatgcctggtggcagtttttataaagctagcaaatttgggggtagtttgctacccagcaataattaactaatacaggtaggtataatcacatctatagtaggcagaatacgggcccatacaagatgtacacaccctaatcccctggagtctgtaaacataataccttacatggcaaaagggactaaactgatgtaattaacttaaggacacagagattggaagattatccttggtcacctgggtgtgcccaatctaagaacatgggtttttaagtcagataacctttccctgttgagttcagagtcagaggaagatgtgactatgaacaaatggttacagagatgcaacactgctgccttcaaagacagaagaaggaaaccatgagctgtggaagccagaaacagcatggaaattgattcttctttagaccctccagaaaggaatgcagccctgtcaacatcctgattttcagtccaatgagacatatatcagacttagaatgtatagaactctaagaaacttgtgttgttttaagccactcggtttgtggtaatttgttataacagcaacagaaactaataatacaccatcctccctgtattcttctactctgaactgccacagactttcagtatctattgggactaggtggtagaactagctgtgtgaccttgtgaaagtcacacaacttctctgagcctctgttctycaatttcaaaaaaacaagatgtgttcagatcagcattatgattcccttcagctctagaatgttcttctctaaaggtctttcatgatcatagatttcacatagaatcagacgcgtagagatttaagcaggggtaagcaagttatgacctcagtcctactgtctagaaacttgggtttcactgttaacatcttaccaactccctatgagttgcaagtatttgtttgccagcctgaagacattgctcagtgttagaagccaccagatcactgaggttgctaatcctcatttaaattacctggttttgccatgaacaaaggaaacacctattaattaccttgtacatcggggttcagcgacatatacagcaggcaccagagcaaagagttagttgtggtatcagtcccagcaataaagagatccccaatgatataaaataagtactcttcatcaaaactgctgttactattatttttcctctcctcttccatgtggagaaggtacatgtctatgaagtcctgagggttctctctatccagagactcttgatggtctttgatgatttttttaaggaaactggttatatccttttcaatttgtcttaattccttaaatggtccaaagggaaggtaataaagccaagggcatakgttgaccaggaggacttgactgttcagacagatttctaggcctcgtgacataaaaccaagcattttcttgaactcactattagtgtaatcaaagcgctggccaaagcacaaggagcaaatgatgttagagacggcattgctgatgatggagaaagggcagaaggggtcttctccgtgcttttgcatttctgctttcacatatttgaactcctcaataatcttgggctccaagctaagttttcccaacccaaaatgacgaagagttgaatgagagaacttcctttgttgtctccagacgggaccataatgtgcaaacacaacccctgcaaagggacaccaagaaaggaagatgagaaacagtattcctgataacactgaacagacctaccayggagtgcattctgtatttttcaagtcacttatggaaaattcctcatataaatatatatatatgtatatataaagaccactagtcaagaagaatgattggcaaaatttagttatcaagatagtatgtgtttctaataataacaaaaatcatatctaaggagaatttgctctaaagcttattatagttagtaactcctggtgaaatgaaaagcaatgagtttcattttcaaagttattgtgcatttcaaagtattatatttcataagastgaatccaggcttagaaaatttctcaggtggacaggtacagtggctcatgcctataatcccagagctttgggaagctgaggtgggaggactgattgaagccaggagttccagaccagcttgggcaacagaacaagaccccatctctatttaaaaaaaaaaaaaattagccgggtgtggtggcatgcatctgtaagccccaggtactcaagaggctaaggtcggagaatcacttgagcccaggagttggatgctgcagtccactatgatcatgccactgcactccagcctgggtgacagagcaagaccctgcctctaaaaaaagaagaaaaagacagaaaaataattcaggctatatatccccatgttctaaacacctatattctaaacattctgaactgaaggataattatagcaacagattgacatgagggcacagaccatatctcattgtgctcaccattaaaatccagcttctggcatagtgcttggtacataggagaggttgttaaatattagctgactaaatgaatagcccaactagattagaactactggacatcaaaatttggaatctgataactggcaggtaatctaaaatgtctgttgtcggcagcagccctgattttaaaacatatgaacttgttaaggtcatccacaactacatcctatttgattttcacttatacatcccaccatcaaaccccacaaaattgctcccagatgttgtatcaaattgttctcaaatattccttgtttactgtcacctatttcatcctattttccatggtgtactctatcattttggctagcttccttccttcccacattacttctgaattcttactatttgccaggcatggggtgcagtagatacagctgcaaatgaaataaagaccctgctccatggttaaattttctcatattctttaatgtcccttgaaaatgtctttcaatgtaaacatccatgcagtcaaacataccagacaatttatcagttccactttcctcattggaatcttccaaatgtctgctcaaatctgcagtggttgctctgcaggcctttggttcaggtgctatgacttctattagttatcatttgggaattttcttctgtgtcagaacccatttcctgaattatrtttcttcctctttgttttactcccccattttgctgaagcacatcctctagtagcttctgagaaaggacgcatgggaggcgaatttctaaagattatgtgtgatatttattttaccattggacttcctcagaattttaaagacattgctaagactggactgactgataagtcataagatatgtacatattcagtatgactagacattgcagtttactctctgaattggagagtactctgaaagcgtgttcacagaagtgtttaaatgttctcatttgttcagaatagttgccatcacttgatacttgtcaatgttttagttttgtcaatcagaaggctgaaacgtatctcatcgatttttatttgcatttctctgattgttaccagtgggtcagagcagctttttatacggttattggccagatttcctattctgtaatttgcatttatctactgtgcaattttctttttcttatatatttgaaatgcatagcagatcttttatcatctgattttttaagtttctaaatggtattatttgataagcagaagttttaaatatagttggatttatcaatcctttgatttgtgctgcatattttagaaatctcctcctaccatgggttcataaacacattctctattttcttgtaaaaattttaaattttgttttcacatttaagtttctataatctacctggaatttatatttgtgttaggtattgctacctattgtgargtaggaatccaaacattttttccctatgtagacaacctattgttcaagcatgatttgtcaaagggtccccactctacctcacccttcaccaccaatctgtaatgctgtctctgatacacatttcctatataggggtgggccagtttacaggctttctagttggttatattggtctatgygtttatcactgtgctcaaagcacattgtcttaattactgttactttataataagatataaatagtctttatagtaatttttatatctaatagggaagtccccttttccctacaaaacctcgttctttttaaaaactgtttcaaaaacttcaaaatcagtttctcaaacttatttaggattttggttggaactgcatttaatttctttttcctttattttattttttttaaacacagaggtctgggggatccacagagcataggaggcatttgctgaggtgcagacagtgggtggaggagcctaataggtggtgactggcagctaagttgtctcctgggagggcttgggttcacccccaggccccatccccagtctgagactgtttgtctctggatgtggccaccaagaccccaggagaggcagaatttctgctggcagaacttggcttggacgctcactttgtagcgtctatgtctccattgtcacgcagatacacttcatttctaggttaatttgaaaactgccttctttatgattattgaacttgtaatctaagaatgaatctaaacttgcttgtttttaaatttctttaaaaaattgctggattttgtttcgtaatgtaagctttttaaaaatagtatattcacgaatgacaatggcttataagtttcctttctcatgctgtatttgtcttgaatatactggcctcctaaaacaagccagggtgtagtctttgtctctgaaagaatttgtctaaaattggaacatgttcctcttttcctttaggttctctttttattataatacataatgtttgccatctgactcattaattttcagacctctatcttaataaataatttaaagctctacatttgcctctgtctgggtactactstagctgcagttcacaagtcttgtttccatgtattttcattatttggttttaagtaaaaaaaaaaaaaagtttctattttgagtcttctttgctaccttacctggtttatcttatgctgatatttgacatttgacatttgcttgcttttttaccctagtatgtggccaatgaaatttctaaataaagttgagaagaatgtttgtccaagtaattttgaggaatatgtcctctctatatgtccaatagagaaagcttgataacggtcaaagccaaattttctgtacccttaacaaatttttaactgcttgatctctcaaccagatacttatattaagctattttgctataatggtggatttatcagtttctctttacagttctgtaagtttttgctaaaggtagataaatatcaatgtagctatacagatttatatttatatatatatatgctgttaaatacagatatatattagatgacattgttaggtacattcaagcttagaattctatcttcctgttttttaaattttttaaaagtggatccatttatcatgaatgccctcctttttcttaacaataaagtatcacttagagtaccttttgtcaaaaaagaaccacttttctttttaaagtattttcttagtattgtaaaaccttttcattttgaacttttctgtacccttatgttgggggaatgtctcttttttggggaagatagattatgtctcttaaaacaacatataattggatattaaaaaaatccattctggcaagctgtcctttagccagtaagtttagtcctcttacatttactctaattactaatatctaacatactattctgagatttgtttatctgctttattcattcttttcccccttccttctcatcttcctttaggttgagacaaacagggtgaatgttcactcttacatttttaacacgcttacttaaagtctagttgagtggttggcaaactacagcccaaaggccaaatccatcctgccgcctttgtacagccagagagccaagactagcttttacatttataaatggttgaaaaaaaaaccaaaatgttattttgatacgtgaaaagcatatgaaatttaaatctttcctttagtgtaaaatcaaggggcaaaaagatctatttatagatctatttacagatcatgaaattcgaatttcatgatctataaataaagtttaactggaacacagcggttcatgatgtaaaaaaactaatttgtttacatacgttctatggctgtttttgcattaaaatagcaaaatctgccgggcatggtggctcatgcctgtaatcctagcaggttgggaggccaaggtgggaggattgcttgaacccaggagtttcagaccaccttggcaacacagtgagaccctgtctttaaaaaataaaaaaaaaattttaattagctgggtgtggtggctcaagcctgtagttccagctactcgggaggctgaggtgaaaggatcacttgagcctgggaggtcaaggctgcagtaagctgatatcacgccaatggactccagcctgggtgacacagtgagactctgtctaaaaaaaaaaaaaggaaaaaaaagaagaaatggcagcrtcaagtatatagttgccacttagagtaggggtaggaaaacattttctatgctaaggtccaggccaagatagacaaaygtccttgttttcttttgtcggtggccagggttgttgagtgttctctgtcaaactttcrcccagttgaagcacttcaagagttctgtctttgtctagaagcaacttttcattttgccaggccatatctcttccccaccccccatcccccagccaaggctctcyagatcatctacctactattttctgcaggggtgggggcagtgataaggacctgatcttattttatgtgcattycaaactatccttgttctcagtctactggctcatttctgtctcctatgatcactggtacctccaatttctaacccgttttgagattctgcatggtaaactaggggagtagttctcattctgtcctctcatactccactggcattcccctctgtagatgcttaagtgtagtcatcctccactctattaagtcatttgccaatcatatagccactytgtcttcagatgttgtggtgcagaaatgtagatgtgtcatttcatttcaatgtggatagagtgtgttcttctgttcaacattcctctggtatggtatgtgattgttgagacaaagaaggaatggaaatgtcttaaccactcctgaaaccagaactctccttttgtgtaataaaggcccataaactatttcctaggctacaaaagtttaatcattcctcctgtctttaaccatgaccaagtcttctgctgcagagtattcagaggccaagtgttggtgggcctcctcttctcttggatagatatggtcttccacaccagcttcaggatttgataccaatcccacctaccctctctccctatttttatttatttttttgagacggagccrcactctgtcacccaggctggagtgcagtggcgcgatctcggctcactgcaacctccgcctcctgggttcaagcgattgtcctgcctcagcctcgagtagctgggactacaggcgcatgccaccacacccggctaatttttgtatttttagtagagatggggcttcaccatgttggccaggctggtcttgaactcctgacctcaggtgatccacctgcctcggcctcccaaagtgctgggttaacaggcatgagccaccgtgcctggccctctccttatttaatatatcatatatagcatctctgctttgtcctatttatcaaaaaacattatttttcctttgttaggtcctcgatcttatcatctaaccatttttaaactacaaatttgtattttagaaatatttggtctagcaaaatggctccgaagcaaaaatcaggactcttttgcttcagaataacaaaaatataccctcaagctagttcatcaaacaggccagttaggctatggaatgaacaaacaggaaggaaagggtattgccacctcagggaatactgtcacagaactcttcctccctgtacctatttttccctcctctctctctgacttcattctttccaactgcaaaccagcttttcaatgaaaaatgagctatcctgagatgcctattttcccagtttcaccaccaaaaggaaaagccctctattttctagattcaacctgagaaattctggggaaggattcaaatgcttcagtaaggtgtcctgcggtgataccaacttgagataacttaaatttattttatggcttgaggtttctaactatgccatgctattcttatcccaaaactatgtgaggattgatgtatagttgtgaattgttgagttctgtgcctggcctacagattaaccagttacaaaaaggttagaaattctgatcagtctacttttggtcagtatgtccctcaacttacttatcactgtggccaagaaggtgagtttatgtaaagatatggcatctsccgttcaaccacagttaagggtaaaagggactgaggtcagaaaaaaggaattcctcagaagaagcaggtattcttgtccaaggaacaggtgctagacagtggaaacataaaaatccaactcaaaccaaataaagtatagactaaattgacattgatacattctcacaaacagatattatacagctcctaagaactttacaggagaatatttaataatatgaaaatatgctcataatactttaagtgataaaaagcaatttttaaaattatgaaaattattccattttaaggaggcaaatatatttctaaaaatacatgtacatgggccaggcacggtggctcacgtctgtaatcccagcaatttgggaggctgaggtgggcggatcatgaggttaggagatcgagaccatcctggctaacacagtgaaaccccctctgataaaaatacaaaaaattagccaggtgtggtgcaggcgcctataatcccagctactcaggagtctgaggcaggagaatggcatgaacctgggaggcggagcttgcagtgagctgagattttgcaactgcactccagcctgggctacagagcaagactccacctcaaaaaaaaaaaaaatacatgtacatgtagaaaaaagactggaaggtgatacatgaaaatgtcaatacgatctcagtctttacctactgaacagaggatgttgtacactgattacatttacccttttcttccataggatcatagaagtgttcctattagggagaattcaggccgtctcaatgtgagtgcataactatttcaaaatcatttcaaatacctattttattacatactcagttaacttgtttccctattcattttcaaattccccagatgaactttcattttctgtttatcttcatttcctaatttcattttgcatcttgttcccctttgaggtatatatcagactgatctatcccatacttctaaaattcttcaaaatttctttttgccttctatttttatggctttacaacttgctttgactcttgctccaagtctccagtgatattatccgagccatatcaggttttaagagtcaaatcagtgtttctttttctactttcatgactagtgtcctacaagcacttgtggtagcatagtttgtaagagcaaaaaaatgcaaaatttacctaatttttatcaacagtgaaatagagaatatgataccattttattcattctatttagtggaatactgcataatacggttattttaaatagcaaaagctagttagagaaagatactttaagtatccaacataggcaagttttagaagaacataccaaataaagctatgtgttatttataaatctgaagcaaatctgagctgcagataatcaagtttatactgttctttaagctttatatttgaatattttaaaataaaaatgtgatgtatacaaaccttttagaagaaacagatcacatgtcttaccctgttttgtgttgctataacagaataccacaggctgggtaatttataaagaacagagatttatttcttacagttctgaaggctgggaagtccaagaggatagcactggcatctggcaagggccttcatgctgcatcatcccatggtggaaggcagaagggtaagagaggatgaaagagagagagagagaaagggggccaaactcatccttcttctcagaaacccactcccacaataactaacccactctggtgataacagcactaatccattgatgaaggcagagccctcatgacctagtcatcttttaagttcccatctcttgacactgttgcattagggattaagtttctaatacataaacatttggggacaccttcaaaccatatcagcacacttaagagtgaaacgctcctttggtagccttagctctgattttgtaattttcttttctttttgtgcttaggaaaagaatcaatcagaatgatggacacagcatctttatggcctatctagtttactgtagtttttatgggcttaagaagaagaccaccttgtctaatcatgaaattttgaaaaatttaaacataaaaaataaaattcctacattctggaacttttcagcaaatgtattaagtcaactatttctagcctctctttgcgttatgaaacatacccttctctgctattctcaccaacttcagcagcaaagttctttcaaaaaataataaatattcaataatgttattggcctctaattcctaacataatttcttttctcttatggcctacacatcttgtttctggacagtatcacatttactsctttgctactgggcacagtagccaaagatggtttgagctgtcctcaagtcttgctgagctgagcatcttgactgtagtcacagtggcctcttttcttcaggctgataatgctgtccatttcttgatctgggaagtccactcacacctcatctgttccttcatcctttgatgatcatcttgaaataaattcacatcctccctttttattcttcactcttgaaaaagttctattaaaaaaatcctctgctagccacactttcttattcagatgatctgttctttattccatgttaactccacaagcatttacttcatgccatatggttcttgccttgcattatcttgtcaacaccttctctagccactgaaatttctctcattaattcttttacagcacattcacccaaaacataccagagcagcattgcctaagaaaatcctgtctcttgggggaataaatactttagttgagatactactgaagcaccaaattgcctccaggctcccagcccttttctaaatagagatttaatagtaagcagtcatccaactaatgcttagaaatgaccttgttatagattctcaaccaaacagtagccaccaagaagcactctgataaactgttttgttaagaattggaaactacactgttgagatctcaaagaagaaaacctaattcctaccttaagaaatccagaggaagagacagacacacaaaacaaattacaataaaatgtgatacatacatcaatagatgcttgtatgcacgaattcattcatcttttggttctctattctgtgccaagaagtagggatacagtggttaacaaaagaacaaaatctctgccctaaagaaactcacattccgttgagaggtgggagtggtcataggctaaatacttgccagtgtttactgagaaaaatatgaatgagataaaataagaggtggtactgggcattgaccaaaatagcactgaaaggtaacaattggcctgagaggcctgagggatgacaagcaatcagtcaagtaagaagttattccaggcccaaagaagacaaacatcgtaccttgaggcaggcccaggcatggcagaaatcagcttagtgtgtctagagtaggaaggtcaggttgaaatgtacaagtgaaggsagagctaaaaaagagaaaggcagcagccagatccttcaggccatagtaggtyaagtaaggagtgcagaggcaattggtttcagccagagagctacaagatttgattcatggtttatgtaagagatacttttggctgctctgtggatgaaaatctggagcggaagcaagcaggtcggttaagaggcttctaaagtatcagcttagaaatgatggtagctttagaaaaaaaagaaaaataaataaatgatggtagcttggatgaggatgctgacagtagagatggagaaaagtagatggatgtagcacacatatctgctgtaggagtcagtaagacttatggattgattagaagggactgggaaggtcttaaaatgaaacaatggtatcatagaagttcatctccttctgcagggtagggaagcatctcagggtacacattctcaaagaggtaacatttaagcccaatcttaaaagcaagtgtgaaaaaaaaaaaaaaaagaagtgttggtgaggacgtggagaaattgggacccctgtgggaatgtaaactggtgcactcactgtaaaatagtatgatggttcttcaaaaaattaaacctagaattaccacatgatcaagtaactcctagggactcagatatttgcccccttctatttatagcagcattattcacaatagcccaaagttggaggcacaagtgtctatcaatggatgaatgggtaaacaaaatgtggtatatacagtcgaccctccacatttatgggttccacatctgttggttccaccaaccgcagatcaaaaaaacacatctgtactgaatgtgtagactttttttcttgtcattccttaaacaatactgtataacaactatttacaaagcatttacattgtagtaggtattataaataatctagagatgatttaaagtatccaagaggatatgcataggctatatgcaaatactacaccattttatatcagggacttgagcatcctagggttttgttattcgcaggaggtcctggaaggaatcccctacagataaggagggatgattgtacatatgatggaatattagtcttcaaaagaaaattttcacatatgccacaacatggatgaacactaagacattatctaaggattttaaatgagtagggataaagatcataatactttaaatgccccactgaaaaacaaatgtcacagttcacacctcatccactacatgccttcgtaatactgcttctacctaaaattctcttctgagctcatgggtgcctggagaaaacctacctgcttttcttttcttttttaaaaattgtggtgaaatacatataaaatttaccatcttaaccatttttaagtgcacaccttaatggcattaggtactgtcacactgttgtgcaaccattgctaccatccatccatagaacttttttcatcttgcaaaactgagactttctgtccctatgaatttcactacgctaggaggcacctcatataagtggatcatacaatatttgtcttttccgtttaaaatcctgatgcaaaactctggctttatcagattctgaaaagcctagatctttctttgccatgttataggggcaggaaatagcattcatttaatagatacttgaactcctactatgtttcagacagcaatgactctgtcctcctagatgtcagaacagtggtgaagactgacatccaggcccaaggtcataaagttatgtagcgtcagttttgaaaagtgtagtgaaggaaaagtgcttgggcaagggacctggttctaacaagggaggctaccctacttgcagaggctgtgagaaaaggcttccccaaggaaaaggcatttaacacctgactgatgcgtaggagtgactcagaaaagaagtcagagacctaagccagccagtaagacaaagggggacggtagagacaggttagattggacattttattgcagcagataacacgttttccaacccccaaaaatgtccaatttagactcccatacgcaggaatcagaggctatgaaccaaagccggagatttggtaataggcttcttctgtgttttctggactttttatcttattggaaattatcttcttaaattcttacattcgaaacccacaaggtaaaaagaatatccttccctctttctaacatgggggccaaagtttctctccgaggtcacagctggtggaagggaaggctacttttggaaagatggaacctggcttgccaccttgtccttccgccatccctattactctccctcaatctccggatgacttttctacttatgatcttggagtatgagcaagtcacgcgtccgtcactacttgatgggatcttaaaggcatcagaaaggagaagcgccgccaccaccatcacctgttagttcaggatgcaggtgtgaggcagcctgggggcgcgggcggccggaaggggcacaggaactgcagcccccacgcacctggagactcatccgcggcatccgcgtacccacagcccacgacctcccgctcacccttctccttggtcacgatggagatgagcggcacccgcgggcggtcgctgaagacctcggcctgctgcaccagcgcctcgcgcacgctgtggaagtcgctgaggaccaccaccaggtagtggccgataaagaagctgaagatgctgccgtacacgcgggctaggtgagccaggagcacctgcgggcctatgaccgagggatcaatccctgcggccctggtcctgctgctcagccagctccgccgccggaggaagggaggcagcagcacgtgaccgaagttgcccaccagaggccagggcgtgggcccgggcgggatgccccgcgcccggcgcctccgcagccagctccagcccagcagcgctacgaggccgcatagcagcagcgcgcccccgctggggtccagccgcagcagccccagaggcgcacgcaggaggcgcgcgggccagggcgggtcctcggccggcggctgcgacggccccggagacgacatggtccgggcgccggcggcctcgggttccccttgctgcctggaggagacgcgcacgcagctgcctgacccgcggcgccagtgtcctgctctgctctggaaggtcgggggcgggcagggggtgtaggaacgcccccggattggctgcgccgcgcgcattctccccgccgccgccactcagcgacgcctgggcggaacctggaggckcgccggctgcctggcggagggggttggcgggctagcrggcgggggacctgaagtttgccccgaagtccggttacgaccctttgcagggtcgggcttggcggtgactgtccctgaaactgggatgctggcaacacaaccttgcgctctgattggctgttggtttcccttgtgtcattcgtttgtcattatcactcgtttgtcagttgacaaacacaaacgcatggttatgaagtgcataaaccgtgttaggatctgtactgagtgtgggaaactggtgaacaggcccgtgagatgggtcggccttagcacctgtgccctgagctgggagaatggggtcaacgccctattcctgcatgcttcggtgtagtagtgaaaagacggggttccttatctaaactgggattcgcagcaccctttcctccacgcagagacagcaggatgctgggaagccgtggaatgcagaatctgtgggtgtcggcttggcagccaactctgcggaagggatgatggcgggagtggggggagcgaggggcgggcagcgaggcacgaggagtcacgttctgagagcttgccctgggctagaaaacttatgcggagagcgaaagctgtgtccattcctgcgtgtggcctgggtgcattagaaaatgtacttaaatccagaaatagcgaaaccagaatttgcttggtggatttaagtagctagaaatatgaaaagaagataaccggttgagggaggggtggcaatattattattggtgttagacaacacttgaaaggctgaggttgaaatattagatatgaattgtataatactttaaaaacaaagtattactttattttatcttctcagataatggctttcctgataagggcttccctttcagtcttgtttaggccaaatcctgtagtttctgttcaagttggattgagcatagaattgtctgtactgggccatttttctagccktttcatttttctccatacattaaaagtttgaacaccacgctgtacctataaaaatgtgatcaaagaaagcatagtgagtcctcaaataaatacatgatccattttatttttctataaacaagtgatgccagtaggatatgttaaatttcaagtccactctgttctcatattctttttgacatgcttttcatgttattttaagcttatgcaccccaaacaaaaaaaaaaaacctccacacctctcatcttctataattaaccactacttgtgagattacttttctcattttttttgaatttttgaattaagagaagtttttaaaaatttaaactacttgtttgcagatacgatcttcaacatgacattctggatgtcatctgattctagggctttgctctctgaaacagtagccactatatacatcatcccatacaagcaatttaaattcataaatgrttttaaaatagttgaagctgtgactaatttaacaactccaacagccacccttttatattgtacaggatgtaactgcacgtgtagtgttttcctaaatctctcattttcactaggttaatagctgtgcggggcagataggaaatctgggctgaattcagcctctcctcaccactatatgttgaagtcctaacccccagtgcctcagaataagactgtatttggagaaagggcctttaaagaggtaattaagctaaaatggagtcctgtggatgggctcttaccaatatgactggtgtctgaagaggagataaggacacagagaggaaagaggatgtgaggacacagtcagaaggcagccatctacaagtcaggagagaggtctcagaagaaatcaaccctgctgacaccttgagttttgacttctagtctccagaacggtgaggatataaatataaatttctgttgtttaaaacatccagtctgtagtactttgttatggctgccctagcaaacgaatacaggaagggatattgttcataatattatggatacacttttattttattattattattttttgcgatggaatctcgctctttcgcccatgctggaatgcagtggtgtgatctcggctcactgcaacctccgcctcccaggttcatgcgattctcctgtctcagcctcccagtagctgggattacaggcccgcaccaccacgcccggcaaattttgtatttgtagtagagacagggtttcaccctgttggccaggctggtctaggacttctgacctcaggtaatctgcctgcttcagtctcccaaagtgctgggattacagacgagagccaccatgcccagctggatgcactattttaaacatgaaaccacacagctcattcagtgctccttaaggatgaatttccccaaattacattcagggcgattttgccacataaaggaatactttctgcttcatctctcttattttatataggtaaaaaaataatagcagaagcagtaaaggaagagaatactaagagatcttttgggtgggcagaagtggtaagaaagatagaggattatgggaaaaaatcatttttattgagaccctaaagataattttaaaccacccactttcctacctatatccttgttcgacatggattttggccggaattgttggtcacagtatatccaaaatagctgagtacttattttgttataaagagtggtattaaattactctatttgtaaaactacaattgttcagttggtttgtaattctctgggaggtaaatgccaccacacacgacacccatccagaatcaatgagcatgaacagagagagtgcatggcttaagaagggtttgcaaaatgctaatgaaaagagaaagtagaaatgttattagcactatttagttgcacaactccactggccatttaaaaattaacacctttgttccctttaagttcttatgatttgcttcatatatattccgttgagtgtcttctatatatgtgtttatgtactctctgagcctccatgttcctgaactgaaattgggatgataaatatacctataccaagcatagggattaaataaaataattaaataataataattaaataatagcacaatgtctagcaactagtactcaatacataaaagctgtaattataatagttatcactgggttcttgataatagtttaaacttaataggttgtcactattgctgcctcttattcacaccttgcagatttaccagctttttccaakattagaatgtgagacttgccaggatattgtttcctatatttagcctttatgtcttgtataatgaataaataaacgtgcctatcttcagtattacttcattcctctccacttgcatgtattatgtatgatttacttggagaagagatgacgggagaaaggcccctgaaaaaaatctaaaacagtgtaaggcagaatctcaaaagtcacaaaatccaattccgaaaacatccctttatttggtcaaggtggtgccaggattaggacacattttttatttaacaccaaaatgaacacaatccagatgtccttcaacaaaagaggggggcaggggaaggggaaactatggtatacttatttgatagctcactacaccacaataaaaatcaatcagttatgacacactctacagtgtggataaatatcaaaaaacatgccaagtgaaaaagccaggcacaagaatacatactaaatagctgcatttatatgaagtctggaacaaacraagtgaacctatggtgatagacattagaacagggtggattgtttggaaagggaaattgaaaattttttctagggtggtagaaatgttctatatcttgactgaagtgttggttacttggatgtatgcacttgtcaaaacttaactgtgcatttcactataggtaaattatacctcagtaaaacaatttttttaaaaaagccagtatcttggcgaaaaagacatggtgaagtaagaagacttagcaggtttaatttatgagatgaatctattgtgaggtgggtacccacaggaacagttagtcactttagttagcctggccacaattgttactgattcctgacattttatttttgtgtacgccaaagcgttgctgaattctctgttccttatttcttcctcatttacttccatttactatgcagaaatcatcgtggaaaccacatggggacctctgtccaaatctaactgggttggccaggctatgctgttaacatttctgatttgttttcttcatctggtcaaaagagagagttataacacaaggactcttagattcctctggtctctaacattcttcttaagtggattcttaggactttgactttggcctctgattaacagcatgcttagtcaataaaatctgaaagaataaattatatttacatggcaaagtgtaagccagttacttcaataaaactaacacaagggggttgggcacggtggcccatgcctgtaatcccagtactttgggaggccgaggcaggcagatcactggaggtcaggagttcgagaccagcctggcaaacatggtgaaactccgtctctactaaaaatacaaaaaaaaaaaaaaaattagctgggcgtggtggcacatgcctgtaatcccagcttcttgggaggctgaggcaggagaaccgcttgaaccctggaggcgaaggtttcagtcaactgagatcacaccactgcattccaccctgggcaagaaagcaagactctgtctcaaaaaagaaaaaaaaaaaaaaaaactaacacaagattgttacctcctggtttaggtaactgtgcttggccctctgcctaataatgaagtcttatttctaaacctcactgagaatgaagttttagaaagaaaggacattgaaaggttacttacttcttcttttaggtaagaacatactcattgcaaaccagatatttcaaagccaatattttattctgctttttaaaagagtaatacagttttcatagaaaatttgaaaatgcaggaaactataaaggagccaactatcacctttttattcttaccactcagaggtaatcatttataacatttatgtatatattcttctagtcttatgtatttctaaactttataaatattcctatttatattattcacatatttataaatatatgaatgaaaagatatcattaacattttccatgttgttctcccacaaatcttttttttttttttaatactttaagttctagggtatgtgtgcacaatgtgaaggtttgttacataggtatacatgtgtcatgttggtttgctgcacccatcaactcatcatttacattaggtatttctcctaatgctaaccctcccccagccccaacccctccacaggccccagtgtgtgatgttccctgccctgtgtccatgtgttctcattgttcaactcccacctatgagtgagaacatgtggtgtttggttttctgtctttgtgacagtttgcttagaatgatgatttccagcttcatccatgtccctgcaaagggcatgaactcatccttttttatggctgcatagtattccatggtgtatacatgccacattttcttaattcagtctatcattgatggtcatttgggttggttccaagtctttgctattgtgaatagtgccacaaataaacatactgtgtgcatgtgtctttatgtagcatgatttataatcctttgggtatatacccagtaatgggatggctgggtcaaatggtatttctagttctagatccttgaggaatcgccacactgtcttccacaatggttgaactactttacagtcccaccagcagtgtaaaagtgttcctatttctccacatcctctccagcatctgttgtttcctgaccttttaatgatcgccattctaactggcgtgagatggtatctcattgtggttttgatttgcatttctctgatgaccagcgatgatgagcatgttttcatatgtccgttggctgcataaatgtcttcttttgagaaatgtctgttcatatcctttgcccactttttgatggggttgtttttttcttgtaaatttgtttaagttctttgtatattatggatattagccctttgtcagatgggtagattccaaaaattttctcccattctgtaggttgcttgttcactctgatgatagttccttttgctgtccagaagctctttagtttaattagatcccatttgtcaattttggctgttgttgccattgcttttggtgttttagtcatgaagtctttgcccatgcctatgtcctgaatggtattttttttttttgagacagagtctcactctgtcacccaggctggagtgcagtggcgcgatcttggctcactgcaacctcctcctcccatgttcaagtgagtctcctgcctcagcctcccaagtagctgggattacaggcacctgccacctcacccagctaatttttgtatttttagtagagatggggtttcaccatgttagccaggcaggtctcgaactcctgacctcatgatccacctgccttggcctcccaaagtgctgggattacaggcataagccactgtgcccggctcatttttaaaaaaatttattattattattattattattattattattttatgagatagagtcttgctgtgtcacccaggctggagtgcagtggcacaatcttggctcactgcaacctccacctcccaggttcaactgattctcatgcctcagcctcccaagtagctgggattataggcgtgtgccaccacacctcggtaattgttgttgttgttgttgttgtatttttagtagagacaggttttgccatgttagccaggctggtcttgaactcctggcctcaagtgatcctcttgcctcccacaaatcatttttagttactatattctagccccgggatcagcagtctttgcctgaaaaggaccaaatagtaaatatttcagattttgtgtgccatatggtctctgtcacaactgtgtaactctgcttgccgtgggagcaggaaagcagccactgacaataagtaaataaatgggtatggctatttccaataaaatttgctttaagaaaaaaggcagcagctgtgcttagcctgcaggcttttatttcctgacacttgaatttaaaaaaatctagtygattgtttaaaaatatttcaaagtttaaccaatagccagttattgaccctccttacagtttttttgctattataaaccatagtgggatatatacatctttgattatttcagtaggataaatataccaaaaagaactggtacacctctaaggctattgatacataaagtgtacacatgcacacacgcgcacacacacacacacacacacccttttgcctttctacctcttggagttacttgtattaaaagtgtgatatatcctttcggatttcttatgtttacataatttccctcctgctcccccataaatggcatcacactctacttttggttaattaacctgctcttttaacctaccaatgtattttgagaatctcgccacgccagtgagtatccatcagcctcatcctttttaatagctgtctggtaatttcactgaatagactcttcatcaatagatttttactggagcacaccaattgtcatgaactattctcagcactggagatactatctaagcaaaacaaagtgcttgcccttcgaagagcttttcagtgggggaagacaaaagatggacaggccagtcatggtggctcaagcctgtaatcccagcacttttggaagccgaggtgggtggattgctcaagcccaggagtttgagaccagcctgcacaacacggtaaaactccatctctacaaaagatatagaaagggatggacaaatgtataatgtcagttggtgataagtactatggaggaaataaggcacacgaagaggatggtaggaattgctgtgtgtgtgtgtgtgtgtgkatgtgtgtgtaggggagtgttttatttcatttaggttgttcagggaaggcctcttttaaatagacagctgatcacctgatggacggcttttagatacctggggaaagagcattccagatagaagaaatggtaagtgtgaaggccctgaggctgaggtgtgctgggagttttccaggaacaaggaggccatctggctagagtggaaagaggaagggaaaggtggtaagagatggaatcagagaggtagcaatgtagggcattttagagatgttgatctttactctcagtaagatggtgcatcactgaagagtttttgagaaggaatgccatcatttggcttgtattttaacaaaatcacttttgctgcctctaaaggggcaaagatcaaaccaaggagcccattaagaaatcgatttaagtatgtcacaatgtattactcaaatcctctattagtaaatatctaagttatyttcggtttctttcaattaaaaatatgctgaaatgtcaggagttttttggggtttttttattgtggtaaaaatatgtataacatttaccatgttagccatttttaagtgtacagttcagtggcattaagtacattcacagtgttgtgtaactatcactgctatttccagaagtgtttcattattccaaatagaaactctgtacctaataagcaacaacttgtcattstccctttcctttagtcataagctctattccgtttgtctttatgaatttgcctattctaggtaccttatttaaggtgaatcatatgatatttgtccttttgtatctggcttatttaacttagaataacattttcaaggtttactcatgtttgtagcatgtgtcagaattccattccttttaatagctgaataatactccattgttgtatatatcacattgtttatcctttcatctgttgatagacacatagattgtttccacctttgggctactgtgaataatactatgaacactggtgtgcaaatagctgtttgagtccttgatttcaatttatttggctaaatacagaggagtaaaattgctggatcatatggtaattcttttggggacccaacatgctgttctctacagaagctgcactattttacattcccaccagcaacaataagggttgcaatttcttttattattttttaatgggttctgtaaatgaagaatgcaatttgtttatatcctcaccaacacttgtcattttgtgtttgtcttttccttaacagccatcctaatggtagtaacgtgtatctcattgtggttttggacttgtatttttctaatgactaatgatgctgagcatcttctcatatgctttctggacatttatatatattctttggagaaatgtctattcaaatcctttgcccatttttgaattaggttgtttggttgttgctgagttgtaggatcattttagatattctgaatatgaatcctttatcataggggtccccatcccccaggctgcagactggtaccagtccatggcatgttaggagctgggctgcatagtaagaggtgagtagaaggcctgtgagcatgcatgaccacctgagctccacctcctttcagatgagtggtggtattagattctcataggagcgctaaccctgttgtgaactgtgcatgcgaaggatctaggttgcatgcttcttatgacaatctaactactacctgatgatctgagctggaacactttcgtcccgaaatcatctccctcctccctgctggtccgtggaaaaattgtctttcacgcaactagtccctagtgtcaaaaggttggagacaactgctttatcagatataggatttgcagctattttctgtcattctgtggattgtctttttgctcccttcatactgtaatttgatgcaaaaaagttaattttgattaagttcagtttatctgttttttattgcttattcttctgatgtcatacttaataagtcattacccagtccaaggtcataaagagcttcatctgcttcttctaagagtttcatagttttggctcttaaatttaggtctttgatccattttttgcattaatttttgtatggggtataaggtaagaatctaacttcattcttttgtatgtagatttccaattttcacagaactgtttgttaaaaacactatgctgcccaggcatggtggctcacacctgttatcccagcactttgggaggccaaggcaggyggatcacttgaggccaggagtaagaccagcctggccaacatagcgaaatcttmtctctactaaaaatacaaaaattagctgggtgtggtggcacgcacctgtagtcccagctacttgggaggctgaggcactagaattgcctgaacccaggaggcggaggtagctgtgagctgagattgtgccactgccctccagcctgggtgacagagtgagattgtgtctcaaaacaaacaaacaaaaacaataacaacaaaaacagcaatcccaccygccccaccccaatcctttctccatctaatggtcttagtacctttattgaaaatcaactgaccatatatgtgagagtttacttcgggggtctctattctatcccattagtctgtatgtctatctttgtgccagtaccacactgttttcactactgtacatttggagtaagttttgaaatcaggaaatatgagttctccaaccattcctttttcagtagtttttgctattctgaaaaatttgggcatactgacaaacaatttggctactattttactcccttcagattccatatgaatttttggacaggttgttctatatctgtagaaaacaccattgatattttcatagagattgcattgaatctgtagattgctttgggtaatattgtcatctttacaatatcaagtattctaatccatgaacatgggatgtcttcccatctatttggatctttaatttctttcagcaatgttttgtagtttcagcacacaagtcttttgcctccttggttaaattgattccaaagtactttattctgttgatgttattataattgatattattttcttaatttccttttaagattgttcattgttagtgcatacaaacgattgtgtgtttttgtctgcaaatttgctgaattcattcattagatataacaatttaaaatttttcatttttaactttttaatttttaacttttcattcagactcatgatttgaaatctaaagtttttctgttgaatttttaacatataagatcatgtcatatgcaaatagttaattttacttcttcctttccaatttcaattcctcttatttctttttcttgcttaattgctctggcaagaacttccaatactatgttgaatggaggtggagaactgggcattcttcacttgttcctgatcattcttgacatttcccttttagaggaaaagctttcagtcaccactgaacataaggttagctggctttttcatgataacttccttatgttgaagcaacttctttttattcctagtatgtttagttttatcatgcaagaatgttgaattttgtaaaatgctttttctgcatcaattgaaatgatcatgtacttttcactcttcattctgttaatgtattatgttgattgattttcatgttaaaccatccttgcatttcaggaataaatctcttttggtcttgttatatatcccttttaatatgctgctgaattcagttggctagtagtttgttgaagatttttgtgccaatgtttataaggtatattagtcttaagttttgtttttttttgtagtgtttttgtctggctttggtattggtgataactggcttcacaggctgaattaggaagtgttctttcttctttctggaaaagtctaagaagtattgatgttaattctttatttcttttttgagaaaggatctcgctcttttgcccaggctggagtgcattggtgtgatcacagctcattgcagccttaaccttccaggctcaagcagtcctcctattttgtgcccaagtatctgggaccacaggcatgtgtcaccatgcccagctattttgtttgtttgtttgataaagatggggttttgttaatgttgcccaggctagtttcaaactcctgggctcaagtgatccatccaccttaacctcccaaagagctgggattaaaggcgtgagccaccacgtctggctacttttttccttaaatgcatagtagaattcaccaacaaagccacagttcagggttttctttgttgaaaagtttctgattactcattctacctccctgctaattagaggtctgtttagattttctattgcttcatgattcggtactggtaggttttttgtacatttgttcattgtactcttataatcctatttctgtataatcagtggtaatatctccactttcatttctgattttagtaatttgagccttcttttcttaggcaatctagctaaaggtttgtcaagtctgctgctcttttcaaagaaccaacttttcatttcattgatttttctattatttttctattctctatttatctctgttttagtctttattatttccttcctcctgctaactttgaattttatttcgtcttctttttcaagtaccttaagatctaaagttacattattcttttctaaaacatatgcatttgtaggtatacatttcattcagtgctggttttgctgcatcccatagttttggtatgctgcatttttgttatttgtctcaaggtattatcaaatttcccttgcaatttcttctttgctccaccagttaagtgtgttggttaattcccacatatttgcaatttttttcagtttgggcaatttcattttatatagctccaggagaagacttgtcaccacttcttttgtaaaggctgctatacaaaacaatattgaacaattatttgtttttgaactgaattctgatataatttaatctcaaaatcctctgagaactgcccaaactctgatattctctccaatatataggcaggttattaaaaaatcaactcactagttactggtgaaatacagtaattttgttggtggtacaggatggtactaaacatattgtgtcactgtgctggatcagctggagttattagattggtgcaaaagtaatcgtgttttttgaaattaaaagcaatggcaaaaacygcaattacttttgcaccaacttaatacttgggactgggataacaggatcactcttaatcccatggtcaagggtgccatagattagtgaatgaaatcttctctttttattagaaaaaagacatttccacactagcaattcatcattcacttttctggaagtttctggagagattacggctaaacaattcatgtatctgattagtgtgcacaatgtgggaaaggcaggcagagtgggggctttggaaacataatctgagacatatgacattaaaactcattgacagtgagtttgctttattctaacaaacttgtgggttcagacactcgaggattcttgaggagttcttttgccttcaaggccattttgcactaggagccaacttttctcccctttgaaattagtaaattgtaattttaagaaaaatctgtagcatgtgacaaagaacctgtcccaaggacagtttgcttctgaaactaatttcctaacaaaaccctaactgtgatggtgaccatagtaattacgacagggaggcagcaagctayagcccacaaaaacaaaactcaagttctagctctaacatttatgaaccctttcatgtcataaaatggggtcaccttctcttgccttgcttacttcacagggttttgtgaagattaaagaatgtatgccaagcgttaactgtaaaatgctatgtttgattacaggtgccacatatggattaaatgtgcattttatatatatatatatctatatacatacacatagtaatacataatccattactatcctaacttagattaaaaaatgtatgccaagcgttaactgtaaaatgctatgtttgattacgggtgccacatayggattaaatgtgcattatatacatatatctatatacacacacagtaatacataatccattactatcctaacttaatacagtattatgcttctgatattcttatttattagaagaaaataaaatttacatgtcaattcgtgaagcatctatgactttacttacaagcccacaagttagcctgttcctgtttcattggatgctagaagacacaagactcctgagtcagagacaaaggacttcactacacatagcatagcagtatccaaagtgtcagcatggtccctttggctcccttgtctctcaaatcccatggggatgacttggagaggtgaagacagatgttacatatgcagtgggttttcacctcaactgaggaccactgagcttcgcatttttactgctttacagtaaacagaaaaaaagacttctctttatttagggtgatatgctacctcattacttaacattgcttactgcaaatacaatcctgagaaatggcctgggtaacaggagttagggccttgcactcagcatgcccagcaaaaaatgtgctggatggatgctcagagcccatggcacattacctctcccaacctttggatgagataaaacatgacctctcccaacctttggatgagataaaatatgacctctcccaacctttggatgagataaaatttgatgtctattgtgcaattttgctaaaatattaaatagaaaagaatggtaaaattcagtgacaatgcatccagaaaagcaattcacttccacttctgaaacatctagctggctatgaaggccctgaccaacatttcctaaaacttacaaacatttcctaagacttgcatatattttatgcaattgaaattcttatgatgtgacttaggagttatgggcgagtcttatagtgcagacatttccacttaaatgtcaggaattttatgtatcagcagctctagtgyatggcacacagaatcactcaaatggttggtgaacatagtctagtttcctgtcttcctgtgtctcagcaggagattcaaaatatcagggaagatgaatattatcaaaagttgtggcgacctcttaatagcatgatcatctggagagactgaaggcattacgcagggtcaagactgtaatgacctgcaatcaaaaaaccttacagacttgaagctgagtctgtcgttaagtagacatatagatcatatagatacttttctatctttaaatgtggtggggatgagatgggggttgaagtaagcgaatttaaattcactttctagtgagactagcatctaatcctggtggcaaaacttgtttggacacaccactacattctaattctaaaatcaacagctgtgaggtagagatctcaaaccaagcatgaatgatcaccattcttttttgttttaaagtggttttaattacttaggaaacttgcccatgattagtgtgattgaaaatkccactttaactgcagttgtaaagtgcctattgattccttattggagtaagagacagagtactactttaaaaaacttcactatcctcagtactttcaaaaatgcccagagagttttatcctctcgtaggaggcacactcaagagcttttgtatgaagaaaacaaatggaacccagaatgaattagccccttagtaaaagttcctgttagtcccttgcacgatgaacaagagttcacgttagtttcttgcacgatgcattctagataagggcagactttgaagctatatggccagcaaaatcagcatgccagtgtttccacaggatgatgggaacgtcactgtgatgagcttttcatccaaggtctgggtggaggtggcagaaaaactattctgatctatgctccatcatttctagataatctaaggataaagcctggactatctcctgtaacttactctttgaaccttattatcttatcctattcacttcaccccaatgaattgcktttacaaaatttatcttggaggaggggcatttgtcatcagcagattcaaaacctacttaccgcaccttgctgttgcaatgtctagcaaactccagttgaggatattaccttaggcttctgtcttgtgaaggcataaggagacctagtgacagaaaggggtctgcttttcatgagtgactttgtcctcttgtgaacaatgaaaatcagaatcatggaatgtgtgattattttcttctccatgaatgaccttgtattgttctgaattatttttcaccttaaatccactaattgaaagttattactttattttaaaaatagtgcttgaagaaaatatccctcttgcggttttaacaagtactctaaaactagaactcttttaaaaatgacacattttgtaaatggaaagaaacagtaatattaattttgaaaagactgttgatgtcactgtggtttattaggtaaatacaaagtataggctcttgcattttttaaaaagcaaaaccaaagagattagaaaccaagtacacatatcctctttagaagagaaacataaatcagttttaacaattaggcacttaaaaatgtaaatgtaagacaacattatagaagtataaactatagttacactcctaaattcctcctgaaatgtttacaaacacaaaatcacaagcatggaaaacaaatttcctctttatcaaaaaaggaacctgaatttgaatccaatgtgataaaccaatgattaaggtactggtgggtaggaaaaaagagcttctgaaatttacatatttgattaaaatgtaagcatttcataaaactatcacaatagcatacagtagatatcataatgaaaaatatatgtcaggaaaataatgaatctagacttaaaattttactttacaacaaggcacttaacacattgaaacagtacagtaaatttccaaaagaatgcaattggctacctctgaaaccttgtaataatatttcttttgtgaatatacggtaacataaccatacattttgcagcattaatcattgcataggaggtaaattaaataatgaattctaacttggcaattagattagtttttgttcatcgtttcctctttttcttttaaaggacagttttaaataatttcacaataaagcactcttctcattcatgatttatttagaacacagcataatgagtaaraaaataaatcagaacttataaggtgtgtatctgtataaaaacttatctttgggtaacattgacatgattttcagtgtttgggtgttgaagtcaagagcacttcttaataraaraaatattttcagcaactgagtcaaaggagttaaattattgcaacacaaggacactaaaaacaaatactaaaaatctttatatatataaatagaaaagccttcaacacatggcatataacttataatatgcttgatttaaacgtgtaaactcattaaraaactccttctcacacttccttacactacagaggctagtgcattaagattggcttaaagttttcatcagttttacagtgcaaaacaaaaacaaaaaagaattaagaaagaaatgttcaaactattcaaggggcaagatgtgaactttcaactaaaaaagaaactgcatgagttctgtcatgtaaaaaaaaccaagacaacaaatttggtgtttcaaagtaaacaaaacataggtcgttataaagggagacactaatgattgtgatcatgagaggtaaaaatgttctacaaattttctttgatcaaatggatacaaggttagaattacaagtgcctataatctgagcacattttacctttgggaaaggtttaaaatgcttttaaaataattcctttcacatgatactttcagattattggcaaacaacagaaaacaaatgcctttcaaaaacttgaaaacaggcttttaaaagtggtgtttgcattccaagtcataaagtatattgccacaagggggcactggtaatacaggaaataaccctaatgcaatgtcatccacaaaccagagtagactcaacgctcactctcaaaacagccttcctgccacagcaaaacttgtttcccaagatgmcagtaaattaagtaacaaattcacaattagttcaagtggactcaggaaaggatgctttattttcagatctagtggacaagctcaaaaactagaatctgagagaatttcatttgaaatgagttagaaaaaaaatgtggcatactctataggaattatatgttataggtatttcacagacaacctaaattacaggaaaagcttcaaacaggagcatagacttgaaaaaaacaaagataataagatatgtatcttaactggcaaagaacaggtaccccaaacatttatgatttcaaaggcaagatcatacttgttttatatcttcagtttatatatatatcatacttgttttatatcaaagtggcacattgggttgaagctcaacttttctttcctacatgtaaatgggttttactatttgttttatttttccatcttgaaattttgattcccccacccttatttgcaaaccatggacttcctcaactcgatgacagagctatacgacacatgcgtgtaaagacatggcagcggcaatgtccacattggcatcacaggtgtttttaaagttctttaaaaggtgatgkttttttttaaattaaaaaaaaactggattacttgactaaaatccaaggcttactgtttcaaggatctgtagtaattggtgcacaattttttattttattaagtttaaacactttttcttattcaatagatgaaaagtgagttatccagacacagatgaataaggctgtaaggtgtatcagtttgttttatttgaattagaggctcaaggaaaacaccagtgttaggagagcaaaatccaggcttctgtgtcagatgattttctttacaatcgggcaacaggaacttaaaaatcagtgttttcaagcagaataccttgttcttgcacaagtgttgctagttaataaatgaatataagcgaacattatatagaattatgtctaaactcatcaggtaaactaagtatatgtttattattggtgtatttaataagaaatactagaaaattctgtgtgcttcaaagcctgccaaggatgtttggggttttaattcttgtttaaaataactgaattaaagagtcttgcttcatgactttaaattcaactacctttcctttagtgattattctataacatacagaaaaagccattctgaaaacatacacaagattttagcaccaaaggatgttgacccttctgaacgatttgcattgtgtttttctcaagcaacttaaaggtcaattttgtgtagtcaaggctgactagtttataatgatacatttggggatgttttccattctaaatgaaagaaaaatttcaccttcaatataaacataactgcctccttctacccgcattggcctctccaccctctgccccagtgttgataactttgcaaccttaaaacttttctaaggttttaaaagtcttgcaaattaaccttcaagtagctaagaaattaagccaagaattatccaaaagatccaatagcattaaataatgcactaaatctggtaacattaaatctgatcagattttttaatccattttttggcatcaccttaaagaaatttagaaacagttatcccccttcactgtatagctgtaactaacacactgattccgagagtatattatagtgcagcaccatgttattttcatagggtaaaagtaaaattactcaattgcggcatatgtccttaggactagttataagaaactgagtctcttgctaaaagcaaggatacattaactttcaggttccatcttggtttttccataaagtacaacagaaaaaggaagaaatcaccttcaatgaaatttgaccaaatacatttctgtgctccaattaggagccctaaaattgatctcacaccagggcctgacctggaaagaaaacaggctcattccccaagtggtgtgaacctcagttgacacacacgtgttttcagcctgtgctagaagagttgactgccctggggcaccagatccaaatttacagggcagacagcatctaagtgtgtactcaagggccactcattagcagaaaccatctcatgtttcctgtgtatctgtcatagagattttaaagtgaaacatttacacacatgtaaaatctgtggggtgtgtcaaatactttcgtgtttacttggatcagctttcctttttaagataaaatgatcttttaaaaacaaaacaaaacaaaacaaaaaaaagtgataygtagcgcattgggtggcagcagcagtgtgcactcctggactcaacccgaactttccccgtgacagggtagaaacaaaattcacccaaagctgacgcacaacccacggatctcccccttgctaaacctaatgctaaaaaccactctcaacattaggcagttctatttacacagtggctgtagatgtccagatattttatttaaaatattaacacattcttctgaccttgggctgaaaaatatcctgaaaaaattctgaagtagagggttttggtggagaaagaataaagaaaggaggaatatgttctttggcacctctttaacaagctcattagtaaagtcccggggtgggggcttgtcaccaatgaatgaagagctgcaagagaatgtatctttctcaggatgaagaagaaaaccagtcaaagggcaatactttgttcatctttctaatcgtttacacaaaatttggtccatttcttcatttaccagtcagttctcctaaaataaaaaacaaaactatacctttggttacagcgttractcttttggtgtaagagctgatgcctttgttttgctcctcaggtcgatttctcattgtcttcaccaatcttctgaacccgtgaatactttttgcatgatgatttgaagcagccaggaggccaagacagyggccaggagaagcagcaaggaattgagccttgtacatttttctcaaaaaaataaaagatggggaaccaccatgctcgagataagaaattagtctgtgaagagaccttcaagttctgtaaatggtagaaaaaaatttaaatgagacatatctttctcaatttgcatcccaattattttcttaaattgtcattcactgtaacctagggaaaacagaattcagaatcacatggcagtaatgattttcatgtcctttccctaactctaccatgactccgctcccctaacacacctaggtgtctttctttcctttgtggctcatgcaatttcttctgcctgcaattccagtaagaatggagactctgggaatggatttcagaattattcaggaggaataattttcaggatgtgtgagtgatcaaatctaggggccaagcaagtcaaagagtgaaagaagagctcagaagttgaacacatttaagaggaaagatgaaaattttggttcagtggtgtcagtagtcaactagatggaagtgtaagaaggaagatggaaatgggagactacaaaataggaaacagagctacaaagagaaataaagtaatccaaagaaagagcatttattagtggacaccaagagttggacgtagatcctttggaaatgtaatatttcaattgctcacaaattctccaaattgacaatatggcaagtctattcaaagataagtaagtcatggtacacagaccaactctattacaccaaggacacataccaagactaggagaaaagagagactgggaggaataattctgccttcggaccagaggaagagagcaagagttagagacagcttcctggaagaggtggcatttgagctagctctttaagtttcaatgggagaagaaagaaaaggcatctggaaacaaggaagcagcagtagcaaatgaggaagaatcagaagggaagccagagagcaccattatcaccagaggatataccaaatccagtcattcataagctatttattttgtgtgattttaaacaatagctgctatcggctgggcacggtggttcacgcctataatcctggcactttgggaggccgaggtgggaggatcacctgaggtcaggagttcaaggccagcctggccaacatggtgaaaccctgtctctactaaaaatacaaaataaaaattagccaggcgtggtgtcgtgcacctgtaatcccagctatttgggaggctgaggcacaagaatcgcttgaacttggaaggtggaggttgcagtaagccaagattgcaccactgtactccagcttgggcaatagaacaagactctgtctcaaaaaaaaaaaaaattaaaaaaaatagctgttaccttctccttaaaattaatttaagttgaaggcaggattatgtcttacccagctgcactacaatgcttttacagagaaggttcctaaattttaatttagtacatatattttttcattctagtttaagttacctgaattagcaatgcactgtgctccataactttatggcatttttatccataaatggcatttatatttgtgaagttctttgctttattttaaaaagcagtaatggatatatgtttaagtgaatgtggcaacatcggttatccccattaggctatctaaaaccccacgacatgaaaagggtccactgcattcaaagaaaagaaattatccaagcatcttcactgctctcaccttttcattggccattgaatggtaccaccaaaacagtcgtgttgtgatataataagcaatgatcacatcgatagtgtagtgttcgtgtgctacaagaatgcagatgatcccrgcagcactcagcagccagcagattaaatgataccaccagaagtgacgaggcgaatctggacagtagaaaaattacagagttaataagattcccagagatgaatgtaatgattacagtctgtcctaacgaccttaagtagaataacccaggatcaggaagtcaccagaaggataaaactgataacctaaactgagtcactatgaactgcccaggatctgctcaggtaggagggaggcagaggggctccctggcagcgggcgtaatagtcattcactggggaagctggtaacactagacattctaggccttacccacgtgaataagctgtttagtaagaaagaacagaattgtttcttattaggtttgctggaattgctgcatactggctcacataaaggagccactttcccactggaaagaaagatagtagggatcaaaagaaaaggtggtggtctatgaaaataaggggggaaatgggaaagcaggagtaatttcaggttttaaatttatattatttctccaggggtatgtgtagggtaagggggtcagaaggaatggcattgtggctagcaatattttgattctcagcaattttacactgttattgccaatagaaactataaaacattccctctgtaaaggttagggttcctaaccattcacttatggactcagccttcctggtaaagccacttaaaagttcattctacttactagctgtaagagacaactgtggcactcactggtttaaacatgatggtcctccccttctcacacaagtgttaatgacaaatataactgaaaccagagttcatctctagcagcttggtgatctgttttattttaaagctgtattagctcacaataaaagttaatccaataaactgaaattgatttcatatttaactatgtttacatttatagtgatatttacattcacatgtagaaagatgattgaatagcaaaaggatccatttccagaactttatatttatttatttattttttgagagggagtttcgctcttgtcgcccatgctggagttcaatggcacgatcttggctcactgcaacctctgtcccctgggttcaagcgattctcctcctttagcctcccgagtagctgggattacaggggtgcgccattatgcctggctaattttgtattattagtagagatggggtttcaccatgttggccaggctggtcttgaactcctgacctcaggtgacctgcctgcctcagcctcccaaagtgctgggattataggcatgggccactgcgcccagcccatttccagaactttaaatgaaataccaaatcaggtatcattcaaatataatctcttggtaaaactagccgttgctctgttggtcccaaatggcacacagtaagaaaataaacctgtatggcatttgaaagtctgattttctaattttggatatattccttattacttgtcagttacttcattctgccactaagttctggaagaaaactcatggaatctcagaattttaatgggagaggccttactcttgcagtcttaggagccagatccagtccccataactgttgtgttagactcaggacattaaaaattgaatgaacattgagaaatctggaggtctcactaaatatgcgtttcccagcacctcagaccctacccgcctcccacccccaaggtctcttagcaaccctgcttcccaacttacaggtcatctgggatttaccttagaagttcaaaatgtttaggcaaactagaactattttgcatttgtttattcacaagaagcaaagttgaagtaggtccagaggtggcctgaatcttctttttactactcacggaattgcaagtgaggttttaggaacggctggaaaccccagcagtgctttctcataaaaatgtatttcctgttatgctaccacattgggcccaccactcattaactgagaacactggctgacccaaagaaaagattgaatagaagctgttttgaaatagaatggcaaaatggtaatcctcttctcattcatcccatagggataacaatgagctagatgatgacacaaataatagctaacatcactgtctgtgtggaattctagccctagggctcattaaataatagagacttggtagggtggccaggtgaaaaaacaaaaaaccaaaaaactgttctctactagccagatgattggcactaacagctagtctgatttctccaggctaattttatcatgaacctaccccccaattataatatttgcacgactgtatgaagccctcccttgctaaccccgaaatggtcctggtgccacatcttcatgtgctctcacaactaaatttaaatctactcatgacaacagagcaaacaaggaaaagagcccaaactgatcaaaaggcgggaaagtaaaaaaatatatatataaatgatacatctaattctagaagcagacttttcaaagaaaccactggaaccactgcttactcagaacaagaacatatggtataatttagaagataaatgtttttcctaattgcatagaaaaaaacagacacaaacatggaatgctctgcttacatacagaactgactataaactgagtttgtgttaagtattacagatttgtccctctatttctaatcaaatattggagaaagcagaatggtattccttgcacactatatataaatgtacacaattttagaaacctctagtcaaaatcatgtcttgggaaaaaatgtctctacatactgagaggccttcattaaagtataaaatcaatcacaagttgccttgctgttgctctgagatgaaagaatgtacaataatgagcaatgtccctgcttatagataagtagactattccttggcaatacgatagagttagccagcttgaatttccaaagttctaaacagagccaagaaattaaaagcaaaacccctggattcagcctccttcaacatgaatacctgcttctcaaaatgatggctstgcactgtggccaagtcactttctctaagcttaagtttactcatctgaaaaatgggaaaaaatactgcatccctcagagggtggttgtaaggatcaaatgagttaatttacatcaaggccctagaatagtgcctgggacagagtattatgtctatttgctattattgtttatgaggtttggcagtgtccccacccaaatctcatcttgaattgtagctcccataattctcatgtgctgtgggagggacctggtgggaaataactgaatcatgggggtggtttcccccatactgttcttgtggtagtgaaataagtctcacaagagctgatggttttataaggggaaaccccttttgcttcgttctcattttctcgtctgctgccatgtaaaacatgccttttgccttccaccatgattgtgaggcctcctcagccacgtggaactgtgagtccactaaaccactttttctttataaattacccagtcttggttatgtctttatcaacagtgtgaaaacagactaatacagttaatatcagttggttttcagttattttagaaaactgaatctaagtttcctgggggtgtttttattactttaaacctacagtgccttcactctgaaatgcacctcttcccccacctccaccctcatccccatcttcttctgtaatttttttatgatcctcagattatagagaagatcctaaactcaaatgtacatctacactagaaaatgactgatcttacatagcatactcatggaactttccttgggaaaattagagttagaaccaaagcaacatatatccttccatccaaccccccagaaccaataactcaatattagaaatggagtgactaaatttaaggaagagaccatcctctgatgatggtgcagagacagatccaggacccactccaccaccacaagagtgtgagaacagaaataaggaaaaagcttttaagtcaagtatgaagaccccacatgtatcccactattctccctactgcaggtctgtatgtagaatttacaaaggaagcaacaaaaagacgctacaattctcacaaaaaagacttgacttcatctactacagagaacctcaactcttgtcatcttaccctcaaagcagaacttaaataccccaggtaatcaaaggggcaataattcacttctgcaccactgaagataacccttgacttccacaccaccaattaggataaatctatttggatgaacaaagggccaagagaggagggaagaacaaggaggacaggggaggggaagctgccttctgctgctctctgctgaaagacccccttttaaatatgcccagtgaaaaggattaagataaacctccaaaaaatactgccatgaggtaacttggaactaaatatgaagggtaatactgaccagctttgcaaacatgaaggaagaagcattattacttcaaaaagattttgaggtaataggcctaaatatacaaatcctccgaaatatataaa

SEQ ID NO: 94736 - DNA, 60817 bp, Homo sapiens
  misc_feature (1)...(60817): n = A,T,C or G
gaggcgccagggctcgcgcgccccgcctcgcagggagcagccagttcggggttcgcacggccagccgctgccgctgccgccgtcgcccctcgcccctcggcccccgcagcccgggctccgtgagcccgcctgggggacgtctgctcgccccttctgcggccactgacccgacagcctgggctcctcgctctggcccgggctcctagctcccacccctcaccctcaccgctgcctgcgcgctccccggggcccaggctccgcgcgcccagccacgatcacccaccctcctttcacactcactggcaattgcagcggcctgtcgctgggtgcgaccgtcatgtcggaatccgagtcggaaagctgcccatcttccatatcgccgacctccaacgccatcttcccgcggtgcgctgcgctgcacagcggcgggtcaggagagcacttccggcggggcagccggaaggcccggcggctcggctgctcgggcgcccccgcgcggaggccagcctgtcccagcggcctgaggcgtcccattgcattccaactaccccgggaaaatgaatcccttgttcccccaacacttttcttccaaactttattttcgtgcaaacataaatatgtcacgtatcgcggtcgtctgggattcctcccttggccgtacatccttcccctgtatgctctggacaagcctccccgcttctgttcttgctcctccacaatccactctacatattgcttccagggaagcctttcaagctgtatagtccgccctctgtatccactccccatccacggatgccgaacctgcggatgggaaggacccaccgtgcacccccacataatgtaaggggcttgagcatggcggatgttggtatctgtgggggtcctgaaaacaatgacccgcggatacctagggaggattgtaccttagctcgaatcttccaagtgcatccctccccaaaacaaggactgagttctcagcatggtgtttgaaatgtttgttttccggtgtcgtaaagaaatagcaacataaatttaacttactgaataaggccatttttactttctgcagaaagggtacactcgccagcagttttgccaggagagtacactgaacaaaaggagacagggtcatttataacctgacgtgtttaccttactgctgtggctggtttttattggctggaccggacctcacattttgtatttgtcccgattggctagcaacttagaactttttaaaagaggcaaaggtagaggagaacaaaggaaggaggaagtaacttgtggaatgctgagaaagatgaaaacacttttaaataaggaagaggaacaggctatgacctaatgcttgcttggactagtaaaagcatgccagggcaaatatttaggctaaattgtgggagctaagaacataaagtacatttttttttattatggctagcagatatttaagaatgttagcacagatctttgaataaattttgcttttaagagaagttactatttattcctaattagacggggaggaaagtttttgaagaggaacctctgttttactttgccacatggcaaacaaggtcatgtggactgggcatctggtcactggtcctagtgtgtccccctgcctaaccgctggcgcgctgaacctgttgttcctcaggccaggcctctgcatttgctgttcactcggcctgagaggcccttccctcaacccaccccattctttaagggttatcttggaacccgcctttgcgaaaattataacagtgagaaaattatggcagtgggagagatctgatctagccaacccctatcttgcttttagccttcaagctgcccttaattattcctgtgcttgggcctgtcaatgtaactttgggagacatttagtttatagtttaaatgataataacccttccccaaaagccaaccgcctttgtaaagctagtaagagaccaccagggtagacggataaaggaggctgaattctgctaaggtgtagacataaaccgttgccagtcattatcccagaggtcacaaggtatgcaacttttccattactcttccagataatatcactattgtagaccctaagattggcgttttgagatatcttttcagatattttgcatgtctgactaccaatggttccacctgaacctctaaccgcttctgggttcccacacagaagttgtcgagctgcttgaggacaatttcccatacccctatgactgcatccccaaccaataagcagcaagaacccattgcttagccactccatcccttccccaaactatctttgaaaaacactagtccctgaattctccaagagattgatttgagtaataactctgtctcccacgtggcatgggtggcctcctgtctattaaattctttcttctttttgagacaagagttttgctctgtctcctaggctacagtgcagtggcaaaatctcggctcactgcagcctctgcctcctgggttcaagcgagtctcatccctcagcctcccgagtagctgggattacaggcatgcaccaccaggctcggctaatttttgtatttttagtagagacggggtttgaccatgttggccaggctggtcttgaactcctgaccaccctgactcctgatctaccctccttggcctcccaaagtgctggaactacaggcgtgagccacagcacctggctcctctgccacttttaatacagaactgttttaaggtgtcctgagtttagccactgcattttcatttctacagggctttgcagttttcaaagtgctttcatatatgattcatttaattctgtctcttcctgctcaacctcattacaattcatcatttctgatttttcctgaactcctgttaagcagggctaacaggagttttgaaaaaaggatgtagaagaaggatgcaatccctgttttcaatgtgagcagttgctggtgcctatattcccagaattggcttatttattttttgagacagggtcttgctctgtcccccaggctggagtgcaatggtatgatcttggcgctctgcaacctccatctcctgggtttaagcgattctccaggctcagcctcccaagtagctgggactatagacgtgtaccaccacatccagctaatttttgtatttttagtagagatggggtttcaccacgttggccaggctggtctcgaacttctgatcactcaagtgatccttccatcttggcctcccaaagttctgggattacagctatgagccactgtgcccagccagccagaattggttcagaaggatgggcacacttctcttcttgacttgaagagagggcagccaacactccttgatgacactatgtgttgctcctaatcctttgtgcctctatgtattttaatttcgttgaagtgaatggaagagaagagaaggaagaatgtggttttgggatatgtggacaaataatcttgttggctgatagaaagtgatgagaatcagttaaaatgtctgagaattagccgggcgcggtggctcatgcctgtaatcccagcactttgggaggccaaggcgggcggatcacgaggtcaggagatcgagaccatcctggccaacgtggtgaaaccctgtctctactaaaaattgaaaaattagccaggtgtggtggtgagtgcctgtagtcccagctactcaggaggctgaggcaggagaatcacttgaacccgggaggcggaggttgtggtgagccaagattgcaccactgcactccagcctggggacagagtgagactccgtctctaaataaataaataaataaataaataaagtctgagaattaaaattagaaaaattagcaccatggtcctccgtgtagatggaagacagcagcagggttgttgatagagattaccaatgtcagatagggcattgcaactccttcgacggtgttattcattggttcatttgttcatatactcatgtaagtgagcgtaaacttggaacaatgctaggaactgtggagcaatgcaaagatgagtcagagatggtccttgccctaacaggaaaaaactgtagcatttacaaaaggaagcatcattcatgtatgcctagtactaactgcagtttctggtagctgcttgatacatgcagagtgtttgttcaaatcatttgtactataagggtggaagagataaagcttatgtttgaatgcagagatgaaaggggccaggagtggtggctcaagcctgtaatcccagctctttgggaggcgcaaggcagatcccttgagccgaggaggtgcggaccagcctgggcaacatgggggaaccctgtctctacaaaaaatcctcaaaaattagctgggtgtgatggcatgcctgtagtcccagctacttgggaggttgaggtaggaggatcactagagcctcggaggtcgaggcttcagtaagccatgatcctgccactgcactctagcgtgggcaagcatattttaaactcatgttcaaataatgatgattgagatattagtatttccgttttacagggtaggcccagttgttgtgaaatgagatggggcatgcatgaatggaaaggatattgtaggaagacagaaatggagaatgaaagaaattgatcaaaactgtctttattctttaagagtaagagctgggcgtggtggctcacacctgtaatcccagcactttgggaggctgaggtgggcggatcacgaggtcaggaattcgagaccagtctggccaacatagtgaaaccccttctctactcaaaatacaaaaaattggccaagcgtggtggtgggcgcctgtaatcccagctacgcaggaggctgaggcaaggagaatcgcgtgaacccgggaggcggaggttgcagtgagccgagattgcgccactggactccagccctggcaacagtgcgagactacgtctcaaaaaaaaaaaaaaaatgtaagaataggccggacacagtggctcacgcctgtaatcccagcactttgggaggcagaggcgggcagatcacgaggtcaggagttcgagagcagcctggccaacagggagaaaccccgtctctactaaaaatacaaaaattagctggtgtggtggtgtgcacctgtaatcccagctactggggaggctgaggcaggagaatcacttgaacctgggaggttgaagttgcagtgagtggagatcgtgccattgcactccagcctgggcgatagggcgagactccatcttaaaaaaaaaaaagtaagaggccgggcgcagtggctcatgtctstaatcccagcactttcggaggctgaggcgggcagatcatctcaggtcaggagttccagaccagcctgactaacatggtgaaaccccgtttgtcctaaaaatacaaaaaattagccgggtgtggtggtgcacacctgtaatcccagctactcaggaggctgaggcaagagaatccgcttgaacccggtaggcggaggttgcagtgagccgagatcgcgccgttgcactctagcttgggcaagaagagcgaaactccgtttccaaaaaaaaaaaaaaaaaaaaaaagtaagaatatacccaggcaggatatttatagaggaaatgcagcaatctaatatttatcattaattagaaaactttaatttgtaatctaccaaaacagtgaaaacaaccaacccttcccccgccccccaatacaaaccctccgttgcctactccagggacaagaggcgtcaccatcgctgaggagctggttaggaatgtcggctctccgaccctagcccagacttactgaatcagaatgtgcatttaccacgacgaccaggtcattacacgcattttacagtttcagaacccctgctatagcctactgtacttcagcgccaatattttgctgaaaagaattcccagctggaactgtggctcccggagtctttcaccagatggcagcagcccactcctccctgtagcactcccattgttccaggcaggattcagccgcaggctyctccggaagaccaggggcmgacggggcggtggcggggtcgtgcccagtgggaggggtcgggtctgcccaatgggttctcccgggcggggggcggggctctatttcagcagctctcagggccttgggctcatcccgagtcccgggctcagtatgtggcgccttcctcgcgcgctgtgtgtgcacgctgcaaagwccagcaagctctctggwccttgsagcaggcctgccgccttcatgtccactctcctcatcaatcagccccagtatgcgtggctgaaagagctggggctccgcgaggaaaacgagggcgtgtataatggaagctggggaggccggggagaggtacgcgggcgctcaagaaatctctgcagccgccggggctcgctcgaggaggccgggcgggcactgacctaccgactccccgctggcgctggatgcggtagtagcatgggagattttgaagctccacagtaaaagttttctcgtgtagggtgcctttaaaacaaaaacttagattttaggtccttgtgtgctatgcagaatcgacgtcattttggagctgtaggggctaaacttcccgcgcatatttaaaacattatggtctaccgggcgcggtggctcacccctgtaatcccagcactttgggaggcctaggcgggcggatcacctgaggtagcgagttcaagaccagcctgaccgacatggagaaaccttgtctctactaaaaaaaatacaaaatagccgggcgtggtggcgcatgcctgtaatcccagctactagggaggctgaggcaggagaatcgcttgaacccgggaggtggaggtcgtagtgagccgagatcgtgccattgcactccagcctgagcaacaagagcgaaattccgtctcaaaaaaaaaaaaaaaaaaaaaaattaaaaccttatggtcttgggatctatggtcttgtgagaaatgtggcacactgagcggtgcaactgatcttaatttagagcttaactctggctcttcagctgtgacgtgcaccgcaggtaacgttcttcagtgtagttttaagttatcttccttcctgaattctttgggagtttgcaagcttggacgtgccgaaatcttgccatgttgtacgttgggctgtgaactcctttgaggactggattttcagcatttctccattgcccagggcttaacaccgcgcctgatacccattactgctcaaaacaatgttttatagaatacaatggaaaggtaaggttattatcgcccagatttttttttaaaagaaagttttttataggaggatgttatgtaacagttaacaaactttgttggacgttgtatattatataatgaacctgccttggtagagggaacacgtcttttggtaatcagtggctgtaggagatacagataattttaattgctcctcagacctcggtgtttcatcctgatttccgtgtggtatctgatcattaggctcttggaggcctttttagctgtgccttgattttccctttcattgttgacctgagacctctccagttggtgtggacacgggactttccaacagttttcctgccttggccatttcatctctgagcagagggtgggcagagtaaggaagagaagaaataactaaaactagtcagtttggtctgttattaatggaaaaagagacaaaataactgcttatgttaaggcttttgtttatatgcctaatattgagatgtcagaggcgagttttgcagaaaggtagtttctaatgtttaagtcagaaatgaaagacaacctctgtagagtggtttatatgtaacagaagttaacctaagctttttgagtttgggtattatatcattttttcctctcttgtttttcttccccgtttggtctattcccttacttcaaaagggattacgttttctatacatgatcatcatccttttgttttaaggttattacgamctattgccctgctaacaacgagccaatagcaagagtccgacaggtaagagtgtgtgtgtgtgtgtgtgtgtgtgtgtgtgtgtgtttaattcaaattatacacaaggagtttgtgcaggctttctttagaggcagaagccagttaggcaggtcaagaataatataaaatcacaaatgaagagaataatgtgtttatttttcatttgtcatttaggactgtctgggggagactgtcctctcttgggtgggggcgtgaaaaggaaagaaccatagaaaaggtgaagcgtagaaagattaggcagggggccatttaaggcagtgcttctgaagtacctgaggattttgttaraatgaagcttctgatttccgaagtctgggttggagctcaaggttctgcatttctaatatgccttacatgttcccagatgaagctgacagattttgctttgaaaagcaaggttttaaagcatagttggataccaacctgttttaccgggttctagctagtttttggaagtatagactgtgggaatcattctcagccataaatgttagggaaccctagagatttcccaactcttttctgaaaatatttttgtgttctagaagatcatcatcatttctctttatttccccctttctgtccccctaattcttaatttaggccagtgtggcagactatgaagaaacygtaaagaaagcaagagaagcatggaaaatctgggcagatgtaagtatggcctttgtttctagaattcagaaaagatcactttgcctattgtaaccaatgagatacataaacatctgataagcaggtcagtgccgccttgttaaaatgtgagctccttgggggctgtgatactgtactagggctcctgctgttttggaaacacctctgccatatttctagggtagtgccttttttgtacttgccattcattgaatggataaatttaaatgaattaaaactttgtgctggtatagtataaacttgagctgtgaacactattcttcactgaaattacttgaatttataattaaatagaaaatgaatagaagatctatgccagaaatatttgtttgctcctcctctatccccctgccagatttgtctgggagtatctcagcaataggtcagcattcctggtttaaagaacaacagcagatcgcacctggtggctcatgcttgtgatcccaccacttcaggaggctgaggcgggtggatcatctgaggtcaggagttcgagaccagcctggccaacatggtgaaaccctgtctctagtaaaaatacaaaaattagccgaatgtggtggcgcgtgtaatccagcctactcaggaggctgaggcaggagaattgcttgagcttgggaggcggaggctgcagtgagccaagatagcatcactgcactccatccagcctgggcgacagagtgagactccatctcaaaaaaaaaaaaaaaaaaaagagcagtggcagcatccctttctcagggccagaggctcatgttccttgactgtctaatcaggctgtgaggcagagtcagcctccttggtctctgagtctccaccattggttaaatgagcaaatgtgggaactgtgactggtgctgggctggccacactgacttgtcactaggtgggagctaggctcctgagaaggggagagtaaaggcgaactaggatagcctgatttcccaacctttccactacccccatcctcagtgtgctttgtcttgtaaaaagaaaagactgggggtgcctgtctcctgggagggttaaatgagttaatcatttaaagtgcttactggagagcctggcacaggaaaagcctcaatacatttgagttaaaccctgtgctgttgggtgtgggactgctgagggactactgagctgcagtattttctctgagtgagtgattgcaaggggggttgggtggggttggggtggattgcagagtagcagcctgtccaacagagccctgggttggatgaagctttttttttttatcagccaagatacgtctttgtgtaaagcatgaagcacatctttcctctactttaattatggatagaagtatggcctagggttccattatacacaatcaaaagtatccttgggcagaaaaataccacttccacaagtaaacagtgtgctaggtaaagttcaccctacctggatagagaatactgtccaaaacagtgtccttcattgttttaaaaacttacttgtatttatttctgatcatraaagtaataaatattctttttttttagaaaagattgatgctgtaaataagataaacaaatttagtccccttaccccaacctctgcaatgcaaaatgttcattaggtttaggttttggtgcatttccttccagtctttcatgtatttatttcatagttgtgattattgtacatccatatatacatggtgtgtataaaattttgtgacctgtgatgcttgcattccataccatcctaaagttattgctttttttttttttttttaagacagggtctggctctgtcacccaggctggagtgcagtggcccaatcttggctcactgtaacctctgccttctgggcctgggatcctcccatctcagcctcccaagtggctgggattacacgtacacaccaccatgcctggctaatttttttgtattttttgtagaggtggggtttcaccatattgcccagggcggtctcgaactcctaagttcaaacgatctgccctctttggcctcccaaagtgctgggattacaggcgtgaaccaccaggcccagctgcataattttttttaaattgttgttttcctatacatacatacttttttcttttgagacggagtctcactctgtcactctgcagtggtgtgatctcagctcactgcaacctctgcctttcgggttcaagtgattctcctgcctcagtctcccaagtagctgaaactacaggtgtgcgccaccaggcctggctaatttttttaaaaaatatattctccaatttaaaacttttaattaaaaagtaaactttaacatcaaaaatgcaaacttggagaagacagaaaagatcacacacaaggctgtcacttcacacttggaaggttgcacagcggccaggcagaggggctcctcacttcccagacagggcagcggccgggcagaggcgctcctcacttcccagacagggcggtggccgggcagaggcgctcttcacttcccagacagggtggcggccgggcagaggcgctcttcactttccagacggggtggcagctgggcagaggtgctcctcacttcccagacagtggcagctgggcagaggcgctcttcactttccagacggggcggcagctgggcagaggcactcctcacttcccagacagtgggcagctgggcagaggcgctcctcactttccagatggggcagcagctgggcagaggcactcctcgcttcccagacattgggcagctgggcagaggtgctcctcacttcccagacagtgggcagctgggcagaggcgcttcttacttcccagatggggcggcagctgggcagaggtcctcctcacttcccagatggtgggcagccgagcagaggcgctcctcacttcccagtcagttgggtggctgggcagaggcactcctcacttcccagatggtggggcggccgggcagtggcgctcctcacatcccagatggggcggtggctgggcagggcgctcctcacttcccagacggagtggcaggcctggctaatttttgtattgttagtagagacagggtttcaccatactggccaggttggtctcgaactcctgaactcgtgatccacccaccttggcctcccaaagtgtttggattacaggcgttagccacttcacctggccttcctatacatatatacttaaaaaaaacaaaaacaaaaaaatagaccaggcacgatggctcacgcctgtaatcccagcactttgggaggccaagtgggcggatcacctgaggttgggagttcgagaccagcctgaccaacatggagaaaccccgtttctactaaaaatacaaaattagccaggcatggtggtgcrcgcctgtaaccccagctacttgggaggctgaggcaggagaatcacttgaacctgggaggccgaccttgcagtgagcggagattgagccattgcaccccagcctgggcaacaagagcaaaactctgtctcaaaggaaaaaagaaattaatagacttttattttttacagcagttttaaatttacagaaaaacgagtagaaagtacagaattcccattactccctcattcctcttcccaagtttccttttcttcttttttttttttaagacagagtcgcccaggctagtgtacagtggcatgctcacagctcacggctcactgcagctttgacctcctgggctcaagcaatcctcccacctcagcctccttggtaactaggactacaggcatgttcctccacacctggctaatttttgtattttttgtagagatgaggttttgctctgttgcctaggctggtctcagactcctgggctcacgcaatttacccacctcaacctcccaaagtgctgggattacaggcatgagccaccatgcctgtaataggccatttcccctgttattaacattttgcattagtatgtcatattttgttacaactgatgagccaatgttcatgtgttattataaactaaagtacacaatttacatgagggttcactctttgcatatcctgttttgaatgctagtgcaacttaacatgttgtcttttgactagaaacgtctattgtatgtgtctatttatctagggtaaatacaaacatttgaaaaaaaaagaatttatgtgaattcagggtcttgtcttttcctgaactggtttttattctgagactgagtcttgctcttgcctaggctggagtgcactggcatgatcttggctcactgcaacctctgcctcctagactcaagtgattctcctgcctcatcttcctgagtagccgggactacaggcwtgagccaccatgcccggctaatgttttttttttgtattttttagtagagaacagggtttcaccaygttggccaggttggtcttgaactcctgacctcaagtgatctgcccacctctgcctcccaaagtacaggcatgagccaccacacctggaatgaactggtttttaaatctatctttgccctagggagtgccagctgacattatgatctttcttaaatattgggctgtactttttttgttgctattttcacattcaggatctcatttggcagtcaactcttacccaccatgccagcctctgcacctaacatcctttctcatacttctggtgctttttagacctcccaacaaatagaatgggggtgctacgtgggaacaggttgctttcctgggtaatagtagagtcagytggggatcctacttgtttgattttgagttaagcaattgagttcaaggtttagggaagaggcagagtttttcctaattgtgctctggggctcctccctggggcagggacttagagaggctcggtaagaacagaccaaagcttgacccccttctcgtcacagaagctttcccatctcgatcctccctcacgtgaggcttctctgcttggccctcatccatttggctgaccttgactgtgttaggacaaaccactgtttcatgtagttcatttgagttaattctagaatttttctttttctttttttttttgagacagagttttgctcttgttgcccaggctggagtgcaatggtgccatctcggctcactgcaagccctgcctccccggttcaagcgattctcctacctcagcctaccaagtagctgggattacaggtgcccgccaccaattttttaaatatttttagcagagatggggtttcaccacgttggccaggctggttttgaattcctgaccgcaagccatccacccgccttggcctcccaaagtgctaggattacaggcatgagccactgygactggccaattctagaatttttcaaagggaacatttttctttaaggaaaatggaaacaaagtgaaacatatggaaaggtagtttatagaaattgatttctttctaaggaatagacttgctgctttcttccatgagccagtttcagcacagaatgtagcccatttctgccgtctgcatccccatgtgtcctcattttccctcccatctctggtgagaaagagtaggagtctctctgttcttgaagacagggaactgtttttttttttctttcttttttcttttttttgagacagtcttactctgtcacccaggctggagtgcagtggtgcgatctcggcacactgcaacctctgcctcctgggttcaagtgattctcctgcctcaatctcctgagtagctgggattacaggtaccaagcgtggctaatttttgtatttttagtagagacagggtctcaccatgttggccaagctggtcttgaactcctgatctcaaatgatccacctgcctcggcctcccaaagtgctgggaatacaggcgtggaaccacagcccccggccataattttccaaaaccactttctcttgcttttcagcctttgcatatgctctgtacccctctaaccccatgcttttcctccactttgcctacctcttcacaacacctggcatgctttaggtcttagccctaaacttctaaacttgtaaaaagcctacttcaggttgctccagttgtgaaatctagctcccctttcatggcatttgccacattagattgtaattgcctgtttcttgcctttatcacccccatggactgtcagctctatagagggcaagaattgtaactgcctcatttgcagtagaatatccagggattagcacagtatctggcacatagaacatatgcaataattatttgttgaaagactgactgaataaaatgtgtccagaatgggaggtaaaaggccatgtatactggccattctgagttgaaattaaccaacttaactaagcttataaatgtgctgactaaattcaattgaaacatcattaaacccacaccatgtgctaggaaatgtataggttatgtgctgattgatataatgctacaggtttttgtttcctgtttccaaaagtgtgcatatgttgtgaaaatgacagacattgcaaacatataaattgtggatgaaaatctgttataatttcattccccacaaaaaaccattgtgaacagcttggtatatgttgctccaaatttaagcaaaagtttacttaccataagtgttttcttgttttgtattattctattatagcttttcaatgttttcccataaaaatcgaccttattttatcactgttccgtaattaaccaatcatgtgctgatggacagttggtttctttttttctttactagaaacagcactgcaatgaatatcattgtacctatacttttgcatacttatgtatataagctcagtttctgtaagcagagctgcttagttaaagggtaggaatgtcatgcctgtaatcccagcactttgggaggccgaggcaggcggattacctgggatcaggagttcgagaccagcctgaccaacatggtgaaaccccatctctgctaaaaatacagaaaattagccgggcgtggtggcaggcgcctgtaatgccagctacttgggaggctgaggcaggagaatcacttgaacccaggaggcagaggttgcactgagccgagatcgcgccactgcactcaagcctgggcgtgacagagcgagaccccgtctcaaaaaataaatagataaaacaaagggtaggaatgttttaaatgttaatagattgcaaagtgaccatccagagaagctgtactaagagacrgtgatacacttggggagaagagagagcaaggaagaaccttgagctcacagccaagctctgtgaggcaagtgtgagcagtgctgtgattaggagcagtgggagttagggggagggtgtgattggcttctgcctgggggaaggtttcatggaggggaatgttccttttacctgtactttattattttttttgagacagaatttcactcttgtcatccaggccggagtgcaatggcgggatctcagctccctgcaacctccccctccggggttcaagtgattctcctgcttcagcctcccaagtagctgggattacaggcacctgccaccatgcccggctaatttttgtatttttagtaaagatggggtttcaccatgttggccaggctcgtcttgaactcctgaccccaagtgatccacctgcctcagcttctcaagtgctgggattatagacgtgagccaccgcgcccagccttagctgtactttgaaggagaggcagaattgggaagaacttgatgggagagagggagtgatggtcacagttggagaaattgtgtctcattcataaatcacatctcaaactttatgtgacataagctgtgctctttacccccaaaacctgatgtttcccttcaagtcttcttcatcccagtaattatacttcatctacctacctatttaagccagagagcgggaagttatcctgagttctttaattctcttcatttcctgcatctgtgtgtcctgtcaattctactcccaaaacagaccgtgaatccacttgctgtttcccttgttaccactgcaatcttttttttttttttttttttgagatggagtgtcactttgttgcccaggctggagtgcaatggcgtgatctcagctcactgcaacctctgcctcctgggttcaagcgattctcctgcctcagcctcctgactagctgggattacaggcgcacaccaccatgcccagctaatttttgtatttttagtagagacggggtttcaccatgttgcccaggctggtctcgaactcctgaccttgtgatctgcccgcctcagcctcccaaagtgttgggattacaggtgtgagccaccacgcccagcctcctgccatccttttaggtaaagtaacttacccatttcccctccaatcttgctgtttttctctgtctcagcttcctttttatttcctttgtctttaaaaccctgatggcaatttgtaattatttgttggcaatttgtaattatttgttgccttttcttctcctctgtgccttccagtagatatttgctccatgaatgccttgcttcttattttggctccagtgcctggccatatcacagttttgatgtgatcaraagtcttctttgatatgattgtaatttgttcttttacagcacacatccaatactgtgttataaacatgaatttatgctttgaatcagacacaaaaattgcattcttttcttagattcctgctccaaaacgaggagaaatagtaagacagattggcgatgccttgcgggagaagatccaagtactaggaagcttggtaaagtatttttgtagtatatacacaattctttgagtggacaataaggctgtcatgcttttctatatataaaattgtgaggttttttttttttgagatggagtcttgctgtcacccaggctggagtgcagtggtaaaatcttggctcactgcagcctctgcctcccatgttccagcaattcccctgcctgagcctcccgagtagctgggattacaggcttgtgccaccacggctggctaattttttgtatttttaaagtagacatggggtttcatcatgttggccaggctggtcttgaactcctaacctcaggtgatcctgcctgcctcggcctctcaaagtgctgggattataggcatgggccaccacacttggctagaagagtttttaagaaaagtaatttatattatattatattttattatttatttatttatttatttatttttgagatggagtcttgctcttattgcccaggctggagtgcaatggcaggatcttggctcactgcaacctccccctcctgggttcaagcgattctcctgcctcagcctcccgagtagctgggattacaggtgtgcaccaccatgcccggctgatttttgtatttttagtagagacaaagtttcaccatgttggccaggctggtcttgaactcctgacctcaggtgatccgcccgccttggcctcccaaagtgctgggattataggcatgagccactgtgcccggttgtactttatatattttaaaaattctttccttagaggaaagattaacaaggtagacaggaaaaagtgaaggcaattgttgtgttttaaaattctttggaaaatgaaacagactttcttcagtttattacatttacaaaacatgttttgcttccccctttctttaatttaatgtttataatgtgaattctgttggaaaaattctgcttgtcgttttatatttctaggtgtctttggagatggggaaaatcttagtggaaggtgtgggtgaagttcaggagtatgtggatatctgtgactatgctgttggtttatcaaggatgattggaggacctatcttgccttctgaaagtaagcaatgaaattagttaagctgagttttgtactctgatatacagagctccaaaaaaaataaaatactctggctattgactrtgcaaaagagaaatttcaagtggcataaatatgtgaaaatatcctcaatctttcaaagaaatgcaaattaaaacagatgaaaatgttagatcaagaacctttttgttttaaagataaaacttaatgttggcaagtccacgggtaagacacttttaactcatctgtaaaacgatttggaaatatacccaaagagctctaactttaaagagcccagttttaagaatctaagtaaataatctgaaataagacagaagttatgtttaaagaagttcattgtggcatcaataaaaaacattagaaatgacctaaatgtcgaatcataaggggaaaaaatctaagccaattttggtagactattagcatgtactaaaaataatgtttgtgaaggttgtcttcccctaacccacacttttacggraggattttatttacttatttttaaattatactaatgttaattttttttgaagaaacgatagattcatatcagaaaataagaaagcaataaaaggttgaaggattaaaagtttccctcctacccccatgactaagccatagtaccccatggaagtagtgaatgctttcaatttcttgtgtgtcttttttatattttgtaggatcttgctgtgttgttcaggctggtctcaaacttctctcctcaagtgatcctccccttcagcctcccgagtagctgggattataggcatgagccaccttcctaggcccttgtgtatctttttagagcacgtacagccaaatatgtagcaaactatacatttttttttttttgagatggagtctcgctctgttgcccaggctggagtgcagtggcgcgatcttggctcactgcaacctccacctcccgggttcaagcgattcttctgcctcagactcctgagtagctgggattacaggtgtgcaccatcacacccggctaatttttgtatttttggtagagatggggtttcaccatcctggccaggctgctcttgaactcctcacctcatgatccacccaccttggcctcccagagtgctgggattacaggcgtgagccactgtgcccggccgcaaactgtacgttctgttttatacttttatattcaataatatatcttggaaattgtttttttgttttctttttttgagacaggattttactgtcttgcccaggccagaatgtagtggcatgatcacagttcactgcagcmtcaacatccccgggatcaggtgatcctcctacctcagctaggactgtaggtgcatgccaccatacctggctatttttttttttttgtagaggtggggttttgcagtgttgcccagctggtctcgaactccggggctcaggtgatctgcctgtctcaacctcccaaagtgttaggattgcaggcgtgagccactgtgtcaggctggaaattgttttcgtattattctattaaggggcttccttcatctgtgtttgcagctatctattttgttataaagagactataatttatttagtcagcttccaaatgatgtatatgtagggctgttttcagtgttttgctattacaagctgttctgtaagaaccaatcttatactctgaggttttaacaatgaagatactaagatgacagcaagagtaagaaaaaaaaaaaagctggacaagatggctcacacctgtaatcccagcacttcaggaggccaaggtgggcagatcacctgaggtcgggagttagagaccatcctggccaacatggagaaaccccatttccactaaaaatacaaaattagtgaggcatggtggcgcatgcctgtaatcccagctactcgggaggctgaggcaggagaatcgcttgaacccgggaggcggaggtggcggtgagccgagatcgtgccattgcactgcagcctggacaacaagagcgaaactccatctcaaaaaaaaaaaaaaatgaggttaagagtgtaagcaatttgtgatgtttgcaatgtggatagagcaaaacaggtgactgtatgtctgcattggcaatggtgggatagaagtgtatgctaaagtggtagcagtggttatctctgtggcagaattactagtagtggattttcttctatttttctgcattttctaaatttccatgatggttattaggttacatttataataaggaaataaatattttttaaaaaatcatatttttctctttttcttggaatattgagtaaattccctacttgtagaaagagttgggggagtctttttaagtctaattaaggacacttaatgtccttaattagatatctagcaatgattcccattatccaatattaattttatgtcattgaacactttcaagagtttttttctagctaagaaaagttaataggcccaccgtggtggctcacgcctgtaatcccagcactttgggaggcagaggtgggcggatcacttaaggtcgggagtttaagaccagcctgaccaacatggaaaaaccccatctctaataaaaatacggattagctgggcatggtggcacattcctgtaatcccagctactcgggaggctgaggcaggagaatcacttgaacctgggaagcggaggttgcagtgagccgagatcacgccattgttctccaacctgggcaacagaagaaaactctgtctcaacaacaacagcaataacaacaatacagtcaataaacctccaatttggggatatgtacatgtgcragcaggtaactatttgatttatacctactatgatgcctgcctcacaattaacaattaaaatttttctcaattgcttgcacattttcgtttgtttatttgagataggatctgtcacccaggctggagtgcagtggtgtgattatagccccttgcagcttggacctcctggactcaagcaatctttccacctcagcctcctgagtagctgggattacaggcacatgccaccaagcccagctaatttaaaaatttttcttgtagagacgaggttgcactatgtggcctaggctggtctagaactccttggctcaaataatcctcctgccttggccactcaaagtgttgggattgtaggcatgagccaccacacctagcttacacttctatttttttttttaaagcagtttactcatttatgtagagactttggggtaactttggctttattaattcaataaatgcttatggagcatctatcaggtgccgggtagtctactaggtgatactcgagctataaggcatagtccctgtcctcaagggatttataagcttataaattataccttagagtgggagataaataaacaggtaattatatccagcataatccagcatggtaagtaatatgagggagtaaacggtaggatggtgggcacatagctgggatcccctaacccagcctcatgagtgcagtccaggaaggcctccaagagaaggttagccaaggtaaggtcccaaatgggacaaagaggagaaggagtggagtgctggaagttgttttaaagaaggaagaagcctgtgtgaaggctgagagggtctggcttatttgggaggattgcattgcttcagcacagctggagggtgcagtggtagggcagatagagtggaaagagaacctcgggaagagattttgtctgacaaggagattggactttattctgagaatagctacagtaggtatccaaaatccacagggttataagcaagggggtgacatcagggcagagatgggagggctggaacggaggaaggggcagccctgccatgaaaaggcacgccctgccaagaagaggctgggccagcactgcctctctagggattaaggtgcccagattaacgagggcccatgagtgaggagctgtgtctggtatggtccctcatcctacctagcagtgtgagtgtggctagaaagactgatggctgggacagtcacctttccagttggactgtggttttaactgggattcgtgaaccatcgtcttcgtgcggtatgggtctatactgtgcagctgcctttaattaaaataaacaccttgtgggattatggctgactgtaaagggcgtaagctcggctttaaaatacaatactcttggtcggacctctgctttacttacatttgtttttttgtatannnnnnnnnnnnnnnnnnnnnnnnnnnnnnnnnnnnnnnnnnnnnnnnnnnnnnnnnnnnnnnnnnnnnnnnnnnnnnnnnnnnnnnnnnnnnnnnnnnnnnnnnnnnnnnnnnnnnnnnnnnnnnnnnnnnnnnnnnnnnnnnnnnnnnnnnnnnnnnnnnnnnnnnnnnnnnnnnnnnnnnnnnnnnnnnnnnnnnnnnnnnnnnnnnnnnnnnnnnnnnnnnnnnnnnnnnnnnnnnnnnnnnnnnnnnnnnnnnnnnnnnnnnnnnnnnnnnnnnnnnnnnnnnnnnnnnnnnnnnnnnnnnnnnnnnnnnnnnnnnnnnnnnnnnnnnnnnnnnnnnnnnnnnnnnnnnnnnnnnnnnnnnnnnnnnnnnnnnnnnnnnnnnnnnnnnnnnnnnnnnnnnnnnnnnnnnnnnnnnnnnnnnnnnnngggtaccttgcatgacacgcagctcgactctataggatccccttgtcttgaattcagagaagttggcccagggattcgtcaggtaacataaagaatatgtgaggccaggcgtggtggctcactcctgtaatcccagcactttgggaggccaaggtggatggatcacttgaggtcaggagtttgagaccagcctgggcaacgtggtgaaactccttctctactaaaaataaaaaattagctgggcatggtggtgcgtgcctgtaatcccagctactcaggagggtggggctcgaggattgcttgaactcgggaggtgcagttgcagtgagctgagattgcgccactccactccagcctgggtgacagagtgagactgactcaaaaccaaacaaaacaacatgggcctaagcccctgtgccctggtcatgttctgccctttgtgatcataccacctagggcacccatcaactctagaaagtgtccttgtctcccaggtgcactgatactgctctgatctatgcagagttcctatgaagatcagaggcataatgaatatcattatgatttacaaggtagtgtggtaataaccacttttgttgtacattagttaatgtactgatatcccatggctgtgtagcaatttcccactataaggcatctggaatcttctccagtctgctgtacgtttgttcttattaacttgatgggcattaaattaacatgcttctgcatgttccatcctttktctgtcctcaggatctggccatgcactgattgagcagtggaatcccgtaggcctggttggaatcatcacggcattcaatttccctgtggcagtgtatggttggaacaacgccatcgccatgatctgtggaaatgtctgcctctggtaagacctgctcactttcctatttagtagtgagtgataaaaatagccatttctagatactactacctcagcctcttcagtaactgggattataagtgtgcatcaccacacctggcttcttcaataaaactttattttattttatttttttgagatggagtttcactcttgttgccctggctggagtgtaatggtgcgaactcagctcactgcaacctccgcctcccaggttcaagcaattctcctgcctcagcctcccaagtggctgggattacaggcatgcgcaaccatgcccggctmattttttgtatttttagtagagatggggtttcacgatgttggccaggctggttttgaactcctgacctcaggtgatccacctgccttggcctcccaaaatgttggcattacaggtattagccattgcacctggccaataaaactttggtagtgaactcccaagtaattctgaggcagttggtcagtgtttccatttaggtcttaaatttttcaactctgcaaaatatctgatagtaaaaatgttatattttagatggcaaacagttacttgttttttacttttgtgttcagtggaagaaattaaataaggaaaatcaggacaattgtctttagctcattttgcttgcatcygttccactagttattaatttgttttaaatgtgtggtactcagttgaatgtattcaaaaactaactgtaaaataggacatatttgggaggactaataactgtatttcttactttaacaagagaaaaaactctgcttgtccacaattctttttttttttttttttttgtgacagagtcttgctctgtcgcccaggctggagtgcaggggcgcggtctcggctctctgcaagctccgcctcccaggttcacgccattctcctgcctcagcctcccgagtagctgggactacaggcgtctgccaccacgcccggctaattttttttgtatttttagtagagaaggggtttcactgtgttagccaggatggtctcaatctcatgacctcgtgatccgcccgtctcggccccccagagtgctgggattacaggcgtgagccaccgcgccctgcctgtccacaattctttagcctgcagggcattgatattttctgaccgacatggtttggtgggaactagccccgagctctttcagggttctgccccatgttgtgaaaggaactcatgttttccaacattctaatctaaaaaggttcattgtgtagttttcctcagctctctgagttttccaaggaagtttacttaatgcagcacgttggtagatttctgcttcactcagttcctataactggctgaggttaatgtagtgattcctgcgatcagtgcagcaagctgattcagaattgcttggtgccatttttatgttcatgaaagttttgttgttccttaggtctsaaagacacccagctgaaggacagatttctgtttcagttactagactcacttgttagttgtctaattggacagagctttttctcacacttttgcttctgtttgataataaaaggtatttatggtttccgtcaaataagtttttctttttctttttttgttttaaccttcttaaggaaaggagctccaaccacttccctyattagtgtggctgtcacaaagtaagtacatgtggctttctttttcctgggtatggaataatattgaaagggttattgataggccctgactttttaatctgatgtcagagtcacatagcatggaatttggataacctctttctcctttgcttgtaatattatttttatatacagagtgctttcagtgccatgtcatttaatttaactctttggaaacatgccagatattgacatattgattgaactcttgcagacattattttgtcacttggaaaataaaagcatcttcagtggaaaggaaaattttgcaatttaggatctatattttctcactattcaacaagttagtggttttgagaatagatttctatctagctaatacttttgttgcttttgcttaatagagtgttaacaaaactgattattacactaatctgctgattcatctaacactaaaatgtatcgcatcttttggttaaaaaattattaatgctttacttatatttgagaatttggcagctctggttaagtcataaaagcaatgtgactgatttgtcattctggaatttggaggatgtatagagttagggtgccttcccatgtaggattaggatgtacctttgatgttccattggttgcatctgcattctgatttcagaattattagtagagaaattggggtggagactgtgggcaagagggttcttcatattagaatattattattattattattattattttttgagatggagtcttgctctgtcactcaggctggagtccagtggtgcgatctcggctcactgcaagctccacctcccgggttcacgccattctcctgcctcagcctcccgagtagctgggagtacaggtgcacaccaccacacccagctaattttttgtgtttttagtagagatggggtttcaccgtgttagccaggatggtcttgatctcctgacctcrtgatccacctgcctcagcttcccaaagtgctgggattacaggcatgagccaccrcgcccggctattattattatttttgagatggagtcttgctctgtcgccaggctggagtgcagtggtgcaatcttggctcacggcaacctccgactccctggttcaagtgattctcctgcctcagcctcccgagtaactgggattacaggcttgtgccaccacgcctggctaattttttgtatttttagtagagatggggtttcaccatgttggccaggatggtctcgatgtcttgaccttgtgatccgcctgccttggcctcccaaagtgctgggatgggcatgagccactgtgcccagcctagaagattatttagaatagtggtttaggaattggaaagtggtgggctggaaaagagcaagggtaatatgttttctttttttttttttttttttttttgagacagtctttgttgcccaggctggattgcagtggggccatctcagcttactgtagtttctgcttcctgggttcaagagattctcatgtctcagcctcccgagtagctgggattataggtgtgggccaccacgccgggctaattttttttttttwaaagacagagtcttgctctgtcgcccaggctggagggcagtggcacaatctcggctcactccaacctctgcctcccaggttcaagcgattgtcctgcctcaacctcccragtagctgggattacaggtgcatgccaccatgcttggctaattttttcttttttttttttttgagactgagtcttgctctgtcaccaggctagagtgcagtggtgcgatctcggctcactgaaacctctgcctcccgggttcaagcgattctcctgcttcagcctcccgagtggctgggactacaggtgtgcgccaccacgcccggctaattttttgtattttagtagagatggggtttcaccatgttggccaggatggtctcgatctcctgacctcgtgatctgcccgcctcagcctcccaaagtgctgggattacaggtgtgagccaccgtgcccagctagctaatttttatatttttagtagacatggggtttcaccatgttgtccaggctggtcttgaattcctggcctcaagtcatctgcctgcctcggcctcccaaagtgctaggattacaggcatgagccactgcccctggcctaaaaataaacctaaaaaacaaacaaacaaaacaaaacaaaacccagcagaataattaatgtggaagtagtgaactgacttaattgttacgaagtagctggttaaaatattgttcattttgatactggttttgctttaagctttttttttttttttttttttgctttaaatggttgaagaatttgaaatgttcatgtaagagtttatatgctggttgatggtcttcaaagcactgaaaatgttatttgcttttgtaatagaagataagtaaaatgatgctaaattttgctggaattaactaagggtgatgcagtgctacaaagaggtcttcgtaaattcaactaaattttcagattcttaagatgaccccaggccacatatggttcttctgtgtattcagaaggatataggacagcagcatagcttgtcaggaggatggcatcaggtattcctctttaatcagtgttcttgtcacaatcatacaggtacaagaaagtgagagccccattggagaggtgtggggttaccttggcttaaagcctaatgccccacagaaaccaaaatctcttgtaacaattgtagctttcaggggccacagggacatgcagttacaagtgtcactgcactcaggaaaggccaaaaagcatggcattcccattaatagctcatagatactcagttcagatggaagtgaccaggcagggatcatttttaccataagccgggttgtctaagaaacattgatgacactctgacacttatcaggtgacatggagaacagtgctagagttcaacttaaagttagattctcatgccttaggggcaggggtttgttaacctttacccataggcacaaaacaaaagccttgcccttaaagagagtacagtctacttgtgcagacaatatagacacccggagtccctgggaagaattgtacatcctgaaacctggtcttggacatgagagctggagttcatgatccttgattggatcctggattggaaggaagaaagaaaacagctataaagggtattttaggggaacttaggtgtgataatgataccttttctatgaaagtgagcatgggatttgagagtttttgaaatttaaacaaattggaaagtagccagtaagttgagatgattgatgaaaataacctttgctctttggtcctctggaaactcaaaatgaatggaatcctttttcagagaaaccagaattattttagccatttttttatgactcaaaatcagatttaagtagtayttaaatgtatttctcattctaacaagagaaaaaactctgcttgtctgcaattctttagcctgcagggcactgatattttctgaccgacatggtttggtgggaactagcctcaagctctttcagggttctgcagggtggccccagctccttcttttgtgtctgtggcatttactttaggttttggggatcccttccccttccccaatttgtgctttacaacttctctaactctgctttgcagagatgtgtttaaatctcttatttgctggtggtgactacctctaatttccttcatcgttctaggtcttattcctttttaatcatcattttaatagatttgtgtaagaccaaaaaaaaaataaataaataaataaaaggcccagtgatcagtctgctgtcttgaaccagatgtgtcctcatagtttgggagaaaatacttgaaaacaatgacagtttgagctacctaaacaatgcttcgtgtcttctatttatgttctatgtttttttcttcttctcaagattcttttttttttttttgagatacagtctccctgtcttccaggctggagtgagtggcatgatctcagctcactgcaacctctgtcttccaggttcaagcgattctcctgcctcagcctcctgagtaggtgggattacaggctcccaccgtcactctcggctaatttttatatttttagtagagatggggtttcaccatgttggccaggctggtgttgaactcctcacctcaagtgatccacctgcttcggcctcccaaagtgctgggattgcaggcatgagccaccacacctggcctcaagattcttttagggctaaaaaaaaaaaaaaaaaaaaaaaaaatctgctaatagttttttgaaaacggcattttcaatatgtgaggagaaatccaggtctgaatgtttgaggacagaaggacagagtctggtataagagggttcttaatgttagaagtccatttaggaacaatgacttagaaattgaaaagtgggctgaaaaagcaagagagtagtatatttgagggatgggagagaaagttgaaaaaaggagagtcaagtggttggaatttattccttgtttttaaaaaaatgccttaaattattgcctcagtaattgctttttcctttctaggataatagccaaggttctggaggacaacaagctgcctggtgcaatttgttccttgacttgtggtggagcagatattgggtaggttactaggctgagagcatcctctgttgaaggaccccaggttgaccaactagaatcatcgttactagaataatgaactcacttataactaaggagttgagaatggtttttgaaatcattattattrtggactttgttgggttcttattttattaatgcctaactcctattggaggatgaataagaattgtctttttaattgcccagaggtactatttgttaaggtgtttatatcctgaaataacaaactgctgtaatggggggcagcctgtgacttcctgacacttggtttatcaaggtgtttacttacaaagaaagctatgaaattgtagtctggggtctcactgcctgccaagaacctagcctattgtctgagtttctcagctgactgaaaaagggaaccctgggaacacagcctctttttagtaaaattgtttttttcttttttaattgccatataattcacaattcgtgtaccrtaaaatcatgaaatgctctcttttaaagtgtacaatatagtggtttttaaaatattcagagtattgtatatctatcaccactatcttattccagaacattttgatcagccaagaaattaatcccatacccactggcagtctcttcccattccccctgccctcatgccctgacagccactaaagaattttctgtctctatggatttgcctatttgagacattttgtataaatgtaatcatataacatgtggccttttgtgtcttgctgcttttacttggcatgatattaagatgacatggactatacttgtgctgaactgggatgaaagctgaggttcttaccagcttagactttgattaggtgagtttttcaggagtcaagtcttacaacccatactggtgtggctaaagtgttagtttcctygccttccaacacttttaaatactattgtacttactgggcaatctcaaaaaggagcaataagttactctgtttttcattactctgtttttcatattaatgagaaaattttagaaatacaactcccacatgtataatgcagagtgaaatattatctaagtgtcatttaaaacatgagttggcctttgactgtattcttgcattctaggtatttagtccttgtgctggccttgcaatagctcagataattatggtagtatatacaggagcatgttaagcagcagccactttgagtattagtgctcatgcttgctgagttgaaccttggaagactgacctaggcaattgagccaagccgtccagccctacgttagactgatgctgtggctgccctgcttggttcacactggaccctttgtagcactgaattaggaagaaagaggttcaaatcagtagtgtctgatttgcattccttagaagcaactggaaatcctagcatagcctttataagtaggcttccatgaggaatactttaggatagcggtccccaacctttctggcaccagggactgggactggtttagtggaagacaatttttccatggaccacggcagggggatggttttaggctgaaattgttccactcagatcataaggcattagttagattctcataaggagcatgcaatctagatcccttgcatgcacagctcacaatagagttcacactcctctgaagatctaatgctgctgctgatctgacaggaggtggcactcaggcagtaatgctcgccaggttgcctgctgcctacctcctgctgtgcagcctggctcctaatagsccacagactggtactggtcagcatcctggggcttggggacccctrctttaggatatttccctacaggcttttaagtttgaattcttttattttttatttattttatttttatctttttgagacagggtctcactctgtcacctaggctggagtgcagtggcttgacctcagctcactgcaacctccgcctcccagtttcaagtgatcctcctacctcagcctcccaagtagcgcatgcctccacacctggctaattttagtattttttatagagatggggtttcatcgtgttgcctaggctggtcctgcccaagttttaatccttaaaggaattacacagcagttaaaagtttgtaaaactggaatgctcagcaaggaaatgctaagatcatattgtccagtcactcactcagtataggaaagastttcttccctaacaacttcctctaggtgatttctattcaaatgctcacagcaggttagcctcttctgcctaatggttctacctgtgaaaaactttwttccttctcatgaagaccttccyttgctcccctgggacagactttcttgtagcttcaagggactgctttttcaagggcacttcagtgctgggtaccattagatgttgtaattgctgggtttctctgcttgggtggccgaccgtgtctgttcccttgcagcacagcaatggccaaagatgaacgagtgaacctgctgtccttcactgggagcactcaggtgggaaaacaggtgggcctgatggtgcaggagaggtttggtaagtgttggctttctaatgaggattttaattctctcaaatatggaggtgaaatctaaaagttgagtttttgttttcccctcaaccttttccatggaggcagtggtcatgtttatttgaatgtctaagtaaaagaaaagggtacagttattagcagtagaatattagggaagtcctaaatttaaataccaaaatttatgaaaatcccagcactttgggaggccaaggcaggtggatcacaaggtcaggagatccagaccatcctggctaacacggtgaaaccccatctctactaaaaatacaaaaaattagcsgggcgtggtggcgggctcctgtagtcccagctactcgggaggctgaggcaagagaatggtctgaacccgggaggtggagcttgcagtgagccgagatggcgccattgcactccagcctgggcggcagagcgagactccgtcacaaaaaaaaaaaaaagaaaaaaaaaaattcaagccaggcacagtggcttacgcctgtaatcccagcactttgggaggccgaggtgggtggatcacgaggtcaggagctcaagaccagcctgggcaagatggtgaaaccccgtctctgctaaaaatacaaaaagtagccgggcgtggtggcatgtgcctgtaatcccagctactggggaggctgaggcaggagaatggcgtgaacccgggaggtggagcttgcagtgagccgagatcgcgtcactgcactccagcctgggtgacagagtgagactccgtctaaaaaaaaaaaaaagttatgaaaggaagtcattttctctctaaatgggtataattgaatcacatagaatatttatgtttgaaatgtttgtttttgggtgctgtaaagaaatagtacttgaacataaatttatttagtaaggccatttttacttcctgtagaaagggtacagtcgccagcagttttgccaagacagtacactgaacaaaggagacagggtcatttataacctgatgcgtccaccctactgctgtgtccagtttccattggctggaatgggacctcacattttgtatttctcccaattggctagcaacttagaactttttaaaagaggcaaaagtagaggagaacaaaggaaggagaaagtaacttgtggaatgctgagaaaggtaaaaacacttaaataaggaagaggaacaggctatgacctaatgtgtgcttggaccagtataagcatgccagggcaaatatttaggagcacaagtctttgaataaattttgcttttaagagaagttattatttatttttaattagatggggaggaaagtctttgaagaggaagctctactttactttttacacttatcaaattgtactagtcctatttggcaaattaaagaagaaaaatgtcatcatttctcattagtatagtggtgagaaaaatgtcatcatttaaacaggagcactgagtacagaacttacagtgagtgtggaatagaaggcttaaatctgctcttctctcatgtatatggatcatggatatggatccatatgtatccatatgcatatggatcatggatatggatcctggatacatgattgaaaagggttgtatagacatagctttgtatactgtactgtgctttatggatgatttccaaggtttttgaggataatattggctatcaatttttggctgtcaggatgaattttagactttaaccccagcataagayaacatttgactaatctgtcaactgtttaactatgtaggcattgcttttaaaaaggaatttattaaaaaacagctaatgaaaaaggtcagcaaggttgcaggactcaagattgagatacaaaaatcaattatatttctatgcattaacaatgaacaatccaaaaatgaaatccagaaaacaattcaatttgtagtagcgtcaaaaagaataaaatacttaggaatacatttaacaaaagaagtgtaagtctgttgcacggagcactacaaatcatcatcaaaataaattaaagatgacctaaataaatgagtagatatccccttttcattttttggaagatttaatattgttaaggtttcaatatggtccacatgattacagattcaatgcaattcctgtaaaaatcccagttttctgttttgtgacaactgacaagttaattctaaaattcacatgacaatgcaaaggaccctaaaaggccaaaacaatcttgaaaaagaagataattgaaggactctcacttctcagtcaaaaaatttacggcaaaactatgataatcaagactatgtggcaccagcataaggatagacataaaaatcaatggaatagaattggaagtccagagataaacccttgtatttatggtcagttgtgtcaagggtgacaagacatttcaatggggaaaggatggtctttttaacaaatggtactgacacaagtagctatctatacacatgagtgtgaagtcaggcccctactacatctcctatgcaaagacaaactcmaaatgtatcaaagacctataaaactcttagaagaaaacataggaataagttttcatgaccttggattaggcgatggtttcttagaaatgacaactaaagcacaagcaacaacaattaaaagacaaattagtttttatcaaaattaaagcattttgtgcttcaaaggacatcaggaaaaagtgaaaagaacaacctaccgaatggcagaaaatgtttgtaagtcatttgataaggaacttgtatgtagaatatataaagaactcttaaaatgtaagaatataaaagacaacccaattaaaaatgggcattggatttgaatagccgtcttttttttttttttttttttttttttttgagatggaatctcacgctctgttgcccaggctggagtgcagtggggagatcctggctcactgcaacctctgcctcccaggttcaagtgattcttctgcctcagcctcccaagtarctgggattacaggcatgcgccaccatgtccgactaatttttgtatttttagtagagacagggtttcaccatcttggccaggctggtctcaaactccagaccttgtgatccgcccgccttggcctcccgaagtgctgggattacaggcataagccaccgcaccaggcctagaatagacatcttaaatggccgattagcacatgaaaagattctcaacatcattagtcccacgagcagatttcatcttctcasctttctccccttttccttactcaaggcggtagtttgttgttcttggctaagtagtaatagtagtagtagtagaattataatttttaaaatgtatctgcctgtcttaattataggtgcttttcttggaggagttggtggttaggagtatagtcagagagcgcctgatagagaactggaaggatgtagaaagtatagatccctcctcttctgccaaacatcacttgcagccaggcaggagaagctaatgtcaggygtaaaagcttccgtttccttccttctcttcttaacacctagcatagcgctatgctatagccagcaagctgtcattaattcaatgattgcagcagagactagagttggtgtagcatttggtggcttttggtagtaacagccatgtcttcataattaatattcacttgatgcttacctgtttcagagcaatggaaatgagaagatactctgctgttgtcacatatgctcctgatatcacaaatgaataaaagttattcacatggaagctgattttaaagtgcacttaaggaaatcgatgatcaaaagatcagtaataaatgtatgtctaaggctgggcacagtggctcacgtctgtaatcctagcactttgggaggctgaggtgggtgaattgcctgagctcaagagttcaagaccagcctgggctacatggtgaaactcccatccctactaaaatacaaaaaaattagctaggtgtggcggcatgcccagctacttgggaggctgaggcaagagaattgcttgaacccagaggcagaggttgcagtgagctgagattgcactrctgcattccagcctggcracagagtgagactctgtctcaaaaataaataaacatatgtctaaaattgaggcaaacacatctctcagatctttatgctgggaggagtaaggtaagaatggcatttataggccaggtgtagtggctcatatctgtaatcccaggactttgggaggtcaaggtgggtggatcgctggaagctaggaatgagaccagagcctgggcaacattgtgaaaacctgtctcttaaaacaaaacaaaacaagccaggtgttgtgacacgtgcttgttgtatgagctacttgggaggctgaggatggaggttggcttgaacccagaaattgaggctgcagtgagctatgatagcaccactatattccagcctgggtgactcttgaaaaaagaaagaaagaaaaaaaaatggtgggccggtygcgatggctcaagcctgtaatcccagcactttgggaggctgaggcgggcggatcacccgaggtcaggagttcaagaccagcctggccaatatggcaaaaccccgtctctactaaaaatacaaaaaagagctgggcgtgatggtgcatgcctgtagtcccagctacttgggaagctgagacaggagaatcacttgaacccaggaggcggagatttgcagtgagccgagatcacgccactgcactccagcctgggcaacagagcaagactctgactgaaaaaaaagaatggcattcatggcctgctatataacttttctagaatataggttggcaatgtctgtcaagagtcctaacctaagtaaataatcaacaaatatattcaacactggagaaacagctaaataaaatttggtatgtcatcatgatggaatgctatggagtggtttttcttttcttgacttttaataacttaggggaaaggtgtaagacatcagaaaataaagtaaaatgaaataatataatctcaactagatataaatgcacagaggaaagattggaagacactatcaaattgtaagtagagatttttgtggtggccttatgggccataggtttctttctttctttttaattgtgggggaaagtccacacaacataaaatttacttaaaaatggttaagatggtacacagttgagtagtgtcaagtacattcacatgatcatacagcctatctttagaactttttcgtcttgtaaaactgaaactccataccctataaacactaatccctccttcccactacacccagccttggtagccacccttctacttctttctgtttcattgatttggactactttcatttgagtggggttataagtatttgtcctttagtgactaccttatttcacttaacataatgtctacaaggtacaaccatggagtctcgctctgttgccagactggagtgcagtggtgcaatctcagttcactgtaacctctgcctcttgggttcaagcaattctcctgcctcagcctcctgagtagctgggattacaggcatccgccaccacgcccagctaatttttgtgtttttagtagagacagggtttcaccatgttggccaggatggtcttgatctcttgaccttttgatctgcccacctcggcctcctaannnnnnnnnnnnnnnnnnnnacgtacaactatcgtgtagcatgtagtaggattttctttttaaggctctataataagccaggtgtggtggctcatgcctgtaatcctagcactttgggaggccaaggcgggaggatctcttgagctcaggagtccgagaccggcctgggcaacatgccaagaccctgtctttgccaaaaaaaaaaaagtacaaaaatgagctgggcatggtggtgcatgcctgttgtcccagctacttgggaggctgagatgggggaattgcttgagcccaggaggttgaggctgcagtaagccatgatcytgctagtacaccccagcctgggcaacagagtcagaccctgtctcaaaaaaaaaaaaaattaataaaaataaaaaaaggctgcatgatatttcactgtattgttataccacatttactaattcatcagatgatgcacatttgggttgctgccaccttttggctattgtgaattatgctactatgaatattggtgtacaaatatctatagagtccctgccttactatgtttggttatatactcagaagtggaattgctcggtcatgtggtaattctcttatttatttatttacttacttgagacagtctcattctgttggccaggctggagtgcagtggtgtgatcatggctcactgttgtctcaaattcctgggcttcacgagtagctgggaccacaggcagacactatcatgcccagctagtttgttttaatttttgtagagacagggtcttgccatgttgcccaggctctgttatttaattttttggggcaattgccatactgttttctacagtggctatcccattttactttatttttcttgartaatgtcagataagactgggcacgctcagggtggtttggtttggctgtagactttcctgttaatttcaaaccaaaattatatgaccaacataaggaattcctgtaaaccctttaatcagagtcactaattgcttacattttgccccatttgatttctcattttctctctctccagcaacatctgtgcgcgcgtgcacgcacacgtacacacacacacacacacacacacactctgtgggtgcttattattgttgaactgtttggagtaagtcaaagatgtgtcccctttattactaaatattttggtgtgtttcctaagaatgtggacattttcttgtataaccacagtagttactaaaatcaggacatttgatattgatacaatagtaatgctactttataaattagaaaataagttgaaaaataattgggatagggtgtaatcaggataggctatatgattgggataggctatataaaaaataattkgacaggctatataatttaataattgggattaggctgtgtagcagtgtgcagtaaatatggaagtaggcattaatttttatatataatttttttcttttaagggagaagtctgttggaacttggaggaaacaatgccattattggtaaggctgcctctttgtttttgtttgttttctgttcagtttccacagtcgccatcctgaatatatggaacttgtttgggatctcatttcgtccatgttgcatatgcctgagacctagttcctgtgtttaggaattttacttgggagacaggacacaagcttgttttgaaggcagaggtaactaggaaggaaaggtattcatgtttagaacatgttacctgggatgatctagaacctgtgaatgagacttccattgccattgtagtatggcattatttcttgttttttcttcttctgtttgctgaaaactggccacatttctctagaataacttaagtaactcttatgtgacttgatcatttctttagatttcaaaaacattattttgtctttagtggaatattgagtgtttttatattgggaaggaacatgtccttaaggcattaaaaaaatcacttacctataggcttagagattacttatgctcttttttaactgtttgagtttgtcacaaaaatgcttagatatttgtagttgacacacataagaagtatgtgtaagatataagaagtatatggtgaagtgtttgttctggatgaacttttttttttgagacgggagtcttactctgtcacccaggcttgggagtgcagtggtgcgatctcagctcactgcaacctccacctcccaggttcaagctgttctcctgcctcagcctcccgagtagctggaattacaggcgcatgccaccatgcccagctannnnnnnnnnnnnnnnnnnntacaggctcatgccaccatgcccagctactttttgtatttttagtacagatggggtttcaccatgttggcaggctggtcttgaactcctgacttcaggtgatccgcctgccttggcctcccaaagtgctgggattacaggcatgagccatcacgcctggcctctggatggacttttaaagagagacttcagtaaaaaatatagttcgcatttagtgagcactagtgtctgccgggtactgtgttcagctgttttatatgcattatttcatttaatccctacaacagtccccactgggaggctgaggtgggaggattgcttgagcccaggaggtcaaggctgtagtgccactacactccagcctgggtgacagagtgagactccgtctcagaaaaaaagaacaaacaaaaaaccccccgagaaataaaagatgaagaggccagaggagtgagagcctcaatttacccttgtatatctgggtaaagatcatagagctcataatcttccttggaagaagagtgtgcctttccccctcgtctatatatgtcttcgtaacgtgcatatggttactttacaacaatagttttgatgttcttttactgcactttataaaaacgtttgccgggcacagtggctcacgcctgtaatcccagcactttgggaggccaaggtgggtgcatcacttgaggtcaggagtttgaaagtggcctgaccaacatggtgacaccccgttgctactaaaaagacaaaaattagccaagcgtggtggcacatgcttgtaatcccaactgctcgggaggctgaggcagaatctcttgaacccgggaggcaaaggttgcagtgagccgagatcgtgccattgcactccatcctgggtgacaagaacaaaactctgtctcaaaaaaaaaaaaaaaaaaccaaaaccaaaaacaaaaaacaacattgttttataccagctaacaaataccttgtctacctgttttggttcgctgatggaagtgtttgtgctttcctaagcctttgaagatgcagacctcagcttagttgttccatcagctctcttcgctgctgtgggaacagctggccagaggtgtaccactgcgaggcgactggtgagtatatctgcataggcccgattgtcttgctcttaaaacactactttttaatgagttctgctgttagagaggtgtcagcaatactgctagaacaacatgctctctagatgtggctggcaaatatgtggtccagttctctttctgtgctcatggcagatgttgttaatcattcagggactttgcctttttcccaccccaagataataggggttccactaccaattgactggagttggactaggagatgagactgatattcagtcctactcctagaacaatatggacgaagtycagtgtcatttagagaacaaaacaagataaaaataaaaagaattattaaactatagctaaaaatagagtcttgcacttttataaaaacattttaagtagtaaaacattttaaacattttagactgggcatggtggctcaagcatagaattctaacactttgggaggctgaggcaggagtattccttgagcccagtagttckagaccagcctgggcaacaaagtgattccctgtctttataaaaagttaaaaaaaattagcaaggcatgatggctcatgcttgtagtcccagctacttgggaggctgaggcaggaggattgattgagcccaggaaagggctcaatgaggctgcaatgagccatgattgcaccactgtactctagcctgggcgacagggcaagaccctgtctcaaccaatcaatcaataaacacttttatttttagcctcaagtctagaattagatttgacttgaaatgacatgattcattgaaaagcaaatggctatgtatatgtgtgacctctctatatacatatatagcctgcatacatatatatatcgagaggacagattaatattaagtgtatataaggagatgtggtttagcttcaatatgggatttgggaagttgaatctctacacttagattgagctggtcttgagtttagtatgtgttacaactttgattttcatgactttatggtactaaaagactatactataactgagcaagttttttttgttttgtttttgtgtttttttttttttttttttttttgagttggagtctcgctctgttgcccaggttggagtgtagtggcgcgatcttgctcgctgcaacctccacctcctggattcaagcgattctcctgcctcaccctcctgagtagctgggactacaggcacgtgccaccctgcctggctaatttttgtatttttagtagagatgacatttcaccatgttggccaggctggtcttgaactcctgacctcagctgatccacctacctcggccttgcaaagtgctgggattacaggtggaagccatcatgcccagccctgaggaagttttagttaggtacaaaatttggctgcatttgccatttaaaaaaaattatttttaagctctgttggacttgagccttttttattattgttgagttttccttttgtaatgaaaaaagccttcagttgaattattaaggaattggctttgggtttttgctctcattcatattgagtgtgaacaaattctttataagactgacataatctaaattaattagaataagctaaaagatatatgaaaattatctttaccttacacttttcttttttctttctttcttttttttttttgagatggagtctctctctgttggccaggctggagtgcaatggtgtgatctcagctcaccgtaacctccacctccaggttcaagtgattctcccacctcagcctcctgagtagctggcactacaggcacccatcaccgtgcctggctaatttttgtatttttattagagatgggattttgccatgttggccaggctggtctcaaactcctgacctcaggtgatcwgcctgccttggcctcccaaagtgctgaaattacaggtgtgagccaccgcacccggcctctcacacttttcatatttgttttttcaggtgttttgcataaatgaaaataaatctttatttttacatagctgacattctcaaataatctgatactacatttgtaactttaaagtttattaaatttgttcaccataaacattaaattgcgttaaagattacgttaaagctaagaaaaaaccatgcactccaaatgattatacccttcattacatggtaaaatatgaaatgacataaaagccaaatatttctctattcagccaatttttatttttttcatgtgttttggagcaaatattcatagacgtcttttatattagttttaaatattaataggtaatattagtcattgtccaaatagatttccttagagttagcagtaatatttttaaaaattccattactatggactgcttcatgactagttctcataatgtcaattcattcatcacatgtggagactaacccagagcatagatggtttggcaagttcagctctgccacttggagcatagcatggacctgacaactacccagagaatgcaagggttgtcctcacctaattaaggcctcctctggagacctgtgtggcctggggttaagtgtttgtagttacccagcagaggtcagttatgactatgctctgtgttcactgggacttagggttacagtatgggacacatgtacttgaggccttctttaatgtatttgtgaagcttagacaaatacatccttggaaacttgatgaagatgtggcttatggaccgggtgtggtggctcacacctgtaatcccagcactttgggagactgaggtgggtggatcacctgaggtcaggagttcaagaccagcctaggcaacatggcaaaagcctgtctctactaaaaatacaaaaaattagccaggtgtggtggtgggtgcctgtaattccagctgctcgggaggctgaggtataagaatygcttgaacccgggaagtggaggttgcagtgagctgagatcatgccactgcactccagcctgggtgacagagtgagactctgtctcaaaaaaaaaaaaaaaaaaaaaagacatggcttatgattttattctattatctacctaaaaggaaaattttgacttcatatagttaatattaaaatgataaattatataattaaaaaaataaacatgctttgattttcttatatttttagagattacagtatttcagtaactatcaaggaaattattcattgtttaaaaatgtgtgcatttatcatactatgcccttgaatatcttttttcgtttagtttatacatgaaagcatccatgatgaggttgtaaacagacttaaaaaggcctatgcacagatccgagttgggaacccatgggaccgtgagtatctccttctgctttcaaagcgatccctttttgagagctgttgttaacaagtgtttctgatctgagttttggagtttctttccctttcctgagaggcgtgwaggcacatgaagcagrttattaggctttggtgtatcgtgtctgctcctaggtttcgaccctggctgcttgatgtgtgctagtgggtgagactgggagaggttgtttagatggaatgagatttagtgtgcttctctctcattactattacccttgtccaagccgacaccatccctcttgtgcaaggctgcaagaatcccctaactgacctttctgcatccattgctacagaatgatttttaaaatgcaatcagataattcactctcctgcttaaaatacccctcagtaacttctcattgcttttagattttttttcctttcttttttttttttttttttttgagacacagtttcactctgttgctcaggctggagtgcagtggcttgatctcagctcactgcagcctccgcctcctgggttcaagcagttctcctgcctcagcctctcgaatagctgggattacaggtgcattccaccacgcttgactgattttcatatttttagtagagacagggttttgccacgttggccaggctggtctcgaacacctgacctcaagcagtctgcctgcctgggcctcccaaagtgctaagattacaggtgtgagccattgcgccaggcctgcttttagattaaaacygagagtcctcttgatttcttcttttttgcaggctcccgatccttcctggtctgctctctgcctcctgccccgcttgccttctcaccagcctttctgtgtctattttccctcttgctcccagagctccaccttctccaacatcctttcagtgttccaggcatgccaggctctatcctactgtgctgtctgctggaaacattcttcacccagagtggggatggctctgctaacatgcctcctcctcatagaggcctacctacatcttccttcttctttgttgctgggtcactgtcagtgctctagtccccagcagccrtaacataggacagcatcattctcttcccccttgaattatacaccaactactgagactgtgatgtttccttagagaatggtcacactgtaatgagtaaactgaccctatattttgagtgcagtgctttgagtaattgatagccattcctttaaactagagattggcaaacagacttggctctgcctgtttctgtaaaaaaaagtttctcggcacatacccactcatttgcatgtcatttatggctgctttkgcactacarttayggagttgagtattgggatggagatcayrtatgtcctccaaagcataaaatatttaccatctggttctttatggaaaaaggatgctgacttatgttctcaattgagagcatataggaagggattggtctgttcattgagaaagctgttctaataataaaacgatgccataaagggcaaaatgatgagccagccttccttttctctctccagctaatgttctctatgggccactccacaccaagcaggcagtgagcatgtttcttggagcagtggaagaagcaaagaaagaaggtggcacagtggtctatgggggcaaggtaagggatgctctgagatcaattgtgacagctttttaaccttcttttccctgagacacaagcagggctctgggcatattggaaaagccaccccatttgacatccttcttctcctgtctttatttatatatattattataaaacaaggaaacacatgtttttgtttgtttgtctgtttttgagacagagtcttactctgtgcccaggatggagtgcagtggcgcaatcttggctcacggcaacctccgcctcccaggttcaagtgattctcctgcttcagcctcccgagtagctgggattacaggtgcatgtcaccacacccagctaatttttatattttttggtagagatggggtttcccatgttagccaggctggtctctaactcctggcctcaagtgatccacccaccctggcctcctaaggtgttgggattacaggcatgaaccaccacacttggctctgtttgtttttgtgacagggtcttgctctgccacctaggctggagtgcagtggtgcacgatctcagctcactgcaccctcttcctcctggactaaagcaatcctcccacctcaggctcctgcgtcttgctctgttgcccaggctggagtgcagtggcgtgatctcagctcactgcaacctcgcctcccaggttcaagcgattctcctgtctcagcctcccgagtagctgggattacaggcacccattaccatgcccagmtaatttttgtatttttagtagagaaggggtttcaccatgttggccaggctggtctggaacttctgacttcgtgatccactgtccttggcctcccaaagtgctgggattacaggcgtgagccaccgtgcccagccagaaatacacgttttaaagartgacaacaatgcttgctttggcagcacatatactaaaattggaaagatacagagaagattagcatggcttatgcacaatgatgatatgcaaattcatatccgtattttaaaaagtattccatattttaaaaaaagacagcagaaaatgcatgggacatttctggaaggacatagaagaaacggagtcatggttgcttttgaattgggtccttaatatttgtatggaaaggaaaattccttttcaagtacagtaggagactttgtattcagagcaattataatctatttattggttattttaaaaagtcagttaaggcaaggaataaaaaaatacatatcataagcattaaaaaagaaattaacacatattgccaggtgcagtggctcacacctgcaatctcagcactttgggaggctgtggtgggaggattgcttgaggccaggaattcaagacccacctggacaacatagtgagaccctgtctcaaaaaaaaattagctgagtatggtggcatgcacatgtagtgctagctacttgggaggctgaggtgggaggattgcttgagcccacaagttcgaggctgcaatgagtcatgatgatgtcactgcactgcagcttggacaacaaagcaagaccaaatcaaaaacaaaaaaccaaataataaaaaaaaaaaatcaaaaacaaaaaaccccccacatataaagatttgtttgtggccgggcatgttgactcacacctgtaatcccagcactctgggaggctgaggcaggtggatcacttgaggtcagaagttcaagaccagcctggccaaaatggtgaaacctggtctctactaaaaatacaaaaaaaatttagctgggcatggtggtgcatgcctgtagtcccagttacttgggaggctgaggtgggaggatggcttgaacccgggagacggaggttgcagtgagctgagatcaagccattgcactacaggctgagtgaaaataaccgcttgcagcagtgtttgttcaacataacttggttgtgtcacatggcatggctctctatccctgcctgactccttatttccatttttctctgaccaactaagttagaaccaatatcaggaagagagaattttctttcatgattggaagttattttggagaaataattcacctataaatgatgctaatttttttctttataaatgtaggcaaagattgcatcctctgaccccaagtcctagaaaacaaaatgctttcatnctttttatttcatttctctgcattaggttatggatcgccctggaaattatgtagaaccgrcaattgtgacaggtcttggccacgatgcgtccattgcacacacagagacttttgctccgattctctatgtctttaaattcmaggtaaaaatgcattctgttcgctagcctnatgttgaaataaatgataagaggaaaatgatggtggattaaatttcactggatgaacctttaagagggttttagaaagtaatctgaatagtagatatatgaaggttcaggataaaatatgagataaacactttaaaactctatagcatgccaagctagctgccagggaaaccagattgggtagtggacyagtgttggagtttatgaagtgtgtggtcctcatttcctgtgtcatcttaatcctgggctgtgtaggccatagagtcaccttctcctgaaccgtggtactggatagtttgatagcctgagtgctgtgaacatgtcagcagacaaaatgagaacatgtgggggtaatacaaagacctatagttggccaggcacggtggctcacacctgtaatcccagcactttgggagggtgaggcaggcagatcacctgaggtcaggagttcgagaccagcctggccaacatggtgaaaccccgtctctactaaaaaacaaaaaaattagccaggcgtggtgttgggcgcctgtaatctgtaataccagctacctgagaggctgaggcaggagaatcacttgaacccaggaggctgaggttgcagtgagccgagatcgcaccattgcactccagcctgggcaacagagtgagactccatctcaaaaaaaaaaaagacctatagttataaactccagcagaggacaggctgcggagttttgttttgttttccctgatctcatatcttgatctcaaactgtaaaggttttaataggtgaagaagctgggcacaatggctcatgcttgtaatctcagtgctttgggaggatcacttgaggccaggtgctcaagaccagcctgaccaacacagtgagaccttgtctgtacaaaaaaattaaaaaattagccaggtgttgtatgtacctatagtcctagctactcgggaggctgaggtgggaagagatcctgtctctaaaacaaacaaataaataaaacccaaaaaacccacacaggtggataaattagaagatctcattccctagcttgagacgggccctagcctcgccagtaaatatttaggattaattttgagactgcagagattgaatcaatatttgaatgtaccattattaacagtaaaataatagtgagaattgcatcttgttgcaattacatcattgcttctttatttcttgctttaaattgcctatcattgtttcacgtatggggactagagaatataattttgtgttttgtaatgtgtttgtgtacattatgaggctgtgtgagctcttgagcaaattagtctctgtaggcctcagttgcccaatctgtaaattgggaggtagtaggaaacctgtgttataggatgaggattaaataactaaatgcatgttaagtgcttagattggtgtgttacacacgtaagagctcaatagatattagctattatatgtagtagcttgaatgaaaggaagaatgtgttaatatttgtttctgataattaggggaaaaatcccaaaattttttacttattatcaatgatctgaattataagagaaacagagtgagtaaacttgactctttggtttccttttgtacactgaaattatactgrtacacttcaggaaatgagtttaatgtcagtgaactttgacttgaacactataacatcttacagcttccaatgtctctccttttagaatgaagaagaggtctttgcatggaataatgaagtaaaacagggactttcaagtagcatctttaccaaagatctgggcagaatctttcgctggcttgggtacaactttgtctattttgaaaatttatataagtstgatttatgtggtgagtggacttaaaaaaactgctgtagtctaaaatcngtttttcagtattgaaagcctttgagctttggtttagattttttatttatttttgtttgtttttaatttcctgttcattgctctcaccatgcctccctttttacacagacctaaaggatcagactgtggcattgtaaatgtcaacattccaacaagtggggctgagattggaggtgcctttggtacgtagagaatcatttctccttttccatgttgggcagcaaagaaaaaccagtagtagcttttagaaaaggctgaccaagagactgaaacactccttatattctgaaataaccttatgtgatctaacatatctgaaaaagcttacattctgtattcaaagttatcgcatagagtcctgcgtcatctcctcagaggcagcatcaggttagagcagaggcccttaacttgaaatgtgtgaacccctgaaatggtggcatttgttttctggggagaagtttccagacccaaaaaagattaagaatccctgcttcaaagccagaaaattttatatgaamtattctggtttttatttgcaaagtaggcatataaatgttaaacatactctttttcactagatggaatacaragttgtttcttttcactgggccctgctcctgtttcctcttaataagccatacattattaatgctgaaacttggtagtagtttttccttaaaaactctccctaaccattgtatattaagtattatttattaaaaatgatccaaagtaaaataaaacagattgcttgttttttttaaatatagaagcaaaacaaacatgcattaatacttgtaaaagtttatatcattagtrgcattcttttacatttttagagcagatactacaattactatttgatgcayggactttgctgttttcagttcaccccttgcccctgcactccactgtgcagttgcctgaatgcatgagtgtctatcttctccttttgtactaatttaatccctgtttccaacccatgcctgctctctctgattgactattccttttttttttttttttttttttttgagcygggggcttgctatgttgcccaggctggagtgcagtggcgygatcacagctcactgcagccaccacctcccaggctcaagcattcctctcgcctcagcctcatgaatagctgagattacaggcatgtgcctccacaccagctaattaaatttttttttttttttttttttttttagaaacaggccctcactatgttgcccaggctggtcttaaattcctgggctcaagccatccacctgccttggcttcccagagtgttgggattacaggcatgagccactgcacccagtcaattgactattcttcatttaagcttttataattaatttttaaagttttggtgcccaggcacagtagcttacacctgaaatcctggcactttgggaggcagaggtgggccgatcgcttgagctcaggagttcaagcccagcctgggcaacatggcaaaaactcatctctacaaaaattacaaaaattagctaggcatgatggtgtgtgcctgtagtcccagctacttgggaggctgaggtgggaggatctcttgagtctgggaggcagaggttgcagtgagccaagattgtgccagtgcactcaagtctggggacagagtgagaccctgtcttcccccgcaaaaaaaaaaaaaaaagttttgggctgggcatggtggctcatgcctgtaattgcttaagcccaggagtttgagatgaacctgggcaacatggtaggaccctgtctctacaaaaattaaaaaaaactagccagttgtggtgtcacacacttgtattcccagctactcgtgagtctgaggtgcaaggctcgcttaagccaagagtttgaggctgtagtaagccatgatcccaccactgcacttcagcctgggtgacagagtgagtgtgaccctgtctctaaataaataaaagttttaaaaaagtcttataatggaaaaagtagttttgctcatacttttcttctcctcctcctttcccagaggctacattgagattctttttttttttttgagacggaatcttgctctgttgcctatgctggagtgcagtggtgcaatattggctcgctgcaacatccacctccccagttcaagcaattctccygcctcaacctcgtgagtagctgggattacaggtgcacgccaccatgcctggctaatttttgtatttttttagtagagatggggtttcaccatgttggccaggctggtcttgaactcctgaccttgtgatccacctgcctcggcctcccaaagtgctgggaatacaggtgtgagccacygtacctggccgagattctttttactaaaagaaaaaagcaaatttacctttgaattgatgtcagtttttctaactagtgtgctttcactgctgtctccttgaaagctttagacattatgtattgaccctctrttatgatagaggtttctgtccaggagcaggacacatgggagtcaactagtaggagaaagtagaagaagctgttcttttcattttcttcttggatgcacccagtacccttgcakactgaagaagcagtagaaaacagaggcagggagggccctgcaggcctggctagcaagcggagggcagtggggtaccagctctcagaatagtgagcatggtccttgaaagtggattagttcattcccccagcatgtgcgtagctggatagggagtctcttgggagattttgactaggacttgtttcttctgcttttattcgctctctccctactccctccctgcccaccttgggtagaaatagcttttattcaagtgcaataaaagagtttgttggggaagacccatgaggtgttatcttgtagaatgagcactgggtgaggaaccaagagacaccatcccagtcccatttactgctgtcactagctccggaacctcaggcaggtgctcagccttggttccttrgagcctctgcgactctgttcctgccaggagtttcagaggcgctgttagctgtggtttgttttatttcaaatgtgtgcaggctttttgctggcttcccattctttgaagtcagttatgtctctttttactttgcttgtgcatttgagagctagaagggcaaacattcagctgtgatttttctggaacccatttaatggagattctttccctctcatgagaaagaccaggtgagtagttaatagagaagcttttatttcaaaattgttatattttcttaatgtatttctatcaaatgggaatatttgtgttttccctgataatttaatacaagttattgagagagataaagaagacagttacagctcccatattcttgtgccctgctcaaaagaaaaactatgaataacatgtgtgggctgggcacggtggggttacaggcatgcaccaccacgcccagctaatgggatttttttttttttttaccgtttctttctgtttccatttcttcttaattccttatattttattttccctcttaattccttttttctgtttgttttggtctcttggtctctgtctttgatttgtttgcaggggagatattgtgggctaaatgtaaagtaaataatcaggttgttctggtgtccttttggtatcttcttttcattgataccaactatgagcccrcatggaaactgctcagaagatatgatattattttttatttctctaggaggagaaaagcacactggtggtggcagggagtctggcagtgatgcctggaaacagtacatgagaaggtctacttggtaagaaaaggctttgggaagataggtttgggcttaaaacccttgggaatgggcttttacactttcctactgtctgtgctgtctttgtgcagtgtcatttgatttgatttttccagcattccacagctgtctcctctaagtatctatttggtgctatttttctagccttcttgtctagcttcagctagtgcccagcacccaacaatgaaatggtctcgtgcgtggtttctgtatttttagtagagttggggtttctccatgttggtcaggctggtctcgaactcccgacctcaggtgatccacccgccttggcctcccaaagtgctgagattacaggcgtgagccacagcacccggctaatttttgtatttttagtagagattgggtttcaccgtgttggccaggctgttgttgaactcctgacctcaggtgatctgcctgcctcggcctctcaaagtcctgggattacaggcatgagccaccatgctgggctgtttcttgcacttttgagggcacacttttttttttttttgagatggagtcttgctctgtcacccaggctggagtgcagtggcctgatctcagctcactgcagcctcagcctccgcctcccagattccagcgattctcctgcctcagcctcccaagtagctgtcatcacaggcctgcaccaccatgccaggctaatttttgcatttttagtagagaccgggtttcaccatgttggccaggctggtcttgaactcctgacctcaggtgattcacgcctgcagtggctcatgcctgtaatccaagcagtgaannnnnnnnnnnnnnnnnnnnnnnnnnnnnnnnnnnnnnnnnnnnnnnnnnnnnnnnnnnnnnnnnnnnnnnnnnnnnnnnnnnnnnnnnnnnnnnnnnnnnnnnnnnnnnnnnnnnnnnnnnnnnnnnnnnnnnnnnnnnnnnnnnnnnnnnnnnnnnnnnnnnnnnnnnnnnnnnnnnnnnnnnnnnnnnnnnnnnnnnnnnnnnnnnnnnnnnnnnnnnnnnnnnnnnnnnnnnnnnnnnnnnnnnnnnnnnnnnnnnnnnnnnnnnnnnnnnnnnnnnnnnnnnnnnnnnnnnnnnnnnnnnnnnnnnnnnnnnnnnnnnnnnnnnnnnnnnnnnnnnnnnnnnnnnnnnnnnnnnnnnnnnnnnnnnnnnnnnnnnnnnnnnnnnnnnnnnnnnnnnnnnnnnnnnnnnnnnnnnnnnnnnnnnnnnnnnnnnnnnnnnnnnnnnnnnnnnnnnnnnnnnnnnnnnnnnnnnnnnnnnnnnnnnnnnnnnnnnnnnnnnnnnnnnnnnnnnnnnnnnnnnnnnnnnnnnnnnnnnnnnnnnnnnnnnnnnnnnnnnnnnnnnnnnnnnnnnnnnnnnnnnnnnnnnnnnnnnnnnnnnnnnnnnnnnnnnnnnnnnnnnnnnnnnnnnnnnnnnnnnnnnnnnnnnnnnnnnnnnnnnnnnnnnnnnnnnnnnnnnnnnnnnnnnnnnnnnnnnnnnnnnnnnnnnnnnnnnnnnnnnnnnnnnnnnnnnnnnnnnnnnnnnnnnnnnnnnnnnnnnnnnnnnnnnnnnnnnnnnnnnnnnnnnnnnnnnnnnnnnnnnnnnnnnnnnnnnnnnnnnnnnnnnnnnnnnnnnnnnnnnnnnnnnnnnnnnnnnnnnnnnnnnnnnnnnnnnnnnnnnnnnnnnnnnnnnnnnnnnnnnnnnnnnnnnnnnnnnnnnnnnnnnnnnnnnnnnnnnnnnnnnnnnnnnnnnnnnnnnnnnnnnnnnnnnnnnnnnnnnnnnnnnnnnnnnnnnnnnnnnnnnnnnnnnnnnnnnnnnnnnnnnnnnnnnnnnnnnnnnnnnnnnnnnnnnnnnnnnnnnnnnnnnnnnnnnnnnnnnnnnnnnnnnnnnnnnnnnnnnnnnnnnnnnnnnnnnnnnnnnnnnnnnnnnnnnnnnnnnnnnnnnnnnnnnnnnnnnnnnnnnnnnnnnnnnnnnnnnnnnnnnnnnnnnnnnnnnnnnnnnnnnnnnnnnnnnnnnnnnnnnnnnnnnnnnnnnnnnnnnnnnnnnnnnnnnnnnnnnnnnnnnnnnnnnnnnnnnnnnnnnnnnnnnnnnnnnnnnnnnnnnnnnnnnnnnnnnnnnnnnnnnnnnnnnnnnnnnnnnnnnnnnnnnnnnnnnnnnnnnnnnnnnnnnnnnnnnnnnnnnnnnnnnnnnnnnnnnnnnnnnnnnnnnnnnnnnnnnnnnnnnnnnnnnnnnnnnnnnnnnnnnnnnnnnnnnnnnnnnnnnnnnnnnnnnnnnnnnnnnnnnnnnnnnnnnnnnnnnnnnnnnnnnnnnnnnnnnnnnnnnnnnnnnnnnnnnnnnnnnnnnnnnnnnnnnnnnnnnnnnnnnnnnnnnnnnnnnnnnnnnnnnnnnnnnnnnnnnnnnnnnnnnnnnnnnnnnnnnnnnnnnnnnnnnnnnnnnnnnnnnnnnnnnnnnnnnnnnnnnnnnnnnnnnnnnnnnnnnnnnnnnnnnnnnnnnnnnnnnnnnnnnnnnnnnnnnnnnnnnnnnnnnnnnnnnnnnnnnnnnnnnnnnnnnnnnnnnnnnnnnnnnnnnnnnnnnnnnnnnnnnnnnnnnnnnnnnnnnnnnnnnnnnnnnnnnnnnnnnnnnnnnnnnnnnnnnnnnnnnnnnnnnnnnnnnnnnnnnnnnnnnnnnnnnnnnnnnnnnnnnnnnnnnnnnnnnnnnnnnnnnnnnnnnnnnnnnnnnnnnnnnnnnnnnnnnnnnnnnnnnnnnnnnnnnnnnnnnnnnnnnnnnnnnnnnnnnnnnnnnnnnnnnnnnnnnnnnnnnnnnnnnnnnnnnnnnnnnnnnnnnnnnnnnnnnnnnnnnnnnnnnnnnnnnnnnnnnnnnnnnnnnnnnnnnnnnnnnnnnnnnnnnnnnnnnnnnnnnnnnnnnnnnnnnnnnnnnnnnnnnnnnnnnnnnnnnnnnnnnnnnnnnnnnnnnnnnnnnnnnnnnnnnnnnnnnnnnnnnnnnnnnnnnnnnnnnnnnnnnnnnnnnnnnnnnnnnnnnnnnnnnnnnnnnnnnnnnnnnnnnnnnnnnnnnnnnnnnnnnnnnnnnnnnnnnnnnnnnnnnnnnnnnnnnnnnnnnnnnnnnnnnnnnnnnnnnnnnnnnnnnnnnnnnnnnnnnnnnnnnnnnnnnnnnnnnnnnnnnnnnnnnnnnnnnnnnnnnnnnnnnnnnnnnnnnnnnnnnnnnnnnnnnnnnnnnnnnnnnnnnnnnnnnnnnnnnnnnnnnnnnnnnnnnnnnnnnnnnnnnnnnnnnnnnnnnnnnnnnnnnnnnnnnnnnnnnnnnnnnnnnnnnnnnnnnnnnnnnnnnnnnnnnnnnnnnnnnnnnnnnnnnnnnnnnnnnnnnnnnnnnnnnnnnnnnnnnnnnnnnnnnnnnnnnnnnnnnnnnnnnnnnnnnnnnnnnnnnnnnnnnnnnnnnnnnnnnnnnnnnnnnnnnnnnnnnnnnnnnnnnnnnnnnnnnnnnnnnnnnnnnnnnnnnnnnnnnnnnnnnnnnnnnnnnnnnnnnnnnnnnnnnnnnnnnnnnnnnnnnnnnnnnnnnnnnnnnnnnnnnnnnnnnnnnnnnnnnnnnnnnnnnnnnnnnnnnnnnnnnnnnnnnnnnnnnnnnnnnnnnnnnnnnnnnnnnnnnnnnnnnnnnnnnnnnnnnnnnnnnnnnnnnnnnnnnnnnnnnnnnnnnnnnnnnnnnnnnnnnnnnnnnnnnnnnnnnnnnnnnnnnnnnnnnnnnnnnnnnnnnnnnnnnnnnnnnnnnnnnnnnnnnnnnnnnnnnnnnnnnnnnnnnnnnnnnnnnnnnnnnnnnnnnnnnnnnnnnnnnnnnnnnnnnnnnnnnnnnnnnnnnnnnnnnnnnnnnnnnnnnnnnnnnnnnnnnnnnnnnnnnnnnnnnnnnnnnnnnnnnnnnnnnnnnnnnnnnnnnnnnnnnnnnnnnnnnnnnnnnnnnnnnnnnnnnnnnnnnnnnnnnnnnnnnnnnnnnnnnnnnnnnnnnnnnnnnnnnnnnnnnnnnnnnnnnnnnnnnnnnnnnnnnnnnnnnnntgtctcagttttgcccacactggagtgcagtggtgcaatagtggctcactgcagcctccaactcctgggctcaatctatccttccacctcatgctccccagtagctgggactacaggtgcatgccactgtgcccagctgattattatttttttttgtaaagattgggtcatactacattgctcatgctcatcttgaacttgtggcctcaagcgatcctcctgcctcagcctcttgagttgttgggattacaggagtgtgccaccatgcccagctctgtggaaaattctctgtggcattctgtctcctgaaaatgctgaagggaccaagagggctctgtgtccttcctcttctcttccctggcactttcagaccattttcttgttgccttcattctaacaaaggttgcagattggaaagctgatttggaatgctttttaagtgttttcagtttcaatatttttatgaaattcctatggtctccaacaaacttttttttttttttttttttctacacctggagcttatcctgcagaagcttcctgccaatgattgttttggaggaaattaaaagaaaaccaaacgaaacctctcctatccaaggggaagaactttatccccatattgattgaatataggattctagatttaaaatgttgtaggcagttagagtttgctcttttttttttttctattggaaaggtccacaaatgttttattgacatttttgtctttaatccatttggatttggggtacatgttacgatttgtctacgttaatttcccttttaaaaataaaaataattcctcaactccaattagacaattgggttgtccttttcacactgatacctcttttatagtacactgcattcttacatataacaggatctgtttttagctgtgtatcctgattcagtaattggtatatgtgtgtgtgtatatagataaatagaatgccatttccctgtgcagacggaagggcaagcttattcccttttctgcgactacatctcctgtcaggtgtcgcctctgctgtggctctataggattctgttagatagtggtggtcattgcacaactctacaaatatactaaatgctactcaattgctcattttaaaatggttaaaatggtgagttttatgttgtattttacaataagagaaaaaaacatacaaagcaaattaagcaataaaaagggcagttactaactccagggaaaataacatttgattctgtgatcttttaaatttcttctacttaaattgttttagagttctacatatattagccatgtgacctgcaaaaagtaacctaatctctttgaacttcattttcttgtctgtaacgtgggttgtatcagttcggtttctttgtggcaagctgcggaaaccaattatggctttagcaaacatggtctgttttggaaagcccagatccaatttgcctctccagaaccactctctgacattctcctgcagtgtgtccttagggactgatctctacggtccacttcatctgggcttgctttatcctctggcttctgattgtgtttggccagtggtagaaaatcagagcagaaaaaaaaatgtcagagtattaattttcccactccttccctgccagtctgtggtagttactgtctttttttttttttttttttttaaggaaaatgtacacaaagcgtgtttattgggatgatttctcattcatcctgatcacggttgctgcttcctcctaaggaacattcttctgtaagctttgcttgtccttctgtaggctgataggacagtggaacagccaacacacacaactttgggcatgacgaaagagcatggtgacttgatagcatcctggtcatttcacatccatgaagaaggaattggttcgtcaccaggagcttctcatgttttctggagaggcatgaaggagatccttctctagagacatctcgctggaaagct

SEQ ID NO: 94737 - DNA, 92994 bp, Homo sapiens
  misc_feature (1)...(92994): n = A,T,C or G
tgctaactggtctagactgagggtgtgctgccagaagctgatcttgatatctaatgatatggggcagaactggagcaatgatgtgaaatagtgtcataaaaagtattctagtctttgatcttcatgtaactatacagtattgggcaatacacccagccaaggtatactttcacttcctcatttgtaaagtgatccagttgaatttcaaagattccttctatttctaaaattctatcatttatttgccatagttaaaatttcacttgctcattactttggagaataagcaataagtcaaaactatcctctgctcatgtgctacctaattcttgacaaggattagtctcacaaacagagagtagtggccacttccatgcagtgattcaggtcataatgagatggaatcccatttgcaaactcctcactagctatagcatttccagaaattacattacaagagctttatttctttgcattttggaggttcctctttaagactcctgtgttaaagtggaaatgtccctggaagactactcagtccttagtattgactgaaaactttgtgggaacagtctgttaaataggtcttatgggccagaggagaggaaggggctgaagaagagtgtggaggcatcaatgtgactccagtgcacctcttggggccccattaccctgtgtgatggaccagtcattacagggaagggaagatgatgggattaagtttggggaatagattggggagacttgagtcaggtggtgtccacatgcatcttagcacataactctgaagtccctgacatctctgttatgaatgtttgtgtccccacccccctaattcatatattaaagacctaacctccaatgtgaaggtacttgagcatgggaaggtaattagtgctagttgagagactcaagttgagacacttgagtgtgcgggacactcaagacaggattggtgcccttttaagagaagacatgagagagtaagctgtctgagtgcaagcactaagaaaaggccatgtaagcacacagcaagtgggcagccatctgcaagccaggaaaagggctctctatagaaaatgaactttcccagactttggtcttggacttttcagccctcagaactgctgaaaataaatttctgttgttttaagccacccagtctatggtattttgtcatggcagcctgaggtgactaatataatcttcttttaatcatgtggtctctttccttttcagtgttagttgtgagtcaatttgccaaattaaacatgaaagaaatgtccccaaaacatctgccaagggagtattcctgaacagtattcctccctgaccaaatgccagtctggtttttctttgttgctgttgctggagttgactacttttggatgatccaatcaaaccaggtagttgcatgtcctgaaagaacacttctttcttaacctatcccaaatgcgtaagtaggtttactaacttgatacagtttggggctagaaagactcttaacgatttttttaaaaaattgtcaacattttcaaacataccccaaagtaaaaagaatagtataaagaagaccagtataaccatcacaacaattcagtgattaccacaattttgcttgtgaatattttgaagaaaaatatcagtaagaaataaagtactatatttacgaaatactaagtgtgccctggggaaaataaaatccttattttgtgggatatgaatacactgtcaagcaacggaaaaatgtattcaattcctctttagctatctgcatgggtaaattttgcctatggtttaaaaactgaatcctttcataaaacagaaacattaaatatttagcaataatctttttgttttcagtgggtttttgatgttctcttcagagggtcccaggagacaactccatgaatagactctccctcttcgtctctgagttcttcttaaaagtctcctgaaggagaaacttaggggtcttcattctcccagttctgcagcgtcctctcataaattctcacctgattctttttactactacagttaaattctttaaagtgtcatcatttctactcttgatttttaaaatcctactcttgatgcatcccaagggcatggtttccttaaaattccataaggacatatgccaacggacaaatttatatccctcctgtcttcaaaaccatgcaatggttccacttcccagtaggtaaatttcctctgctatctgaccatagactagatccacattgatcatttagtgtcactgctttcttctttggtcccttcaacctgcctttccatgttctcaatgaggggctttcgagattgtgacatgctactttctcttatatactactcctttgcttagaaaattctttcccgtgggctgggcgtggtggttcatgcctgtaataccagcactttgggaggccgaggctggtggatcacaaggtcaggagatcgagaccatcctggctaacacagtgaaaccctgtctttactaaaaatacaaaaaaattagctggatgtggtggcaggcacctgtagtccttgttgcttgggaggctgaggcaggagaatggcatgaacccaggagatggagcttgcagtgagctgtgatggcaccactgcactccagcctgggcaacagagcaagactctgtttcaaaaaaaaaaaaaagttcttccctgtgagcttttccaaaccttttcttcctattttcctaagcaatcctttaaattgcatctcctttataaatcaaataagcaagacgtcctggaagagatggttttcctcctcttctcagtcatccccaacataagatagcaattgctcagtgagttacacaatgtatttgctgacctactgtgttcacatttttggactgagcttttagtgtttgggagatggtttaaggatgttctagacgtttttgaggcacattctgtaaaaacagtcatttaaattttaagctccaagatctaacagactatttctatttacattttttatttatggatgttgaataaattagtgtttgatattttttgtagtgattgggatatcctatcacatgagagtgggtaagaagagcaagaataaaaactagttgatagcctgttccagagagtcttatttttattattttaaaatatgaacattgcctcctattaacctcattgctgccatctcccttattaaaatgaaaatgtccctggaagggattactactgttaatacaatacttcatagaagccgtttatgaaaatcaatgacggtcaagacctagaaccataagcaaaagatagctttctagtgtcaccttgtggctaaccatattaatatacattgaagctgattaatgtgtagacaggtagacacatatacagggtatagaaaaataccaatttttggcatctatattatgatatgtatataaaatgatagcgctggaagtagttttacaattacttaagtacaaattttattccatagatttagatatgaaagaacttagtttctctgtaattaacctcagttaattcaggggctgccactcttgcctaggcttgcttttaagttctgggggacttacggagtatcaaggcatcagtaagtgtgggaaagagtttctgatccttggtggtcaaacaacataagtcaccgttaagtcattcattgcttattctcaactgtgcgattccttcaggtctggcatatctctgccaattctggacacctcttgggcaccaggaaccctttgctgctctataccacactgcgcctcacctgcctaggcacaccacactaccttctttcctgagctgcctctctggccttcccttgggaaagtagcacaggccattctgttccaggatctcccacaccattcagggtttttgttttgttctccccaagagaagcagggctcaggatcctttttggcaacttactggtgtattactatgtgactttttccagttccagagaaccgaaaccaacttaagacaatatttccccaaataataacccctaaatgacctggctgaacaagagagaaagggatggagggctggcaaagtaggggtgatgagggggcaaagggtgggaggaaatatccctagcatcaataataaaatcatgttggttatattttaagactttattactctaccaggtcaattttatagatgagaagagagcagtctccagaccactgtgctgtggcatgctcgtatgccacaagttgtttacaggcatatcaagatgttgatgaccccagttcttaggcaactgggtacaaactggaacgggtgaagctagttctttcagcctagtcacttatgcccaagatcagccttatcattgtacaaatatattagtcagaataagctaactctttgtatcagttatctactgctgtgtaagaaacccaacctaaaacttagtggcttacagcaatattcattttatttgtttatgtgttctgtgggtcaacagtttggactatgtttagctaggtggttttgctaatcttgctttgggttgcttacagagttgtggtcatccagcagcttttctaagactagactttccattatggcctttttcacgtcttgcccttggtgctggtggatgattgggccatagttgtcagtgggctagcctaagcttctttactttgtggaagaagaattctcagcagcaaaacaggctaagccttaatgcacaaacacctttcaagcccctgcttatctcgtatttgctgatgtcccaatggccaaagcaagttacatagccaaagacagagtccatgtgggaaggaagaatacaagggtgtgaacagaggaatgtgtgattcatcaaaggccatacctttgatgaattcaacaatttaccataatgttacaaaaaaaaatcttcccaaatctcagcagtttaccacaactaagaattatttcttacccatgtcatattccaatgtgggttggtgaggacactctatcacactcgttcagggaatcgggaacctgttatctatctagtggttccaccgttgtctaagaacttccagaagaccaggaaagacagagaagggaagattcaaggaaggtgttatagaccaatcctggaagtggtatacatcagttccagcaacattccaatggccggaactcagccatgtggcccccagctaactgcaggagagttgggaaatataatgcctaggaagaaaagatacttcttgtcaccaaatattccgcccccttcttaccacacacagaatacacatataccctccccagacacctggaattctatctagtcactgcatccaggatctgttgttgatacacagtcctctttattagatccagatgtatatcctcattgccaggtaactcatgaactatgtaaatatgtactacatacctgcccccactcagctaccctgtgtagcgtgatagagcaagggtggcatacttgcattaaaatctcccattcagaaaagggaagaatgcaagacacacaacagtggctcattctttagtatatgtattttttatgatatttttccaaatattgcatgggaaatatatacactaaaaattattcgtttatctgaaatgcaaattattaagcattctgtatttttatttgctaaatctggcaaccctcctcccactaaaatataaactccatgaaggtaggaaccttggctctctggttctccaatgtacatcgaaggcgtggcataatgccaggtccacagtagaagcccatacatgcttactgcaggaattaatgaaggactaaacgaagtagcaagtgagtgaataagaagatgaggagcgacccttggtgggcggcgcgggaagagaaccgcaccatagctccgcagacagcctcctttaggcgcgcagcggcggccgcgctgaggtcacgggcgccggccctggtgacgtcattacgcccgcgctcctcgcctggccgtgatatcaatggcgcaggcttcacttctgctgtggcggtgactgaggcctttctggtgacctcagcccaacrcaggccgtctccggagcttcccggtagtggccccggattcccacggtctttgtcattggctgtcagctagcaggcctggccgctcccgtgcggagagaccatctcttcagggcaatgtccaggccgagcagcgtctccccgcggcagcyggctcctggcggtggcggaggcggcggcccctcgccttgtggccctgggggcggcggccgggccaaggggctgaaggacattcgcattgatgaggaggtgaagatcgcagtcaatatcgcgctggagcgcttccgatacggggaccagagaggtgaggttccggacagggaccntgctggcagtcaggataccccnctcaccccagcgccccccaaacggcggcccaccgagtgatgggggtgcctccgaagagggagggaagacccgggccaccgtccggggcgggcctcagcggcggcacccgggtctggaacgcggctgttggccctgcggtggaatgcgaggtgctctgcggatcaatggggttatgggcactttgctccctagctgaaagtgtttttcccccgcgtctttcagcagccttgggcggttaagccaccgtgtttcagatattggttagccctaaccctttttaagggggtgtcacctaattgtggcacgtttaagctacagatgtagaagagcagaaagaaatcaaacatataaataaatgcaccagcaatacgtttggaccctgaagcatcacgctacccacttaaattaaacttgtttggcacacgaagcatcttccacacctcttgaggttagatagccacttgtcttgggtcatataatgcagaaccagcaactgacctgcggtgacctgtgcagtctgttgagggctcattcggacctgctggcttagttaggggacctcttactctggaatcttatagtccaaaacggggaatgttctagacagagagattctaaattcacattaaaaaaagagaaagcctcagcaatatataacaaatccctctgaaatagtgaaatacgaattctgtacagttttgaragcaaagacaatggagtttcatgttgagaattcataatatttgaacatatctcatcattgaagaaaataaacattttgttaactaaacaagtagggaccaagttaaatatgttcagtcattataccaactcaaaattccagaacaagtaagaggagtcgtttttggtgaatatcagaggcctttatcacatttaggtttaatacatagctgtctttttattaatatcagaattctgatagacattcagtagttattgaattaataaaatatcttaattttattaatttacataaatagaatatgaaatataaagttaacctcaaataaagtataataaatttgattgtctatgtatgtttttcatattttgtatctgtgtgttttacttgagagaaaattgcctatctacaaattttactactttgttttttttccrtgtagaaatggaatttccttcttctttgaccagtactgaaagagcctttattcatcgactcagtcagtctcttggtttggtctctaaaagtaaagggtaagctggtagcttttcttatttttttwaaaaaagattatttgcccaaraaagggagaaaygtttctgagtacatttaagtacttattactgttttaacttcacattcttaattgtatcatatgtagataaaagattcaggtctgtaccaaattcaactctttcctcttccctctgtctacctcttccccccttttttgttttgttttgtttttccctaggaaaatgctttttcttctacccagcttaggttccttggctgggaccctgcaaattagactgataaaagacatattaacaagagaaaaacataagcttattaagacatgcatcatgcatacataggggagaactcgatagtaactcaaacatggggcttrtgtggcatcttaataaagaacaatgaatttatttaaaaaatgacaagacaaaggaaaaggactttgaacttgtaggtgcagtaaattgtgggaaggtatatgtggggaaactaatggaagatatgtgttcttttagcaaggttggttatgtaggttcccctggtgctgtctctattaagagtctagagtggtttctcttgttaagaatagtccttccctttctggtaaagcaggggaaggcggagtttttcttatgtctgcttcttctcgattgccttcagctcaaaataatccttatggcagagtgacatatttttgggtggcataccgtgaactctttcaaaggtaaattttaagatgtaagaaaaaaatagtttaaaagttgaagttgattgcttgagaaaaatatttttattttttgatagaaatctcatttgaaaaatggatgtacaaaagatarttgcaattatttatggaacttacttcttttactgttactgcaatataataataagctttagagcatatgttcattgttttctttcctaccaagtcaaggatctgatgattagaaatgattttaaaaagtggtacaggargaaattgttttgttttgttgggaggatcacagagttacattgagggaaaagtcatttgagccatccaaattgaaaaactctaaaattctgtggcgctatttcattttgttaataaggatggtgggatcaatgtaaaggaagctttctcactgttggtgctattgacattttggactggataattctttattctgttttgtgtactgtagggtgtttaacagcatccatagccattactactacatgccactaacactcctaaccccagttgtgacaaccagagatgcttctagaggttgccaaatgtcctctggagagcaaaattgctcaggttgagaactactgacatagagggaagaaaaggataaaatttcagcttaccggtatgtttttaggttaggaagagggaaaacaaaactttattaagtaaatatattaataaatattcagatggtcccaaagtgaaagcagctgatgtaggaatgtcttgcatatgactgcctactacagtgataaattactgagacacrggatttagtttaggtgaatgtgcgttttgaacatcactaaggccagtgctggaacagtggttagattcctgaatgtgcccatcttatagtccactaggtaggtaaaaatactgcacctgaaaataaaaatatagttcagtgccacaatactttatccagaaacacttgggctaaatatatttgagattcagattttttagactttagaaaggtatttgggtatatttgcaatatgttgtataatctacctaataaaatatggccatcacctttagtcacatttatatttttgctggaaattctatgaatattcacactgagactattaataacctcatgtcagtttaatcacgtgatcacatttgatgtcaaatgaggttactgcaaacttaaaagtttccagtttttggcactgtttgggtttactagttgcaggtaagaggttttgggcctgtgcttggaaacacatgttataaatgtacagttctgtagctacatcatttctatggttacatgggtcttgcattctaaacagctaacttakaaaagcagtccattagagtagacttcctgtccttctcttcagtagcatagtcatgtaagagctgatctggaatgaayagatatcttgggaaggagaattcaagaaggaagttatggagacaaaaatggggaatgcggaaacattgaagagccagagaaagaagaaaaaggaaagagatgctaagggaagcaaggcaatcctgcctatttatccagtccctaatacctataaccttaatgctttcaaaccttcttacgaaataccctagctccttctctctttttttcatctttgagtaaactttgtactatattttcttagtggtccttgtgattttcaaatgccttttcttcttttcacaaaaagaaagaaatcactttgaatctacttctcaaatcctttcttttcatttgtatgagaatttgtacctgacttatccatgaaattttctgttcaccctttgactttattttattttattttatttttttgagatggagtcttgctctgtcacccaggctggagtgcagtggtacaatctcggctcactgcaagctccacctcccgggttcacgccattctcctgcctcagcctcccaagtagctaggactacaggcgcccaccaccacgcccggctaattttttgtattttcagtagagatggggtttcactgtgttagccaggattgtctagatctcctgacctcgtgatctgcccgccttggcctcccaaagtgctgggattacaggcgtgagccactgcacctggcgtttttttgtttttttttttttttggagacaaggtcttgctctgtcacccaggctttagtgcagtggaatgatgacggctcgctgctcactgcagcctccatctcccaggcccaatcaatcctctcacctcagcctcttgagtagctggtactacaggcatatgctaccacacccaactaatttttctattttttgtagaggacagcatctcattatgttgctcaggatggtcttgaactactgggctcaagcaatcctccctcattggcctcccaaagtactaagattacagacatgagccactgggcccagccgatttttaaaaaaataatctatcgttaactttattgattcagtaagttagttttcgtgtgtgtgtgtgtgtgtgtgtgtgtgtgtgtgtgtgtgtgtgkatctgtaggtgtctgatattatagtttcttagtacctatttgagaggccacctggtgtaaagtgcagaaagcctggattctatttccagtctctcattgactcattctcttatttgggctttttatataagttttaaaaaatagattccagacttattgtgtgatagctttcaatttttttctggtcaattttttctttttgatactctttctttcaaaattatgtcatttgtgatggattttgtttttcatcttctaaataattgaattttacctgctttgattatttttattttttagagacagagtcttcctctgttgtccaggctggagtacagtggcacaatcatagctcagtatggcctcaaacgcctaggctcaggctttcctcgcaagtagataggaccacaggcatgcaccaccatgcctggctaatttaagatttttttttttttagagatggggtcttgctatgttgcccagcctggtctcaaactcctgggctcaagtgatcctcctgcctaggccgcccaaagtattgggattataggcctgaactagtgtgccttggcgctgttttgattattttttgtaattgctcatcttttagtgaaaacattcttggagtaaaagccccattttgtgatttttaatatatcctaaagttttctttgaaattctagtcaggtttcacataccaaaaatttcacatcattatttactttttttcctcaactttaaaggttgtgtttaaagtcacgctgaggtcagtgtgttttagtcctaaaggctcacttttctaagtctttggcttgtttataatgaaaacaaaatcccatctcgatttttctcagtccaagttagacaaaaatggattttacaaaatgaactttgttaaaaatctgtagaatgggaaaatatgaagtatatgaaagtagattttccaagtacaagtttcttctgtgactgctaaggtcactgcctaacaggtaccaaatagagtaccaaagtacagttctggaggtcagaagtccaacaacagaggtcccatggacttaaaatcaagatatcggcagggctgcattccttgaggaggcaggagcaaacatttactaagtgttgttgtatacttgtgctaggtgctttaaatggattatcatttaatcctaacaatggttttttaaaaaattcattatataaatttaatcaagattagaaatttactcacacaaatgccattcagaggtaatttaaatcaaagagtcaatacacataatttcttttctttttaattttattttactttaagttctgggatacatgtgctgaatgtgcaggtttgttacataggtatacatgtgccctggtggtttgctgcacctatcaactcatcagctaggttttaagccctgcatgcattagatattagtcctaatgctcttcctttcctttccccctaatccctgacaggcccctgtgtgtgatgttcccccgctatgtccatgtgttctcatttttcaactgccagttatgagtgagaacatgtagtgtttggttttctgttcctgtgttagtttgctgaggatgatggtttccagcttcatcgatgtccccgcaaaggacatgaacttactctttttttatggctgcacaataaacataattttatttttacttcagtttttcctggagaatcaaagagagggacacctcctgttttttatgmaactagtataacttcgctacctaactcagataaagaagatattagaaatgaaaattatgggtttatcttacttatgatcatagatgtaatatgctaaataaaataaaaaattaggtcacatttaaactgggttttcccaagaataaaggattattgaaaataaaagaatctcttttttttttttttctttaaatgagaaggagtcagcattctcatatttggatgagggcctttggtttggtgctgattcatctctggcctggtatttaccacaagggaaaggatagaccttgacctgaaagtggatgactcccatggccttagtgcactttttgttcacagaagtgagcaacaaggaccaatggttctttcttatacattaaatgcagcaggatgtatgacagagcatgcctccatttgtgtactagtgtggatatagtttatttttcaacttttgagttcagaggtacatgtgcaggtttgttacataggtaagcatgagtcaagggggtttgttgtacagattatttcatcacccaggattaatcctagtacccattatttttcttaatcctctccctcctcccatcctttaccctctgatagaccccagtgcctgttgttcacctctatgtgtccatgtgttttcatcatttagctcctacttacaaatgtgagcatgcagtatttggatttctgttcttgggttagtttgctaaggataatggccttcagctccatctgtgttcctgcaaaggacatggtctcattcttttgtatggctgcatagtattccatggtgtatatgtagtaccacattttatttatccagtctaccatggatcataacaagttttataaggcagagtctattttaacacctggcacctatataacagatgaggcaattaaagcctagagatgttaagtaattttcctgagatcacacagctagcaagtggcagagccaggatttgaacacagttaatacttaactaattattttttgatgttcacatcaagttcatagcagtgtagtaggtgctctgaggagttagaacagaaatattggatagatctcatcttcaatttagcttatagttcattaagaccagaaaaataggctgggcgcagtggctcatgctggtaatcccagcactttgggaggccgaggtgggtggatcacctgaggtcaggagttccagaccagcctgactaatatggtgaaaccccatctctcctaaaaatacaaaaattagccatgcatggtggcgggcggctgtagtcccagctactggggagactgagacaggagaactgcttgaacccaggaggcggaggttgcagtgagccgagatcgtgccactgcactccagcctgggtagcaaagcaagactctgtctcaaaaaaaaaaaaagaaaaaaaacccagaaaaataaatttactgtaggcatagtgaccatgccttgaaagcaaaaagcaagactctgtctcaaaaaaaaaaaaaaaagaaaaacccagaaaaataaatttactataggcatagtgaccataccttraaagcagctgtgctcagtttggcgacaacatgaagtgaactggttggtttattagtttttaggtaatcataaaaaagtacaaattagtatgatgcaaactttactacatttccaattctgtattacagtattggggagaaagtggtttggagctagatctttgcatctgtctgcctaatggaaatataaattaagggaatataaaattaagtacttattaggcatcaaatgaatgcctgttttttttgttttttgttttttttttttttggtggtggtkgttgtttgtttttaagagactcctggtgtctgtgagctttttaagcagtcatttgagatttgggctcttcagctgatcttttaaactgttcttagatttacaagtagggaatattgaagcatatgtttgtatttgatttaaatgtttagtaacatccttttaaattagtaaattgattaatgttaacattgtgtcaaatttgattacttatagcatcatttttctttcaaaggaagaagccattgaaatgccaaaatgcatcggttacttttatttttcgaaagttaggtgttatgatgctctcaactgtaattttattacatttacttttatatttcaaaattgcatatggggtttaccttttatttaaaaaactcttgtgaatttcacttagctagcatcttttccacatgtgcagctagtttttagttaattttgctttgtataaaagattcctgtgtttatcatcaaaccatagtttcggttatcttggaatgaaagcataataaggagttctcaatttgttagtttacgtagtatgacaaatttctactgtatttaatgtttccatcctcacaacaatgaggtgaatattttaccaaaaatttcattaatccttttatgatatatcagtgtcactgtggtgctgactgtggtaggaataatcagtaaaagcacaagtagactcctttactaaaacataaaaatgatcaagttgatattatctttccattctaccatatgtgctcaaactgaattcagtaaattttaaatggtaatggctaagtagtcccacctgcttattatgaggttttttttaatacctaaatgctatattaggtaacctatgttaggaaggtttcaatctaacttattatttcagttgtgagcttgttgagaaagggtatattttactccattttgtattcctggcttctaccacagtgcctggcataaagtcagtgtttagttaatagatgataaatgattgagtgaatgaataaaatacaattaaaggtgaaatatagcaaaacctttctgagatgatttttaagaaaattaaagcatctttgagttcttaaaaatatgaagtttttaaaattaacaattgtacagtgtcagagaagtaaaatgatttgccgttgatcatgtaactgcttgaaagtttattactagctgaatactagcctcctaccatttgctctggtgctcagttcagctcacttcctgccttttgtagttaaaattttatgaaatgaacatcacagaaggggaatgaattattgagtctataatgactgtcctttagtttcagaaaggtccgtgggaaaagaacctattatagagaacatttatggaattcaataatttgaatttatcatggaaataagtaaaacttctagatcaggttaaattttatttcatctttatagcatcattttaagtaccaccaagtactttttaaggagtaaataacaacctagaaagcttaaaattcattgaaatattcaataaggagtttccagaaatcaaaaaccttgataaattggaagcctcacttagaaaacttatatgctaaaactgtataggttaatccccagtttgatatcactcttatggtgaagatactgttgataaaatttacatctaatgaaaattagaaaaattataaaatttgctttgtaaattataaatttttcattgtatttatggctctgttgattatttctataatagtgacattaacaaatggcaaaacattttatgaaatattttgggtaacttaaaatttaagaaatagtattgtttctgactataataatagttttcatttatttagagtctactctgcaacagatactgcactttgcatgtattatcttaatcatatgaataatcctttgagrtatatattactattgtgttgggctcagagccattaagtagtttacctgtagtgccacaactagtaagtggtagaagtgggattcaagctgaggtctgtgtgcctttggagcctgagctcttaatcagtattacactgctacattataggcatgtattatgaaatcattcaaaacacatctgggaaattcctggtatataacactatacctactactcttagagcygcagaagtcatgaaagatatgctcagtcctggaccagttgaggaaacaatatacctacagtaaataacttgaacagttacaaatcatcattaccttataattgaagagtagaaccagaagctttgaaaaatattttattaaaaatgcatctgaaattatttatcagtaatgctgatttatgcttttttggtccaaccatgaaacttggctctcttaacaggttttcatgggagtgtctcattaccaacatactgtggaagcattcactgggacatattagtctgaactatagaccataactttttcattatcatttttaggttctattgttcagattgattttccccctctgtatgcttcccagcatgtatcatattaactggtgatgtttcatctaccatgaagtctgctaaagacaaactttaacacttaagggtaagtaagcctttttagtggacttaaaattggatttacagcacttgaaattttaattgaaaatagttttatggccactttagcccaaatctttctttactgaatttttttggactttcagcatcttctcccaaagcattttgatttttttcagtgttttgcttgagacatattttctaagtgggcatacatcatatgtgaacaagttgactttatatagtaaataaatgatttttattaatattcagaaagggagcaaatagatacctaactgtgaagaagaaagatggatcagaaacagctcatgcaatgatgacctgtaatttgactcataatacaaaacatgctgttaggagcctaattcaaagatttcctgtcaccaataaagagcgtacagaacttctgcctaaaacagaaagaggaaatgtgtttgcagttgaagctggtatgtattttctggggagcttcctcatttaccctrttatttgatgactgttctttttccattttagatttattttcgaaaaccaagatgaaataagatttctcaattggaatagtttgttagaaatgattaagagttgtaaaaatttgaaacaaagtgcagtgttaaagcatgtcattaagttgaaccaagtttttttttttagtattaataataatatcaatagctaccatttactgagcattaactgtgtatgaggcagtatacaaaaccctttatatggggcctcctagcaacctttgcaaggtaagaatttcccctatttcacaggtgaagaaactgaggcttagaggaattaaataattcattcgaggacaccaaaccagccaatamactgcagagcgggtatttgactccagggactagactttcctatattatgctgccataacacactaataagtgagattttgaactggggctttagctctggtaagagattggacagagtcttcagtacattaagttgctcaaaagtagrtagataatgtatttgggttataaaataaagatgtaattttactatttggaaagatcacttccctattaagaaaactatttattgcctatagtgataaaatttacatagttattattgtctattggaatagatcagcagaatatagaaaatatgtggtcctagatatcaaagaactttcactttaaatataggcacacaaacatattttgagctacatgaatataaaacatttcatacctcttctttattcctatctgtttagttaaatgtggatgttggctaaaatacgccattaggaaatttgttaacattaggacctttatatttaacacataattattctatttgatcacttaatcttacatgtatagcattaaacatatatgggatattttcttttttttgtaatatgttttcgtaatgtacgtgacagatcttataagtataatgtacattatttcctactacaaaaatttaattttccatgaaattattgatagaaatttataacaagcctaaaaatcatctagattatcaagattgttttatttttaatggttattgaatgatttatttttatcaatttttaaacattatgtaccagaaatatgtctgaggttcactttctaattgatattgaaattttgtaacatgttcaatgagaatattatgtgtaagagtacaattgagatattgcttgacaactttatgtagactgagtagagaagaaaacatttgaaaggaattatgttagaaattatgtcttttggcatgtttttctaggtttggcaaaaaaaattacttatttttaacacttctttttccgtgttgatcatacattttttgttcttttattcattttcaaagaaaaccgggaaatgagcaagacaagtgggcgactcaacaatggcatacctcagattccagtgaaaagaggagaatccgaatttgattcttttaggcagtctttaccagtgtttgagaaacaggaagaaattgttaaaataattaaggaaaataaagtagttttgattgtaggagaaactgggtctggaaagaccacacaggtttgtttcttttttgttgtttatagaaaaaaaaaaaaawatatatatatatatatatatatagtcccatattataattttatatcaaatttacactgcatatgtttaaaaaaacagaaaaagaaacttgtggttattatagtaatggttatttcagaagtaaattactactggaatatatttggagaatttgtagaaagaaaatgttttaaataatttacttatttttaaactagtgcattaggcctttatttaaacagagttgggaaactgatttggtatcatggaaagaagatgggctttggccttgaatttagattccagttccctcagttattgaagttccaggctctttttgtaacctctgtgagccagagttctcatttataaaatgggactaatcattgctacctttcacagtgaggtgtagagattatctctgtaaagtgcctagcatagcattttgcatataggaaccaaagtaaaagcagtaataacaaatattaatataaagttgactgtagaatggaattaatatgataggtttgacttgcatttttagaatcaaagtacctccttatgaagttttactcataggataacagattggaagtagtaagtatgacatcatatgactcttgtgtacattcttgcggcatttcagcttaaaattactaaaattagtttgcttttaatagaggttcagataaaataataaatagaatatttgtaggttttcttcttttagggacataattttgcttttgacaattgcctaaaatttcctgtgattatattggttagtttaataggcttagtagataaggcaaggtgggaggagaagttgagtataaactttaccagttttttacttgaaggacttaaacatttttacagaattatatctgtttatccttaaaacttgatcctgtaaaactgaataattaaaaacatgatgaaatttttttctgaagactatacangatctttctttagcatgagtttgttttttatttttttgagaccaagtctctgtctgtcacccaggctggagtgcagtggtgctatctcggcttactgcaacctcagtgcctcccaggttcaagcgattctcctggctcagcctcctgagtaactgggattacaggcacccgccaccacgcctgacccagcatgagtgcttttatgattaagtgaaattccatggagttactccagagaatttgtttagctgtcttagattgttataatttttttagggtgagtaattttgccattaagtattaattgtagcagttctaattatatagaatagagattatggaagtttcgataaaatgtaataaataggtctttgtttaaattatttgaatgtccttgctaatgatatctatatatgagaattatggatgcctgttttcaacagttatgtgtatcattttactagatatgaaaggatacttgtgaatttaattcrtaaatattatactctttgctttttaagaagaaactrttaatttaatgagttcaaacctgagaaataattttgtcctatttaaagagttaattaaaatactaatgtttttattctttgaaatataaaacagaatgtaagtagtattttatcttgcctttaatggtattaggaagttaagtgctttttgaatattttttcttatttgtgttcgttgtgtgaaacttgaacattgtggaaaatattttatagaaggtggaagattttttttttttcttttgcgacagcgcttcactctgtcgcccaggctggagtgcaatggcgtgcagcctccacctcctgagctccagcaattctcctccctctgcctcccaagtagctaggactataggtgcatgccactatgcccagcaaatttttaaattttttgtagagacgaggtttcaacatgttgccgaggctggtctttgactcctgggctcaagcgatccacctgccttggcctcccaaagtactgggattacaggcataagccaccatgcctggccagaaaatgaaagattttaaattctcctgccaccctgtgtcactgcattactgtcagaatctccaaatatatgctcgtgggtttttgtttgtttgtttgtttgtttttggtggtagtggtggtggggggtttgtatgttttgtttttgttctctttacagcattgttatatattggttttttaacataggctaagaacacataattttgcatcttgatttttttttcacttaacagatttggatatttttccaagtcagtgcctatagatatgcctcattgtctaaacaactgcatagtattcgtgaacatttttgttatgataataaacattggtgaaaaatgacactttactgtttgctgagttatgtaagagttgtctcatttcagcttctcaataatttcaagacatggaggttttatctttttacagatgaggaatacaaattaaaatttacggatgttaatctactctagttaacatggctaagaagtgatagagtaggaatctttctcttatattgtacttacttgtatcctaatatttctttgcttatttgtaggaatgtttcaataggataratttcctagaagtggaaatgccagatcaaggatatggcagttaaaaattttgatagctagattcactggttattgttccatcactctaaaaaagagttaacatctttctgtactgaaagtattgaaagttcttgtttctytaaagcttgggcaagaatggatataattatttaaacatttatcaagctgataagcttgataaatcatattttaacttgcattttgttgattcttagttatcttttatttgcctcttatctgtttatcttctatgagttccttatttttattctttttggcttattaatttttgatttattttttagagtgctttattatatattatagatgcatgtctgttgactgttaaacatcttaaaaataatttctcccaattttttgtttactttttacctttgtttatggtatcttgttyagtagttttacatttttatttagtcagatctgtcaatatttttctagggctttggggcatgttaagagaggcatttcctaccctaagattaatggacattttctgtatttatttatgtagaggtggggtatcactatgtttcccaggctggagtgcagtggctattcacagagttgattatagctcactgtagccttgaactcttggcctcaagggatcctcctgcttctgcctcctaagtagctggaactataggtgcataccaccacacctggctcttcctataamtattttattctaatagttttatattgtttaaaaaattcatctgaaatttmttttattgtattatatcaggtaggaattttactttttcttcatgttatttccagctcaaatataacttttatttaaaaatctgtccttcccccgacctcycctacccaatttaagaggctatttttgaccaaatactgtctatagtaccagtgtctatttctaamatttttcttatgtatctttaatctcattatctcttcctgcactaggattctgctttttgttgtttacagtgtgagcataatattcttcttcattatattttaccttttttagtggttgccctagagtttgcaatatacattcacaactaaaccaagtccactttcaaataacactataccaccttacaggtagtgcgagtaccttaaataacaaaataaccctaattcctccctcctgtcccttgtatcattgctgtcattcatttcacttatatgtaaccatacataaacatacatgtacacacacataagatatatacataatcagctacattgttgctattactattttgaaccaattgttatgtgttagatcaattaagactacaaaaaataaaagttaaaaaaawtttttttttttacctccatttattccttctttagtgttctttctttcattatgaagattcaagtttctggcctatgttatttttctttctctgtaaagaacttaaaaaaaacatttcttgcaaggctgtagtctactgacaacaaattccctcaatttgtattcatctgagaaagtcttcatttcttcttcatttttgaaggatagttttgcaaggtacagaattctaggatggtgtttttcttcccgccccccaactccttctctccgctcttttcttgcatagtgtctgaggaaaacttggatgtaattcttaccttggctcctttgtaggtaagggttttccccccactctggcttcttttaggatttttcagaagatctctttgattttctgtagtttgaaaatgatacacttatcttctcttttaaaatatttgttggtggtacttacgcatttatgcttctgtatgckgggttctgaccygcagatcctgacccagtgatggatgagagacatacactgacacagatattttgcctgtcagttaggctgaggggctgggccactcacagacactgaggaaggtgctgtaaagagttgtagctgcggtcccatcagccagcgaagctcacatttattcagtatagattaaatgacaaaggtcttgagtagacaccactagagggtaattgacattgcckacctcctgagtagagagcaattatgtggtcctaagaccaattaaaggttggtcttaggacyacatgagtaaacaagctgtttagataaactcctctgtgtctacgagctcagcttttaagagaattcagctgccttcagccaaacactttatgcaacccccaggcattccaagagggtttttgtttatttcctataattttacaatttctctcatcatcctgaccgagcccccacatctggatgaactagtcaagtttaaaaaaaaaaatcctaggggccagcacatgtatgaaaagatgttttcttttactcacagtttaaaaaatgaaaataaaaacagttatattttttaactataagattggcagaaattaaaaaattgatggtaccaagtatttgtatgggtgttggaaggcagctcttctgctttgttggtaggagtataaattgttttggggagcaatttgataatttttttactctaaattaaaaatttatttactccatgactcagcattttcactactagtgatttcactgctactacatatatctttctaaaactctggagataggtgtttactgcagtgttgtttataatatcaagcaacaacatcaataacaaacctagaaaactggaaattacttaaatgtttaatcatttgttaaattatagcrtatccatgagatggaatatgcagctgttaaaatgggctaggtagatctggtatgttatgtgaaaactgcaaattacggacattaagtacagtcatcactttgcatggataaaaatcatgcttatatacacaaatattctgggttgtgtaaaactttttttttcttgaaagatttcataagtaacagtagttacttttttggagaagatataagggcattggtggcagggagtaggtaagattttgattttaaatcgttccaacctgtttgaattttatttataaaaaggtatctacaatcctggattatagactatttttgttttttaacgcttttcattatttaaaaaatcccagtggaattttaatttttattttattgactttatggaataatttggggagaagttaacatttttacagcattgattatccccatccatgaatatggcatattttctttatatattcaggtcttcttttatgtttttccagtagcattttataatcttcatgtaaaccttaaatattcctggatatatttgattttagatattttagctttagtttctattgtgagcaagatcttttcaaattacattttttagctgattactagttacrtgaatgttgttgattttatgattatatttggacttgttatagaacttcaattctagtggtttttcagttgattcacttagattttttgtattatgtgatcatgtcatcttacagtttttaaaacttttgtttcagattcctcagttccttttagatgattgctttaaaaatggtatcccctgccgtatattttgtactcaaccaagacgattggcagctatcgctgtggctgaaagagttgccgcagagagacgggaaaggattggtcaaacaattggttatcagatccgattagaaagcaggtaaaaacagttctcatgtatcttctcttttatcatgcttaaaaaagactatgtatatttcactaaaaatagaggatgtgttcgttgaaaagttaggtgatcattttgctccaagtaagtctacatcaagatattaaagtcatgtctaaatctagagtagtattgaatgaagagtttgaaaaagactttgaaccatagataaaaattccatttcaggcgggacgcggtggctcatgcctgtagtcccagtactttgggaggccgaggcgggtggatcacctgcggtcaggagttcgagaccagcctgaccaacatggagaaaccctgtctctactaaaaaaaaaaaatacaaaattatcygggcttggtggtgcatgcctgtaatcccagctactcgggaggctgaggcaggagaatcgtttgaacccggaaggcggaggttgtggtkagctgagatcgcaccatggcactccagcctgggcaacaagagcgaaaccgtctcaaaaaaaaaaaaaaattccgtttcctagtttcatgatcatagttattttacctctttgagcctcagtgttcttatctataaaatgagtcaaagaaaagcatctagagtacaggtttgatgtgaagtttatagtgaacactcaataactgttagtgaatttattatcagtagtagtataaattgagcatcttaaatccaaaaatctgaaatccaagatgctaaaaaatctaaaactttttgagtgccaacatgacactcaaaggaaatgttcatcagaggattctggatttacgattttcagatttgggatgctcaactggaggtattctaaaatctggaaaaatctgaaacctaaaaccctttctgtctcgagcattttggataaggaatactcagtatatgtagtattagtaatgccttcttgacaagtagtactttttttattctcagtggtgattaaaaaatctgattccatttgtaacatactttagctgcaagcaaaaagtatttaaggttttgttttgtttttagagcagcttaggttctttaacaaaatacatcatttaatataaaaggctattgtcaggcagtctcacataactgcaaaacctcatagctttactaataaactgtacataccggtacactattagtaatatttattaaaatgtgtacgaggccagcatttaatgtgattatattttagttacatgaaaaacttgcaattgtgcactttgttttgctttttttttaaaagggtttctccaaagacacttctgacattttgtactaatggggtattgcttcgtacattgatggcaggagatagtacgttgtcgactgtgacacatgttatcgtggtaagaatattgctgaatttgtcatatgtaactcagattgcttaaaatttaaatacatatgccgtttcaggatagtctcaaaaaatttaaatacataattacatttttggaatagggtagaaaagagaaccaacttattcttttgaacaggctgtaatgatcaatttattttttgtctataattattagaaatattttgtattacaaaaataataaagccattaggctttattgagggaaaataaaataagcaggtagttttaaaaaatgtgcttttcatatatgaaaatgatgcatgcacttagagttctcaaaaaaaagggagatttcttttatctctatacttggttgtttgatcccttcattaatatcatatatttcccaatgataggggtatactaataaactccatgattaagctgctaaattaactaactgctgatgaactaagttgatgagtttacccctttgttaaggaattctaagcttttacctagtttgtgtcaaaaaaaattagattaagttttataaacttggaataagcagcttttagaaacttacccaaaccaaaggatgcacttcataagctctgatgctaaaagaaacgtatttacatagattttttatgtattaaaagcacattaaattggactttacttataattttttgtagttttatattttgtgggaaaaaagggcaatatagacagctctctgtatctgtgggttccatgactatggattcaaacaactgcaggttgaaaacatttaaagaaatattgtgtgtctrttgaacatgtacagacttttcttgttgttattccctaaagaatacagtgtaactatttacctagcattacactgtactaggtaatataggtagtctagagatgatttaaagtatatggaaggatttgcataggatatgtgcaaatactatgccatttttttttttaatcagggacttgagcatccatgaattttggcatgggggaaggccctggaaccattcacccacagatgccaggggacaactttactttgtcatctgcatttcattgttaatgtctaattatttctgaaattcctgtaatacaaaattttcatgaatattgattggccttgtccacatttaatttgaattagtgtaaaacccagtggtgccattgtttttaaagacttagtcatcaataatgttttaactgttccatggttttatttctgtttactataggatgaagtgcatgaaagggatcgatttagtgattttttacttacaaagttaagagatttgttgcaaaagcacccaactttgaaactaattctttctagtgctgccttggatgtaaatctstttataagatattttggaagttgtccagtgatatatagtaagttaaattgtcagatttcttctataatttttatgaaagaacacttttggacattatttatcctaacagaaactggggaatgttctgaagtagaggccatytattaccgttccacctgagataggcttaattgtcacttctttctgttttcaacttctccttttctatcaacagctctttggtattgtgtagtgagcctaattctcttaccttaaaaggaaatatgctttattttcactttgtgttccttcttaaattgtcctataactatttccctttattggtagatatctttgaaaagtagtctatactcccatgttttacttcacattcacttctgaaaatgctaaaacaacttttgcccttgtcctttattaaaaacggattttgccaccagtctttaaaaaaatgataaattcctcttcaaaaaatacaaaagttaggccgggcgtgggggctcacgcctgtaatcccagcactttgggaggccaaggcaggtggatcacgagttcaggagatggagaccatcctggctaacacagtgaaaccctgtctctactaaaaatacaaaaaattagccaggcgtggtggcacgcacttgcagtcccagctactcgggaggctaaggcaggagaatggcgtgaacccaggaggcggagcttgcagtgagctgagattgtgccactgcactccagcctgggtgacagagcaagactccgtctcaaaaaaaataaataaataaaaatacaaaagttctgtttacttcagtgaaataatacaaaaatatatatagaaaaagttcacaattgcccctatccttgttccatgtcctacttttctgatttatggatgttaacagtgttatatatattcgtttttacttaatgtaagaacacaaatgtatgcaaatatatacgtatttataacatttacaaaaattggctttatggatttatgatttatggatgttaacagtgttttatatatatttgttcttcatcttcacaaaaatgtatgcaaatatatacacatttataacgtttacaaaaattggttttataaacatgagcacatggctaatacattatttgcaatttgctttatcatgaacagttttccagtttagtaaccctggatctagttctttattttaagcacctgcataataaagtatttcataatattgatgtactatatttattttaccatttctttatttttggatattcaagttggttctagatcccccgcctcgcccctgccaacaatgttataatgaacatccttttatgtatatcctgatgtactggatttctagggatagatttctgaaagtgaatttgctaaataagagtatatctatttttaattttaacagcttttgccattttacttttcaaaaggctgaaatgatttacatttctgaagtgtataaggctatttatttgaatttttaccgktgtcgtttgacattaacctaattgccaatctgatattcaaattttaggcaaaaatcttacttaacttttctgtggtatgttttatggttggctctctctctttttttttttttttttgtgaaatgctcagatgctgtagtttgtttgataacattgctgcttgctaaacctcattcttcattatatcccatgctttctcagtctcccctgtgggcttctcttcttttacatgatgcttaaatagtggtattctctagaattattcccttgatccgtttccttttttttttttctgttcgttccgtcttccttccttcctttcccactattcccatcctcttgtttcctgccctatgctatactctactaggtattggagatgcatagttttcctggaagctctcattcatgccctgggcttctattttttcttttatactgatgacttctgaatctttattttcagttgttctccagagctttggatttagatatttctagtatgccccaaactgaatacttcatctcttttgcaaaacccttttctcttcttgtgttacctgtcttagttaatcatactactattgacctaatcacctgaatcacaaacctataagttcttaactccttgtaataatcttgggtgatsagggacatcagatctgtacatatgctaatcgaaagctcatttttcattttacatgcctaaaaccaaaccccatttcccaccagcaaacctgttcttttcaggtttctttgttacctcagagaatgacattatcattcagatttgcaagccagacatcaaaggactatatttgacactttattttttttccatatccaatataatgctgagttctacggattttacctcccgcctagctctagaatttgtctgcttcttttttggttttcactattattaatctcattcaggttaacctgaactattgcagtagctgctayttggcttgacgtagcattctgctgtctttaaatccattctccatattgcagtcagagtggtcttctttgaagtagaattctgatgatgtcaagcactttactgagcttaaatctttgaatgacttttacctcaggataaagacataaacccttagtaagacttatcttttcctcttacctcatcttgaacgatatccctctccattcccacactcccaccatttttcaagtaagttagccttttagttccttgaaacacctttaggtccttgaaactcctttctagcacagggactttgcacatgctgtttttcatcatcattatacactttttattcttttcatatggctttgttattttgtttatcttcttgtttctcattttcttagtgaggatactttcttgatgttgtcaaatcccccgttacatactgtcatggtgtcttgtacttgtatctcaggactcttcacaactctatatttaccttcatattctggatttttggattgatttctgtctcttccactagcttgcctccagggaacaggaaatagctctgtttcctcttacaatttctacttataatacaaatgatattgatgccagacacatgataagtaggtagtaaacactagaggaaaaaacccaagcacacaaacagttgtctaatagttgtttgtaagtcaaagttatagttaaaggacaatattayaagagtcacttgaactaygaaattgcttttggatattatactgagattcattaacttgggattttcatgtttttatgtgaattttctccaagatgcaagttgagtatttaatttttttttattatttagtacagggaagaccatttgaagtaaaagaaatrtttctggaagatattttaagaacaactggatatacaaacaaagaaatgttaaaatataaaaaggaaaaacagcaaggtaaattttttaataaaagaaatataaaagaaattactattgataatgactttggagtactccatccttacattgtggaggtacaaggacacttgaaagtgtttttctcttgtatataattgtataaccttatattggaatattgtcccaaatattcctttgctttctggtttgtgtccagaagttataatctgtggagagaaactgaaagtgggtgccagagttgaggaggtgtctatatccaaacattcagccaccttttaaggagatagaagaatatatgctggctgcccacagcatatctcatagggaaggactgggaagtgaatgggagggagtgaaaaaagtagtatgtgattaataacaaactttgataaaaatgttgagttttccaaatcttgatgatgttacaggatttcattgatactttgaatttagcattattttcctgttaatacgtctcttgtaatgacatatttcagcttttgaattagggttcagatttctttttcttaattttaacttcattattcatcatagaagacttggcttcaagctttgataccttgtttattctgtatgcccttggacaaaaatctgaactcctttggattttccccttgaaaaatgtaatcagcaatgctgatttcattgggmagcactgaattactgatatgtaagttgtaaaactcctagatcttgaaacttaaaaaaaaaaattwaaaaaaaatttttttagagacaggttcttgttctrttactcaggctggagtkcattggtgcaatcatggctcactgcagcctcgacctcctcatctcaagggatcctcccacctcagcctcttgagatgtagaccactgtgcccaactaatttttaaaatattttgtagataygcagtctagttacatcgcccaggctggtcttgaactcctggcctcaagcaatcctcttgcctcagcgtcctaaagtggaaytacaggcatgagccaccatgtccagctgaaacatttgaagatgaaaattatatwtaattgtatctcagaaaactagcgtggtggtagaacttcaacaaatggttttctacaaagtgctgtatgaatattggtcattgatttaaacaatagttataacatggataaaaatactcttaattctggacttacttagaagtaaacttattagtaggacttggaacaataggtgaatgcatgaatgtattagcccattttcacactgctgtaaagatactacctgagacttggaaatttataaagaaaagaggtttaattcactcacagttctgcatggctggggaggcctcaggaaacttagtcatgatggaaggcaaaggggaagcaaggaccttctttacatggcagcaagagagagaagtgcaagcaagggaaataccagatgcttataaaaccatcagatctcgtgagaactcactatcatgagaacagcatgggggaaactgcccccatgatccaatcacctcccaccaggtctttccctcaacacctgcgaattataattcaagatgagatgtgggtggagacataaagcctaaccatatcaatgaagttttcaagcagtttcatgtgtctttttgtttcagcataacacatttttattgaatattcttaatataytttttaaaagtaactacagaataagaccaacttttaagagataccagattcmcataatttatttaaacaaaggaatacatttcaaaaaggaaatgatttgtctacatattctttctttgataattaatttagaagagaaacaacaaaccacacttacagaatggtactcagctcaagaaaatagtttcaagcctgaatctcagaggcagagaactgttctaaatgtgactgatgagtatgacttactggatgatggtggtgatgctgtcttcagtcagctggtatgacctccctggtttcccactcatattttgtgtgaaaattgtgtaggttaaagaacattttatgagcttataatttttttttttttttttgagatggagtctggctctgtggcccaggctggagtggagtggcgtgatctcggctcactgcaagctccgcgttccgggttcacgccattctcctgcctcagcctcccaagtagctgggactataggcgcccgccaccatgtccagctaaatttttgtatttttagtagagacgggatttcactgtgttagccagggtggtcttgatctcctgatctcgtgatccacccgcctcggcctcccaaagtgctgggattacaggagtgagccactgcacccrgccaagagattgtaattttttactgcataattgaatggtaattctcttggtttattttagaccacaaccaatttttcagagcaactttctactctttaaaaaaataatttaccctttttttgagcatgtgatagtatgtaatgcagatatgtttgcagttttctactagtgtttaaagttgtaatgtatccaaatgaactgtacatgagtttttaaaaatacttttaaagaatatttaaaaattggtaataaaaattgttatttaacatctttatagatatgcacgctaaatatactatatatataatgatatatatcctatatgtttataggattataacacatgctatataaaaaaacatatagtatagacttatttgggtcatggaacagcattttgaccatgtatatttgtggttcttaagactggctgtatattttgtcacctgaggagcttttaaagccctatggaatctagcaccctaccaacaagagattctgatgcacttgctctggggtgggacctggcatcagtattaaaaagctccaggtgatacttcccttgatgtgcagttgggagagagaactactgatctgtatgtgcatttaacaacatcatattggaagcacaattaacatcgtgactagatcatagtcctttgttgacaaactcattctcagataaaagttgagtataaggactagatactgtattgtgagtgataatgtttgtgatgaaaggagaaattttttatgtcaaagcatttgctatattatcataggattagtagtcctgatggccattgtggccatcttatgttctttgcaagcaaatgttaggtaatttatgataatttatgatttttactgttttttgtagactgaaaaagatgtgaattgccttgaaccatggttaataaaggaaatggatgcttgcctttctgatatatggctacataaagatattgatgcctttgctcaggtctttcatctcattttaactgaaaatgttagtggtaagtttattttaattttaaaaaattacccttacagttatttatggtggaagtatagtttaattcaaaacgtatgtacyaccaataattgcacaaccaaaaattttattttttaaaagtatttattttatttcaaatgyacaaatcaggatcttcttgctagcacagcatagtagaaataaatattgtgttaaatcagattcttaagctaatgtctccattgcagtttgaagagctgtgtgattacatgacaattatgtgcaaaaatgctgttatgtgtatgtgttgtgtatatactcttgtctttcccttccttggaaaggatttagatgtcaagtatttattatttcacctgaagccctcagcattataattgtaattattattgattactttcttcttgaaatattttactcagttaacttccagtatttcatacttggcttattttcttcatatttccctggctctaacttcttggttttcttggcaagatctttttctttttttctgacctgtaaatatgaaatctcctaggtctcaatccttaagaccttaattctatttatacttaatccttaagtggatctcaaatagtcattgctttaaatatctattttaaatgacccctaactttacatctccagacctcatctacccccagatttaaatataccttatcacttgttatctccagttggatgtctgttaggtgaataaaattggatactcctcaaacaacttctgatcccctccctacgtaccttcctctcaacctgcacttttcttgtgtttcccttttcagtaaatggtcactatcattcacctagttgctaaggcagcaaagcatacagaaagtctgctgtcatattgcacatataattcattagcaaatcctatttactttgcattctaaaataaatcctgaatatgaccacttttcacttcccctactgtacatttcactccccctactgtacatttcactcccctagtccaagctagcctctcttctggactattgcagtagcccgttaaccatttctgtttttatgttactgcagtctgttctccgcagaaaaataagactgatcctttcataaaggaaattggatcattccacttgcttgttctcaactctcgcaggcttccagttacactgtggataaaaatcaaagtcctttccatgattaggcctctggcttcctccttgatcttattttttgccacttgcctscttgttcactgtgcctagacacacttatctccttgatattcttcatgtatgccaacacattccctttgggactttgttttgttgtttcatatgcctagaatactatctccactggtaatcacatggcccaatgcctacttatttaggtctctgcttacacattgccttctcttttctgaccaccttactaaagttgtaccattttctcacgatatttccttactctcctttattattctttattgtactttcattacctgtcatgtattttttatttttcattacttatttcatctactagaatgaaaactacatgagggcagaaactttgtcagttttacttatctctgtgtcaccagagattcatcgtttattaagtgctgaaaaatctttgttgaataatgatattattattattgttatttttgagacaaagtctctctctgtcatcaggctggagtgcagtggtgtgatcttgactcactgcaacctctgcctcccgggttcaagtgattcttctggctcagcctcctgagtagctgggactacaggtgtgcgtcaccatgcccagctaatttttttgtatttttagtagagacggagtttcaccrtgttggccaggatggtctcaatctcttgaccttgtgatccgcctgcctcagcctcccaaagtgctagaattacaggcatgagycaccacacccagcccaaataatgatattacttttaagcatctttaccacatgataatctgttggaacatgtttagtgacaggaagttcactacctttcttttgaatttgaattgttttagtagttaactttttagtatgttgatgtgaaatctaactacatagcatctccctttttctgcttctggagtgaacatatgtatttatgcctgacagacttctaggtatatgaagatgattattctttttcttttaaattttttgttttttttttgggctgactgtacctattacttcaactgttctttaatataacatgatatctggtcccctccttccctggtctgccttctctggatatgttctattttatcccttttgaaaagcatagtatccagttctgagtgttaatctcttagtaaccatcttagcctaaaaccttctactctttactggtattaattcagccaaccccattgtcatattgattcatattgtttttgaaatttttagttctttttttaaacttacgattttattgaattaaattatttaatcatcatgtacttgttttgaatttttttgagcttgagatattctgtttattcattataaattttatcttaaagttagatttggcccgttgtttctgcctaacaattttttaaaaaattctaattgttatctattgcattaataagctttctctgtttgtcaatttgaggtgtctgggtcaattaccaagcatgtggtatgctgcaagggactaggtcaatatttgggtgtggttgttcaagcagttataatcctacacatcttctagtctaacttcttaaaaaataagtgagggttttttgactttttttttctctttgtaaatgtgtgttggctcctattgatttattttttaaagctcattattcttttttgttttgttttgttttgttttgttttgttttgttttgttttgttttgaaacagggtctcactttgtcacccaggctggagtgcagtggtgctattgtggctcactgcagccttgacttctgggctcaggtgattctcccacctcagcctccagagctttggatttagatactaatatgccccagactgaatacttcatctcttctgcaaaacctgtttctcttcttttgttgaagagctggccaggctggctttgaacttctgggctcaagcgacctgcccacctttgcctcccaaagtgctgggattacagacatgagccactgtgctgggccctcattattgattttttgaaaaataattgatctccatttttaaaagtaactttttggatttgaaagtgtagatatttgttcatctgcagttttcttgcgttctttctttttccattattttaaaaaatatttactctgaagagtttagcaatcttacttgaaagttaaggaatttaaattctgaaaacagtgactttaaaatatttatgatgcattttaagtatttaagtattatccttagctttcttcctgatatttctttagtgaatactagactgttaatttgattatggtcatcctgtgtagactcaggtctctcctctgctcttatgtacagtttgtacatttcccagagtccagtattctaatgttttaagccatgtgaggaaaactaaaatgttacagtagctcaatcattcacttctcatctttttgtttcatttctaaaatctcaaccctcaatttgcaccagaactgaaaatatgtcatatgatttaggaaactctgggcttcatagatttctttttagtagcatcattttccccatgatcatgtagaagcagctaataatcagttaagacttgacattctctgtcatacttactgtatctattgctgcattacagatgattctaacacttagaagcctgaaacatttattatctccatagtttctgagagtcaagaatctgggagtggtttagctgagtggtctggctccaagtctctcatgaggttgcggttaaactgttcgtagggactacattcatctgaaggtttttggggctggagagtatgctttcaagaagcctcacttacatagcttttggcaggagtcctcagtttgttgctggctgttggcagaatagccatgagttcttgtcaactgtccttctcaatagggctgccttattctacctgtgaggtgcagctggcttctctgagtgattcaagagagaaagaaaaagagcaggaggaagttgtagttactttttatgacctagtttccagacttgcacaccacctctttcacgttattctgttcattagaatgagtcacttagtccagtttatattcagggagaagggaattaggctccacctcttgaagggaggagtgttaaaaatgttttaaatgtttcacatttattcatacccttctgctcaaaatacacacagtttgatgctgttctccaaggccatgaattgaatattcagttgaagaagtaatttgcatacaatgagtacagatcagaataaattgatcttttaaaatgcctgaccatcccagacttattgaatctgaatctctgagtaaggtatggctatctgtgcttttaaaaatacaaagcagaaacaacaacaacaaacccacctcaaaaaacaaaccccaaagcaaaataaaaatacatgccattatatatttgtccaaatccgtaaaatgcacaaaaccaagagtgaatcctaatgtaaactatggactttggttgatgtgtcagtgcaagttcatcagttgtaaaaaatgttccactctggtgggggatgttgataatgggggaggctatacatgtgtgaggcaagggacatatgggatatactttttattttcctctcagttttgctgtgaatctaaaacttgttctaaaaaaatagtcttaaaaagaaagcctgaggcaattttcttgtctctgcctcactttaaaagaacactgatgtatattgataatggataccatgtttcagagtgtttattaaatagaagataattgggtatacatactgtatatgaaagattaaaattttccttttgtagttatcttaaattttactgttgagggttttttaaatgaaatctttctgaaattaccaattttgtaatttaagcaaattaatgctaagcaattatattgaattgcttgagaaatatattctaggaagaaacttcaatagaactttaattatttttctartgtaagggttttatgggaaataaactttctgtcagtgttaatcccattaagtgtcttatcaaatagccttgaatgggggattaaaagcaaagtaaaataacaaccaaacattgtctcaaactttgcatttgaagcttttaagtattcattactagttactgatgaaaattaacttttaaattatttaattatgtcttgtcatttggtgaacaaggtaatatctagatttaggaagattatttaaggttatgcaagttaatagctttccttttctgttgaaataatatagatgagcttaaaacagtttaacatcgatctttccttctcctaccttccaaccaacagtctttattcaatttacactagacatatcataacagattgctgtaagtgatctaagttaagggttatgtagtgctgtcattatgtagttaaggagcaactctcaggctaattatcctgaaactcagttctgctatttcagattttttaaagaatgaaaatggtttgaagtastttggaaatttaagttttatttatcttttccyttttttagttgattacagacatagtgaaaccagtgcaacagctctgatggttgctgcaggacgtggctttgcaagtcaagtagaacagttaatcagtatgggagccaatgtccatagtaaagcatcaaatggctggtaattttaaactacgttgattcttcatatatctttgtatagctacacatatctttttttgttttcttatgtttgtctttatattaaaaactattgtgtaataattgctggtgaatttctgttttaatgggttaataattttgaatgacttgttttttaactataatttatcttattttttatttaaaaatttttttgaaaagacagggtcttgatgttgcccaggctcatcatgaactagttttacaattttgatgacatcttatatatcctttgaattttggcaggatggcattggattgggctaaacactttgggcagactgaaattgtggatcttctagaatcttacaggtaaaactttatactattttaaattaattctaccgtctcttaaaaaagagcttcaccatataaattatgggctattcaaatgtagaccatttatagtcttttatccagagatttttttttgtgattctaaggaaattttctgtctgatctaccatggtataatatttgtcttattttaagaaatcagtagagggatttccaattaaacatggtaggtacaacataagtatctctgcattttctcaaaccttttacatttctcaaaacctcactaaaatgacaatgaagcaatataaagaaatttaaaaggtgtaaaccaaagtcaaagagaatggaagaggacagggcaactgatagaagatgttaattttgggatgatagatagctgattgattgacttagcagaactaagaaaactcacagtgccaatgagaaacactcattttagctttgaaactccttagaggcttgttcagtggcctttgagtgaagcagtaaaaaaagagttagttatcaaagagaaaacttagaatacaaaactataataaaagatattgcattcatgcaataaaaagtgtgctatcaaaaaggaacagaacacaaatctttgttcagattttgtcttcatgaggcctacccaaatttgccgtatctgataytacaatctaccccccacgcaatgtccatcctctttaacctgttctacgtattctttttttctccagaagccctaccaccctctgatacactatgtaatatacttgttcactgttctattgatttattgtctatctcttctccctaccagaatgtagtaagcttattgtctgcttgttcaagaayagcaactagatgtagtagatgtgcagtgagtgtttgttgaatgaatgaataaataaataattcttgtaaattaaaaatatgatagcagaaaaaaagaagagttacaagataaagtttagaaaattgctttcagagcaggaaaattgtagaaaaaacataagaaaatttgcttcctatgtactcctttattaggaaactgttggagaatgtgcttcacaaaaaagaagtaaaaagaaaaacaaaaattgggggagaaaaaaaaaacgggtaaaaccgggcaggtacagcacaggggataggtgaaaggaatgctcaggatgctggtacagaggattgttttgatgacacctgtgtctagtaggcctgatcgcataggaacagaagatgtggggctctagagggaggtctctgtgggggaaaaatttacctggcattgtcaatcatattaaaaagctttatgaatctgttagataatttgggaagaattactatcagatcacagaaaactaagcaaataaaaattagacagttgttactctaggaaaaacaaaaagttacacaagaaaggaggtataatcatagtatattattaggctaagcagtaaatgtttaccagtcatagtaaagtaaaggctgaatgaagatttaacaaaaattgtagkaactggtgtgggtggaaagtgtagggargtggaagtggtaacctcatttttcattagttggaggttcgcagataatgactacgttgttaaaacaataaatagcagaaaatgaatgttgcttagaaatatgacagcaaatactaaaaaggaatggctaaaacaatagaatagtcctaagcagtgtgactaggagtttttgttataacttctataaaaccatttaccaccactatgtatatgtattgctttgatttagcaaaaaaagaaaaatcacaagggaatcctgtaaaaccaatcgaattaattgtcttttagatagaaattttagataaatttacattagatatttaaataaattatgaagctttcagattagatatttaaagaaaattttgaatatatattttataatacattgaaagcttctgttttcaacctttagagactcaaaaaagaaaacaatggagcctgaagttaaaatatattaaaatatctgttattcaagagcatataaaatgttttatttgacctgggtttttgtacttaattttatagatgtaaaattggaaatgtagtctcagacatttgaaattagttgtgacattgagtctcaaaattcttggtaggtttaaatgctatttctgatatggtaggtttagttgtcatttcaatartagcacccagaacttgcagtccttttattgttaacactttgaatgttccagacattcttatggtgttaagtaaagctcactagatactgcaggttaccaggtaaagcgtttatctggataatattttaattatcctggctaactgggctttctttttatttgatagatcatattatcaattataaatttcaggtatttaaaattgaatatattattatgtttactggattattgataatttatatccaaaagttatagctttaaacagaatataatgtcttcttcatttatgtgttaaaaattaaaaaacaataaacttacagtgttttaaagtagatcttaaaatttataagagctgagaacacatggacacagggaggggaacatcacacaccagggcctcttgaggggttccgggataggggagggatagcattaggagaaatacctaatgtaaatgaagggttgatgggtgcagcaaactaccatggcacgtgtatacctatgtaacaaacctgcatgttgtgcacatgtatcccagaacttaaagtataataaaacatttacaagagccaattattaagttgtagaagtttaatatttttcccattgaaaatagtcttacgttatttttctgctaaattctttaagagagattggatttatttgaacttcctagaaattctgttgataattgctagtgatagcagtagtttacatttttacatataagatgaagaagcaaggcatttatttcagtaatttatgttgattcttgcttttggaaaatagcataatcaacttgcttttagtatagaattttctaattaacagtcatgttaagttggtacctactgagttttttaaaaatgtgaactatacatcagaatattgtttatagtagtaaacaattagatacaacctattaagaaaatataaatgatagctgaaagtttgtggtttttaacagttttattgagatataattaatataccatataattcacccatttaggtgaccaattcaatggtttttcatatgttcacagacttatgcaatcatcaccacaatcaattttagaacagtttcatcaccacaaaaagaaacttgtacccattaggtgtctctccctattccgccccaactctcctaggcctcctccagctttagaccaaccactaatctacttccagtttctatagatttgtctattttggacattttatataaatgaaatcatgtgatatgtggtttttgtgattggcttttttcagttagcataaaatatccatgttgtagcactatttttatgactaatacatattctatggatataccaaggtttgtttgtatatttgtcaattgatgaacacttaggttgtttccactttctgactatgaataatactggtatgaatatttgtgtacagatttttatgtggatatatttttttcatttctcttatatatacacctaggagtggaattgctggggcatatggtaactctatgtttaaccttttgaagaactgccacattgttttccaaagcagctttaccattttacatttccaccagcaatgcatgagggtttaaatttctccacaccctctccaacacttgttattgtctgtctttttgattgtagtcatcctagttggtgtgaagtggtatttcattgtggttttgatttgcatttccctgatagctaatgatgttgaacatcttttcatgtgcttataggccatttgtatatttactttggagaaatgccttcakattgtgcttttctaaaagcattcattgccaaattttactttgaataatgtgcttgaaatcaaaacatgaatcatattatagctaggacattaagtgtcacttaccttaccttccttagggaatattggaaatttgaaggacataaggattacttttgttaatggaaattgactttgtcttttttttttttttttttttyagtgctwcactggaatttggaaatctagatgaaagttctctggttcaaacaaatggaagtgacctcagtgctgaagacagagagctcctgaaagcttatcatcatagtttcgatgatgaaaaagtagacttggatttgatcatgcatcttctatacaatatctgccatagttgtgatgctggtaaatacrtgttgtctaaaagaactggagcaaaatatatactttaagaattaatrttttaagtgtacaaatttttatataattgcactgatagtagtaagtgaataatctcctgtcatcttatgatagtttaccagtacttgaaaacatgtgatacagatttttataattctgttgattgcctctgattcacaatgagatttaatattaaaaagtcattcttctccaaggtgcagtactaatttttctgcctggatatgacgaaattgttggactgagagatcgcatcctgtttgatgacaagcggtttgctsacartacacataggtaagggctaaagccttatatctgttgcttaaaataacggacaggtcttatagtatgttttctctttcamttgtctgcagataccaagtctttatgcttcattcaaatatgcaaacatccgatcaaaagaaagtattaaaaaacccacctgcaggtgttcgaaaaatagtaagcttcataaaatcttctttttaacactttcattagttattttttctgtttttwtattaactttaaagtaatatcttgttgcagattctttccaccaatattgctgaaaccagcatcacagtcaatgatgttgtctttgttattgattctggtaaggtgaaagaggtatgtatgggtaagttgtagttttacttaaatgaagaagattaagttctacttcaacaaatacttttatttattatttagttgtttttcttttaattttacctctactcaagacagcttggaccagcgcatgcttttataagcagaatttacgaaaaatgtctggttctagataaatttaacatactaaatattgattttactaaatattctgccttaaataattcagtatatagaatcaatttttgttattttaacaaagtatacaaaaatgtagctctgctcaccaaatactaggaagaaagtaaagggtttggttagttatagtgaaaatgttgtcacacagtatgggaatttgattacatattttttatgttttccttctacatatgcacatggattatgtctttgttcactgttaaatctttagtgcctcacctatagcaggtgttcaaaagatactcagttcaagagaaccatgctgaaagaaagcaaagaaatagataaaccatgggataaccagcagctaaattggacttaacacttgcttttgtaaaaaaaaagtttcattggaactcagctagtctacttttaccttttctctatggttgctgccttcatactgcaaggcagattggagtatttgtaacagagaccctctcaaagcctaaaatatttactatttgaaagtccttttcaaaaacagccaacctttgttataaaaaaaaaaaagccatttatttccttttagtactggaatgcccagcagttgtccatgttcctaacttttggtagataacattcgctgaaaaaatgaaagtggtaaagataattgatttttcaagggaagacatattaytcatgtgtggaaagcaaattatatctatttagtggataaaaatgatcgtttttaatgtgaaaaaagtaattgccttatgttttcaatgtaattttaaggaatattttatagaaaataaaattttattataaaaattggccatatgctttataattgaataaaggtgggataaattttatttttatataatagtacattaatgagtattatcactaaaaatcttaatggtgagccaatgaaaattcagattttattgccctaaaattacctaaagtggataaagtgkgttttgaatattttagaaagttcctttaggtgttacttatttattaagtaactgaaatttaaaacatgggtagtgtcaaaagttatttaacatacaaaattgacaaatgtaatgtcatattaaaaaccaaataagctgttttctraaaattttataaactattatgcaaacatttttatttgctctatgcagttattttatgaaagggaaagtataagtaccgagtgactgaaatacatgttctagttaggcttgtatttctttaaaatatttctctacaataaattttcactgtaggttatttgaataagtatgtggataacaatggttcttttttactttcttcattgtaacgttcgggaaaggctaactttgttagtagctcagcaggaagtaaagtggaagtggttaaaaatatttctctttgggataagattattgattgttattcttactccacaaggttaggtccctgaaaagtatttcagaaaatgtctttccttgatcttcttattctgcacagtgatgcaaatctgataggaaagtgacctcaagggaatagatccgttctctccaatcttgatgtcttatgagaactggctgccattatccagctgtggcagagagcaacaaatagctcagcagagcacagaatggagaagttttacgctcttctgagtttagtttttaaatccttttttcttagtatgtttgtaaccagaaaatcagggtttattaaaaatcagtactgctgttttaattatttaatcaagagaggactttgaattaaacttttggcatgttaaaatatgttgataacattcttgctattaccttttaaataccttttatattctaacataaagatggtttaaatattacagaaatcctttgatgctctgaattttgttacaatgttaaaaatggtatggatttccaaagctagtgccatacagcggaaaggcaggtaatgtatatttaatgtatattcattcaattgcctgtaaaatggaaacgtttttatatgcattacacatttatcatatattccatgttcaataaaatagtagttttcatgttaaaatttttatattatttttgcaaagcaagccattttgatacttccttaaaagttraatgtaggttatgttaaaattaaaaacttttgcctagttaaatgtacattcagatgtaagaagcttaaaaaacaaaaccaaaaattctaaacatatgcaatgtaggacaaagagctaatttccttattatataaagaagctctttgaaatcaactaaaggccaataatccagttaaaatggataaagggcacaaataggcaatttaccaaaataaaaaatatgcatgtcctactaatacattaacctcacatatactacctaatatgtatctaaatraatgcaaattaatgaggtattattttttgaatctcagatgggcattgatgaaaatgtttaacagtatgtacaacatagaggaaaaacatgggccaatagtctttcatattttactgatgggagtatagattggtgtgacttcttcagagtgcaatttgaaactatttatccaaatctactctttgaccatagattccacttgtcataatttatcctgagtatgcttgcacacgtgtgcaaagatgtatgtttaagactgttctttgaagcattgtttataataatgtaaagtctgggaacagtgtgatgtccatcaatactgaagtgattaaataaattatagccacacagtggctttctgggtagctgttaaaaggaaaaatgtagatctgtgtgttcttatatggaatgagttttcaggatgcattgttaattgaaaggatacagaacatgcatctagtagtcttttgtggtaagaaaaatatatgtgtgtttgtgtatgtattttgacacaaatgcatcgagaagtctgggagaaacattaaaaaacaatgaatgattgttaactctgagaaggaggatttgtggggttcttggagtaaggagacaattttattttttttgtaatttggttattttactaagtgtttgggttactttttaattttcaaaagataacattaaaaagtatcattttcagtaaatatttatcttgcattttattataattagcaggaaaacatgaaatgctgactttcaaagaatgcctcatatactgaagactcatatgcattatttctttactttgtaacttcatagaatgcccatgagggctttgttgttgttatgtcagttgttttcttatgaccaatagtggcttgatacattaagctggatgtccctgctattaatagtatattattgtgggtaaggctgggtgtagtggcttatgcttgtaatcccagcactttgggagcctgaggtggaaggatcrcttgagtctaagagtctgagactagcctgggcatcatagtgagaccttgtctctacaaaaaattaaaaaatcagctaggtgtggtggcacaggcctgtgggcctagctacttgggaggctaaggtgggaggatcatctgatcctgggaggtcgaggctgcagctgccgtgagctgtgatcataccactctactccagccggagcgacagagccagacactgtctcaaaaaaaataaaataacaaatagtatattattggagatgaaggccagaactgcaaaaattttcattgccatttttcaacaaatgtttatcaaaagtcttccctgtgcacatgttacggatagtgataaataaaccatagcctgataggtaaagctggaggtagggcaaatgttgcagtccatgtgggagtccagtaaattaagcaattttaatacagtgttatttgtgctacaactggatgtttccagagttgttaagaatgaatctgagacaattgtgaataaagggggaggcatttctaaaaggcagagggaaagtataaccaggtatacttatttgcctaaaggcaagagtgaatagggaggatgtttggatagaatttagtttagagaatagtgaaaaatgagctgaaagttggggacaagtttttaaggaccattttgagttttctctcttttttaaaaaaataaacagtgggatgacatgagtatagtattctttcagctctctgaagaatggattggcaggaacaaaaatgatggtaggaggacccagtaggaggcttcttcattaatactttcctataataagggagagatgaaagtagtctggattgttttagtggtggtggaaataaaaataaatagataattaattcaagagatactaaagaaagtaatgttggtgattgattgtgtatgtagggggtgaggggtaaggaagagagtggagttaaggatgtcatccaggtttctgtcttaaaaaatcggacagtagtgccatagtcagatagggaaaattggaagagtgttttcactggagagaataaytaatttttggttattttgagtttgagttgcctgtagaaaatcgaagtggattgggaggctgaggcgggcagatcacaaggttaggagttcaagaccagcctggccaacatggtgaaaccctgtctctaataaaaatacaaaaattagccaggtgtgggggtgggcacctataatcccagctactcaggaggctgaagcaggagaatcgcttgaacctgggaggcagaggctgcattgagccgagaccacgccattgcactccagcctgggtgacagagcaagactccgtctcaaaaaaaaaaaaaaaagaaaatctaagtagagctgtctaagaagtttctcaagtataggcctagaattaggataagaagatataatacagatggaaattgaggttatgaatataattaaagttccttcaggggagagggtagtgtaagaagagcagatggctaagggttcaatctcagaggaccataaacatttaaggactaggcaaatatagaaatctcttagaggagcctggaggtaagtcagaggctgaagggtgggtatagtgtagggaagtataaggggtcttcaaaaactttatggaaaatgcatcttatgaaaaaaattatgcatggagttcaaaaattttttgcaccaaaataaactcatattaacttgttataacgtatctgaacaggatctcatttgaggcactaagaaagataagacatcagtttgaaaaaagcccctaccagagcaacatgaattcttctaaaattgaagtaagagcaaatatcacatttatggtgacagtgccctgaagaaatcaacagtttacaaatggataactcattttaagaagggatgagatgatgttaaagataaagcccatagcaccagactgtccatgtcaatttgtgaggaaaaagaaatctcatttgtgccctagttgaagaggaccaacaattaacagcacaaaaatagccaacactgtagatatcacagttggttcaggttacccaattctgactgaaaaattaaaaactgagcagactttccacttgatgggtgccaaaaccattgcttctagatcaactgcagacaagagcagagctttcaatggaaattttaaacaattggaatcaaggtcctgaagcatttcttggaagaattgtaacagaagatgaaccatggctttaccagtatgatcctgaacacaaagaacaaccaaaactgactaccaagaggtagaagtggtccagtcaaagcaaaagcggactggaggtcatggcaacagttttttgggatgcgtaaggcattttgcttatcgagtttctggagggccaaagaacagtarcttctgcttattatgacagtgttttgagaagagttagctaaagctttagcagaaaaacccataggaaagcttcactagaaagtccttctccaccacagcaatgctcctgctcattcctttcatcaaacaagggcaattttatgamagtttttgtgggaaatcattaggcatccaccttatagtcctggcttggctccttctgaattattttattttctaatcttaaaatacctataaaggactcccatttttcttagggtaataatgtaaaactgcattgacatratgacattccctggaccctcagttctttagggaggactaaatggctggtgtcatcacttacaaaagtgtcttgaacttaatggttgagaaattttatttttttctcttttaattccatttttccacaaactttttgaagtcctcttgtatttgatgaaggaaagagttgatcaataatgtcagattttatagctcttataatgtgttatagtgatgattgcctatctgggttgtgagctccatgaagacaagaatatttctatatctctatccctaagcatagctagccctgccattagctgatatagtgactttgggtgaatttaggagactgcttttcttccaggtatttttctgctgcttcatagaaaattatgcaagtctttatgatgacaggataaatggcattcccttggagctgtgtaatgcataatttgtatgactctaatcactgggcctgaacacagtgcttgatataagctcagtaaaattgattgaatttaaattaccaatattcattcatgctttgttttttgctcacttttatatgtatgctatttcttttgatttttaccataaccctacaagatgtatcaggtaggtgtccttcatgaatstcactgtctgaaataattgagacccagactagtgaagtgctttccaaaatgattgataagaggataagaaacagaataggatttaaactcaggtatcctgatcctggatcatttttctctttcctaaatcacattgcgtttacagtttattgtagcctttattcgttgtttgagtcctaatcttgtactttatttttaagggcagggcgatgtagacctggaatttgttttcgtctgttcagtagactccgattccagaatatgttggaatttcagactccggaacttttgagaatgccattacaggtaaaaatttatttaaatataaaaggcatttttttgggtgagggaagtgaggggccatttcaacttctatggattaggcctttaaaaaatcaatttgtaaaacaaaattattcaatatatattatggagggtggctatgtctataacaaatattttttctatataagaaaatttaattcataaaccatcaaaattttaaagaatcacttgaatatttaaattatggtacagttttaaaggatatatatatattttttatctatctatctatctatctatctatctatatttttttttttttgagtcagagtcttgctttgttgcccaggctagagtgcagtggcgcgatctcggctcactgcaacctccacctcccgggttcaagcgattctctggcctcagcctcccgagtagctgggattacaggcgcccaccaccgtgcccagctaatttttatattttcagtagagacagggtttcaccatcgtgaccagcctggtctcaaactcttgacctcatgattcacccgcctcagcctcccaaagtgctgggattacaggtgtgagccaccgcacccagccatatttttttaaatgcagcattttatgagtttcaactatatagtgttcaccttttaagttctcagagggattagcaaacaaattatttaaggtccaaaagataatatccaaatctcactataagatgctgagattatctagtagttttagaactgagttcactgagattttctgacctctattaattgtgggtgtgtgtgtgtgtgtgtgtgtgtgtgtgtgtgtgtgtgtgttttaagttttctaacttcatggaacagccagaccctatagcttctagggaagattagcagaatgcgtttatttgattctttagtgtgtttggctaatgctggcttcccaacccttaaagagaggcaggataatgtgttaaacatccatatacctaagatgatttcccacttcccaatgcttatgtgtgattttctgttcctcctgggagaaaattcagaatccttaacaagagcataaattgcctgttcctgcctgtattaattgtgggtgtgtgtgggtgtgtgtgtgtgttttaagttttctaacttcatggaacagccagaccctatagcttctagggaagattagcagaatgcatttatttgattctttagtgtgtttggctaatgctggcttccaaacccttaaagagaggcaggataatgtgttaaacatccatatatctaagatgatttcccacttcccaatgcttatgtgtgattttctgttcctcctgggagaaaattcacaatccttaacaagagcgtaaattgcctgttcctgcctgtgtctccagtcacaggaaggaaggaacaggtgatttcttgttacttatcctctcttacaccattggttttagtttctcaagcacgtcttttttccttctgccttacagctttcacaggtatctactctctccttagattgtttscccttattccttatatagttactcctactcaatctttacatcttagtttaagtgtctttcttcaggaaaactatctgtaacttcccatggtctccctctcccacccttttctgaacttgcttaaatcatatttacttatttagctccctatagccttcatagcactgacgataatcgtaattaagtagttaattatataattaattatttaaagtctgcttattcatattacagtgtaaactcaatgagaatggacacttccttctgtccccttctttttctccaatttgcacagggccttgcacttagaaagcacttaaatatttgctgagtagataaaatattctagaatgtagtaagtataaaggggggaaaagattttttttttttggacagtgactatgaatgttatgtatacgaacagtgtgaggagatgttgccaatgggagcaatggcaatcttggtataagttgattgaagagggtatttattaaggttctggcatctagggcaaagtatgagctcatcttttacagaaagacattgttccttctactgttcattctaatcagagactctrctagtctgtgtttgggaactgtagttcccatgatttctttaaatgtgtaggttagtattctttttaattttaaaaaattatttactgttttggtttataggaactttgcttacataccaagctgttagccccagttaattgtcccattgctgattttcttatgaaagctcctgaacctccaccagctttaattgtaagaaatgctgtacaaatgcttaaggttggtgtcttcatagttttattttacatgacatttttacttgaaattttaaactaaaagraaatatgtcttaactaattttgtataattattttttatttttgtcctccwrcatgtgtccagataaactaattttgtacttttaaacaattatcttaaatgrtcatgtactttaaataatattgtcatgtatgaaacagtagatatagttcttttatatagtataatagaaacgaaatatatttttatgagatgtagtagcaaaagaaaatctatattcttatttctcatttaggggtttttaattatgtgttttgattaaacagtttgctcacatcaaagtctgttctgtctccttttacttagacaatagatgcaatggayacatgggaagatctgactgaacttgggtatcatttggctgacttgccagtagaaccacatcttggtaaaatggtcttgtgtgctgttgttttaaagtgtctggaccccatccttacaattgcttgcacrctagcttatcgagatccttttgtactacctactcaggcctctcaaaaacgtgcagctatgctttgtaggaaacgttttactgcaggagctttcagtgaccatatggcacttctcagagcattccaggtactattactgtcattttatttctgaagacgttgctgggtaaacacrtttctggggcaaatgtaggaattttaaaaataatttataaattttaaaattgcattaattttgtttcattatgaagtcacrttaatagtcctgaaaaatatcttcttgctgttgttatgttaaaattaaaacagttttgctcwtttttcccattttctccttataggaatatatgtgtgtatttgtatatatatttatttgtgtttatgcttctattaccaggtttctttaaatcatgtcttgggcaaggaatgttctaaaatttcagttaagaaatactgtatactatttaaagtacatagaataaagcttataagaaaattatattgatgtaatatctatcgatttttcttagagttcagcctttttcttgtttgctcaagacactatgctgagaacttaattttgtaaagcaaaatacaaaaatcacttaaaaaccttttaagataatggtaatggcaagttgaggaaagaggcaaatggaaaagaaaagatggggaaaataggatcctggggaagacaaattaaatgtaatttagaatttcagatatgtggggaagaatatgttatttcttgaaaacataggcattgtatttattctcaaatcttcttgaatgtcgactgtgtctatacatttttttgttgttgttttttgagacagtcttgctctgtcacccaggctggagtgcagtggcacagtcttggctcattgcaacctcagcctcccaggttcaagcagttctcctgcctcagcctcccgagtagctggggttacaggcacccaccaccatgcccagctaatttttgtgtttttagtagagacagggtttcaccatgtgggccaggctggtctcgaacttctgacctcaagtgatctgcctgctttggcctcccaaagtgctgggattaccatgtgtgagccaccatgcccagccatattttttaaaaatctaactttgtttatgcagaaagtactctttttcagacacagaagattttttcaccacatataattttcaaaaataattacaagctcttttgtgagtattgatcaatggataactcattgttattaattgggtatattaaataccatatattatagtagatagttgagtgagaagtagagggagatttagagtagaatttctatctgttctttgcttttcccccagctccttcaaaagcagagaggataaattattgcttcagtcttttagttatatatataccaaagcaagagaacctattcacagaggagagctttttatactgcatatagatgatttatagaaatcctactttccattcttaggtagagtccagggttgacatagagattattttttggaggacaagagtggcacgattcttagatataagtgttaagaagtcttagttgaaaacctatacttttgtagagagtaaaattagcagatgcatctgagaaggcaaatatttttacattgttagtcatttaggctacttgacacttagttctcwttgcgattttataaactcaatggcttttttagcatttgagtataaattaatgataaatattatttgatcataaagtcttagattttatagaaaattagaataaggcaaattcacstcgaggaattcgtgtagtgatttgtagttacttgttgcctcactaagaagcgattagtaaatgtgtcttgttatgcaattattctctttttataggcctggcaaaaagcacgaagtgatgggtgggagcgagccttttgtgaaaagaattttctttcacaggctactatggaaataatcataggcatgagaacacagttgcttggtcaacttagagcatcaggtaaagtttttccctcaaagagcctatttaagttmctgagagtaccctgcccatatttcatastatttcttatgttaactgatgccatctattatttttatgacattatyatrttgtgtwtcttatattcatgcatgatttgtagacttcgatatgtcttcaacttttgcttgttgatgaaaaaatgctattgcaggaggtgtatttgagaaatctagggacagaatctatatgcttgtgatactgttggcaatgaacaatttgtattggttggcagagatcaatttagatcttatagttattttcttttatcaccattaatgaatacttatttagttctgtgaaatagaaattttaaaaaattgatatgaatgctgctcttcatatttttggaacacaaaaacagctagtaatacttgaagtcacctttttttttttttttttttgaagaggatgctagtattgctattaccttttagaattgcctttttgagtagcaaaaaaaaattgatgtggtagtcagaagaatagtaccagagcctggattcatgggttagctgaagtgccagagtaatataaggaatgaaccagaggacttaagagttgacttgaacataaggaaatatgaaggacttttgaaactcaagcaaaaattaccatatatttacttgacttcatctacagaattagtatctatcataaccaaaatgttgttaataacagtcagaagaatggtttgggtttccagctatgaatttagtttgtttctggcagcagattatgaagaactttattgcaagaatgtggatctaaaaaaatttaagccccaagtgattcttatacttaatctaacctgagcagatctacacttccctagaatgttggttctgtatctgttttagggtggggaggggtggttcatattttaaacaactttccagaggagattctattaattatcgtgaaatttgaatatcacaaaatttacatgagttgtacaagtttttggaaaaaatacacaaaagtatcttttgcacaatagaaaaattggtgtggtttttttcccctctaggttttgttagagcacgaggtggtggtgacattcgggacgttaacacaaactctgagaattgggctgtcgttaaagctgcattggtggcaggcatgtatcctaatttagtccacgtggacagagagaatctagtgttgacagggccaaaggagaaaaaagtacgatttcatcctgcttcagttctcagtcagcctcaatataaaaaggtaaaagattttgaatgctgttgggttttgaggtgaaactaatttaggtagttcactatcaatgaaaaatgctccaaatacctgcctgctttaagaaattaattagttatatatatatatatatatatatawhattaaatwttggaacaaaacttataaattttagagttggaaaargtaacatgttaagtaatgagtacttttgtacgaactacatgagcgatgacttgttttaatttttgcttacgtactaatatacatcatctatttcattgagagactttacattttaaaagtatttccaataaactaggtgataaacacaattaacaatttttaaaatttattttcttaatagattcctccagccaatggtcaagctgcagcaattaaggcactgcccacagattggcttatttatgatgaaatgaccagagcccatagaatagctaatattagatgttgttcagcagtgacgcctgtcactatattggtattctgtggaccagctagattggcaagtaatgctcttcaggaaccttcatcctttagaggtaaatgtattaaggaaataaaaatctatttgaaatgaattttttttttttaccaaataatgaaattattttactaaaccaaataatgaaattataaagatttatatagtagcagctctattttgatgtactaagactaattaggaaatactaaggtatactactgtttttgaaatttatttataaggtaacttgatgtttatttgtgcattttttattaatcttgctgttgggaagaaatttttcttttccacttgaatttaaatgatagtttaacgtaaataaaggtaattgtaaaagaaataatagccacccataatctcatttttctcatgctaacactttttaatgttatattttttctacatgtttacatattttaaattatttcacccaaactgttattttatattttgttattttcattacagagatatcaaaaatatttttagtattttatattaatgactgcaaaatagtatatcacattgaagtggcataatgcatttttttccttcaacttttattttaagttcaggggtacatgtgcaagatgtgcagttttgttgcataggtaaaggtgtgccatggtggtttgctgcacagatcatgacatcatgtatctatcaagcccagtgtccattagctattcttcctgatgttctccctaccctctaccacacacccccagtaggccccagtgtgtgttgttcccctgtctgtgtccatgtgttctcatcattcagctcccacttataagtgagaacatgcggtgtttggttttccattcctgcattagtttgctgaggataatggcttccaacttcagccatgtccctgcaaaggacatgatctgattcctttttatggctgcatagtatcccatggtgtatatgtaccatattttctttatctagcctaccattgatgggcatttgggttgattccatgtctttactattgtgaataatgctgcactgaacatacaaatgtacttatctttataatagaatgatttatattcctttgggtatttacccagaaatggtatttctgcctccaggtctttgaagaatcaccatgctgtctcccatggtggttgaattaatttacactagtgtaatttaattacacagtagtgtaaaagtgttcctttttctctacaacctcaccagcatgttgttttttgacttwttaataatagcaattctgatctcattgtggttttgaattgcattccagtaatgatcagtgacgttgagctttttttcatatgtttgttggccacatgtacatcttttgaaaagtgtctgttcgtgtcctttgcccactttttaatgggttgttttttcttgtaaatttgcttaagttccttgtatactctggatattagacctttgtcagatggatagattgcaaaaattttctcccattctgtaggttgtctgtttcctctgatgatagttgtttcttttgctgtgcagaaactttagtttaattagatcccatttgtcaatttttgcttttgctgcaattgcttttggcgtttttatcatgaaatctttgcctgtgcctatgtcctgaatggtattgcctagattttcttcgagggtttttatggtttagagttttacatttaagtctttaatccatcttgagttaatttttgtcgaaggtgttaggaaggggcccagtttcagttttctgcatatagctaaccagttctttcagcaccatttgttaaataaggagtcctttcctcattgcttgtttttgtcaggtttgttaaaaatcagacggttgtaagtgtgtggtcttatttctgagttctctattctgttccatcattctatgtgtttgttcttataccagtaccatgctgtcttggctactgtagccctgtagtatagcttgaagtcgggtagcgtgatgcctcagctttgttctttttgcttaggattgtcttggctatatggtctcttttggttccataagaattttgaaatcgtttcttctaagtctgtgaagactgtcagtataatgggaatagcattgaatctgtaaatttctctgggcagtatggccattttcatgatattgattgttcctatccatgagcatggaacgtttttccatttgtttatgtcctctctgatttctttgagcagtgatacgtagttctccttgaagaggtccttcacttcccttattagctgtattcctaggtattttattttactttattttattttatttcatttttttgagatggagtcttgctctgtcacccaggctggagtgcagtggcacaatctcagctcactgtaacctccgcctcctgggttcaagcaattctcctgcctgagactcctgagtagctgggattacaggcacgcaccacaattcctggctaatttttgtatttttactagagacagggtctcaccatgttgggcagggtgatcttgaactccagacctcaaggtgatccatctgcctgccttggcctcccaaagtgctgcaattacaggcgtgagctatcatgcttggccttttcctatgtattttatttttgttgcaattgtgaatgtgaattcattcatgatttggctctctgcttgcctgttgttggtatataggaatgctagcaatttttgcacattgattttatatcctgagactttgctgaagttgcttatcagcttaagaagcttttggactgagataatgggttttctagatgtagatcatatcaactacaaacaaagataatttgacttcctcttttcctatttgaatactctttatttctttattttgagatggagtctcactttgccgcccaggttggagtgcagcggtgtgatctcagctcactgcaacctccgccttctgggttcaagcaattctgctgcctcagcctccggagtagctrggattacagacgtctgccaccatactccactaattttttttgtatttttagtagatttggcatttcaccatgttggccaggcaggtctcaaactcctgacttcaagtgatctaccacytcggcctcccaatgtgctgggatyataggcatgagccactgcacccacccgacgtgaatactcttcatttttttctctggcctgatttccttggcctgaacttccaatcctatgttgaataagagtgatgagagaggacatccttgtactgtgacagttttcaaggagaatgcttcctgcttttgcccattcagtatgatactggctgtgggtttgtcataaatagctcttattattttgagatatgttccttyactacctagtttattgagtttttaacacgaagacatgttgaattttattgaaggccttttctgcatctattgagataatcatttggtttttgtctttagatctgtttatgtgatgaattatgtttattgatttgcatatgttgaaccagccttgcatcccagggatgaagccaacttgattgtggtggacaagcatttagatgtgctgctgtatttggtttgcccatattttattgagaatttttgcactgatattcatcagggatattggcctgaagttttcttttttgttgtatctctgtcaggctttggtatcagtatgatgctggtcttacagtatgagttatggaggagtccctccttttcagttgtttggaatagtttcaaaagaaagggtatcagctcttctatgtacttctggtagaattcagctgtaaatccatctggttgggcttttttggttggtaggctctttattactgcctcaatttccaaacttgttattggtctattcagggattcagcttctttctggttcagtctcaggagtatgtatgtgtccaggaatctacctctttcttctmgattttctagtttatttgcrtagaggtgtttatagtatcctttgatggtagtttgtattcccatggggtcagtggtgagatcccttgtatcatttttattgtgtctatttgattcttctctcttttcttctttattaatctagctagcagtctgttttattgatttttaaaaagaaccagctttttgatttgctgatttttttggagggtttttcctgtctctatcgccttcacttctgctctgatattagttatttcatgtcttctgctagcttgggtttgttttctctttgttctctaattttttaaattgagatgttaggtggttaacttgaaatctttctagctttctgatgtgttcatttagtgctrtgaatttcygtcttaacactactttagctgtgtcccagagattgtggtacattgtctctttgttctcattactttcaaataacttcttgatytctgccttaattttgttatttacccaagagtcattcaggagcaggttgttcagtttccatgtagttgtgtggttttgagtgaatgtcttagtcttgagttctaatttgattgtgctgtggtctgatagactgttatgattttacttcttttacatttactgaggagtgttttacttccagttatgtgatcaattttagaataaatgccatgtggcgatgagaagaatgtatattctcttgtttttgggtagagagttctgtagatatctmtcaggtccacttgatccagagctgagttcaggtcctgaatatctttgttaattttctgtcttgatgatctgtctaatgttgtctgtggggtgttaaagtctcccactattattgtatgggagtstaaatctctttgtaggtctctaagaacttgtttaatgaatctgggtgctcctgtattagcttgcatatatatttaggatcatgagttctttttgttgaattgagccctttaccactgtgtaatgcctttctttgatctttatggtttaaagtctgttttatcagaaactaggattgcaaccactgcctttttctgttttccatttgcttggtaaattttcctccatccctttcttttgagcctatgtgtggctttgcatgtgagatgggtcttttgaagacagcatactcgtgggtcttggctctttatccagtttgccattctgtgcctttcacttgggacatttaccccatttaccttyaatattacttttatggttatgtattgttatgtgtgaatttgattctgtcatgatgctagctggttattttgcagacttgtttatgtggttgcttcatagtgttactggtttgtgtacttccgtgtgtttttgtagtggctggtaatggatttttccctttcatatttagtgcttccttcaggagctcttgcaaggcaggcctggtggtgacatattccctcagcatttgcttgtctgaaaaggatcttatttctccttcacttataaagctyagtttggctggatatgaaattctgggttggaaattcttttctttaagagtgttgaatattggcccccaatctcttctggcttgtagggtttcctcttagaggtctactgttagtctgatgggcttccctttgtatgtaacctggcctttctctctggctgcccttaacattttttctttcctttagaccttggagaatctgatgatttttttgtcttggggttgatcttctcatggagtattatactagggttctctggatttcctgaatttgaatgttggcctgtcttgctaggttagggaagttctggatgatatcctgaagtatgttttccagcttggttctattctcttttatctttcagctaccccagtcagttataggttcagcctctttatataatcccatatttcttggaggttttgttcatttcttttttcattcttttttctctattcttgtctgcctgttttatgtcagaaagacggtcttcaagctctgagattctattctctgcttggtctgtgcttctgttgatacttgtgattgcattgtgaagttctcctgttgtgtttttcagctccgttaggtcggttatgttcttctctaaactggctattagctcctgtattgttttatcatgattcttagcttttttgcattgggttacaatatgcttctttagctcagcgaagtttgttattacccaccttctgaagcctacttctgtcattttagccatctcagcctcagcccagttctgtgcccttgctagagaggtatcacaatcatttggaggagaagaggcactctggctttttgagttttcagcatctttgcattatttctcacctttgcgggcttatctacctttgatctttgaggatgctgacctttgaatgaggtttttgtggagtcttttctgttgatgttgttgttgttttctgtttgtttttcttttagagtcaggccagtcttccatagggctgctgyggtttgctggggctccccaccagacctcagttgcctcagtttttcctgtacctggaggtatcaccagtgaagtctgcaaaacagcaaagatggaagccagctccttcctctggaagttctgtcctgggggttattggcctgttgctggcccacatgcatctstaggaggtgactggaagcccctgttctgaggtctcacccagtcaggaggaatgagatcagggacctgtacaaagaagcagtctggctgctttttgatacagcaggtgtgctgcattggtgggaacccttcctcatccagactgcctgtatagccatcaggctggagtggctgagtcaaccaaaccacaaagatagcagccacccctccccctgggaactcggccccatctcagacagaccaacccactgctgttggctggctggsatcccaagccagtaggtcataattggtgaggtgccatggaagtggatcccacagaatgatgctgcttggcttcctggattcagcccccttcctagggatatgtacaaacagatttcctgccttgctagggatcccagggccagagtatgtaaaactcctacgtttctgtgtgtgcctgagtggctgctctgccaacactccacacagatctgtggcatgggctcacaaagggatcccctgattcacaggttgcaaagatccatgggagaaatgtggtttcccgggaggggtcatataatcactcactgcttcccttggctgggggtgagggttccttttgctctgtgctgctcctgtgtgggctgtcgccttcacctacttttcttcattctccatgggttgatttgtatgtatgcctagtatgtccgaatgtgagaacctggatatttcagttgaagatgctgaattcattgtgccttttcattcttctttgtgagtgccrcagactgcagctgtttctaataagccatcttgattgatcccctggcataacacatttaaaatgttccttcatagttagacatcttgatgatttcaaattatttgctatttaatgattcagcaaatatttagtacctactatatgtcaggtactgtgctagacattgaaggtataacagtgtgtgtctgtccttaggaatttacacagtagtgagggtagacagacagtaaaaaataaataatctgcatgatactattaaggaaatacaaagaggatcgccttaggggtgacctacttgaaagaaagcctagacaygtttttctgagaagacttaaactgagacctacaatatgagaagagccagccacatgaaaagcagaaatgtgctgcaggtagagaaagagggaaagcaccaagattctgtgctaggaaattatctaggaattgacagaaaggctgtgtgattggagtgcactggtcaatggaagagggcaatgataaggttgaaaggaaagcaaggacttgtaggccatagaaatgcaaagaaaaggaagtcattaaaaggttttaagtaaaggaatgacatgatgtggtgtgttccaaaaggtcattttggctaaggggatgaattacaggagtaattacaagaatagaagagtggaggcaggtaggaggcttttgcagtggtcttctaacaagatgatggctcagataggatagtgatcgctgatatgaagagaagtagatataaaattattttgaaggtactagtaactgctagattgaatgtgggtagtaagggaaagggaggagtcaattctcagattttggttatagtagcttgtcactcatttgagattcagaaaacgaaggagcaagtcgtgtaggggagaaattaagggttctttttagacatgttaagtttgagatggctaagacactctaagtaaatttttttttaggaagcagttggatatgcatttttggagctcagggaagatgtctgggctagcaatacaaatttggaagtcatcagcttgtaaatgatatttatagacatgagaatggatttcttaaagagaatatataaatttgagtagtggaagagtgattcagtgttggaggcaaatctgtttcaagaaaggagtggttagctctattgaatgtgctttgagagactgagggcattaagtttgtatgaagagagtagaaatagtatgattgataatttatgagattatggggcattgctacattgacatcttcatcagtgtgtccttttgctttaattcatttaatattttcttcgtgataaaactctttgaagtgggaattacttgataaaaatgtatagatattattcatggttctttctccatactcaaccatattagcaccgttaagagtgaatttcatggcaactatgccatcatttggtgttggttttaaagataaaatatttaaagattccttcatttgctctttttatttctgtcaaaaagaaataactctccatgcatttctttatattgccctttagttgagttgtttttttcatcttctgcccatttatttgggtactgatattttactcaaaaatttgaatgatagcgttataatttaaagatgttattaatcttttttctgtcatgtttaagtcaatctattattcattttggtgttagtattttgagttctgagttttgattgctgtgtatttaaactgaataatcttttcctatactattcactttcaaagctgagaaaatttcatccctccattgatgtgataagtattgtttttgttttctataatttgatttttaatattttttataaccatgttgagttgattctggcctaaaacaaagatctaagtttttccaagtgctttcccctcatctgtacaatttattaaacagttcttatatatcctcctttagaaagcttgcatgattgcatggtaaatttggtatctttaacctttttgtatactctattcctttacatttctgcctttatattgcacctttttatttagtatttttatttattaataaattctaatatctggtagtagaagctctagctgtaactctttactgcctttctgttattgagctattgtttgataatcttacctatttttaaataatgaatattcattagtcatcttcttgtaatccttttgcaaacaacagttcttttgtgtttgtttgtttgtttgtttgtttgagacagagtcttggtctgtccctcaggctgaagtacagtggtgcaattacagcctactgcaatctctgtctcccaggctcaagtgatcctcccacctcagtctctcgagtagctgggactaaaggcacacaccaccatgcctggctaatgttcatattttttgtagagatggggttttgccatgttgcccaggctggtctcaaacttctgtgctcttacaatctgctcacctcggtctcccaaagtgttgggattacaggcgtgagccaccgcacctggcctcttttgtatattaatttaatgtttccatccaggaaatttagtatcttttaattagccataccttattttaaatttatcttaaaaaatatatatttttggtaacttttataaagtttggggatatttcctaaggtgattcttaagattcttttgttgctgtttttagttgtcatggtgaatggattctctttgtgtaattttcttgctgaactttagaaacattattgcagacattatatattttatgtaccttgttactttattaaactcattaatcctttggattttgtatttattgaattatattaccttcaggtggtaatacttccatttattaccaaaatgtattccttttatttctttctgaggatattagaaaactgaattaaggtccattttgtcttactgaattttaaaggttcaaattctaaagttatactattgattataatgttaattttaataaaagtgtcccttttaaataacggaatagtgtttgtgtgtgtgtatctgtgtgtgtgtgtgtgtttttgtttttaagagacagggtttcactctgttattccggatgtagtgcagtggtgcagtagtcatagctcactgtaaccctgaactccaaggctcaagtgatcctcccaccttagcctcctgagtagctgggactataggcatgagtcaccacacctggcatagaaggttttgttttgttttgttttgtttttttttttgtgtatgtgttaaaaatttgttgaatttactaaatagcatttgagcatttgttcatataatcagaaattatttagcctattgatgtggtatatagattttcttatggaactgctattttgttctgagaataaaccttccttggactaagtgtgatttattacattgctggatatttttctaacattttatttaaaacttatatttatcttcattggggaggctgacctgtagggtttgtgtggtgtgtgcttgtacatattccggtatgtaggttttaggtgttaatcaggttttgggttaggtttagatttgtctcattacaggaatgktcattatttgattccatgcaaaattgagagacttggtattctggatttctttgttgatgttctttaaggatatctctgatttcttccttaaatatatttgtgttcttctagttcctctactttcagttttagtaattttygtgtagaaaataattaatttctttgaagatttcaaatttattatttatacatactgtatgttttagcctatatcaatttcatattttataatgcattctgtatttttataatctcattttcacctaattttgtagatagatttttgctttcttcttcctttattaaatttacagagggttatctattaatattttcaaagaactgggttatagttttaattaccattttgtctttctaattcatctttttataattttctattttcttctacttttctttgggttttatgttatttttcttagatatatttagctgtatactttttctttttaaaactgacctgtgactttataagagtattgctttgggcacctttcatagtttttgatatgtagtatagtcattccttccttgaattatgttatttgtttctttttcatccagttattaaagattgtgcttcaaattttatattcttgtcttttttattttgttgcattgtgatgagacattatagtcttcaaatggtcccttttttttccttttaaataaatactgagatttaacatgtgatcttttgagtttgaaggacttcccacacaaattgttgtatgtcaggagggtttgtgtatatgaagcgtatttattcttcttagttttttgccataacgtaagaaggtaaaagtgatttttttttcattatgtacttggacagtggatggcattcccaatgacagtagtgatagtgaaatggaggacaaaactacagctaatttggcagccttgaaacttgatgagtggctccatttcacactggagccagaggtaagttgctttcaagtagtgtaataaatttctttcattcagttagtgtgaattgatatataatatgataaaatttttttctttactattgagcccttagtatcagagaatataacttgtttttcagttttcttggggacctcattcattctcttctgtattggggtttattccaacagaggacttggaaaacctagttgtggctcattatttaagcaaggtaattgtcttagtttgttgttgctgctatagtaatttataaagaacagaaatttatttctcacagttctgaaggatcttaagtctgagatcaaggtgctgacgtcggttgagggctgctggaccctgcctcctatagagtggaggaatactgtgtcctcatatggcaaaaggcagtagggcaagagggcatgaactccctccatcaagctcttttataaggatacctaatcccattcatgaagccagagccctcatgactcaatcacccctcaaaggccaacacctcccattactattgcattggaggttaagtttcaacatgaagttttggaggggacaaaaacttcaaactgtagcagtaatccttgagtatttctggatatataagaaagtattgagtattgggtacacaagaactccctttattttgtgtaactgtgttttctgagagaaagatatgattccatactattttctctttgcatatacttctgaattgggggtttgagggaggatgaatgtttcttttcaaattacaaattttcatgacaaagcctccccttgattctatctctactgtccaagatcattctctatacatttttgggaggcgtcaagctgtcartagttaacactggctaggtttactattttagcatccattcattcatcacttcaacctactacactctcacttccattcccaccaattcatcacttcactgaaactgtacttgccaaggtcaactgtgtccttcatgttgtcaaagtcagtctgctgtcygggataaatgtgacctctattatttatcactattgtccatatcctcctttttgtactcctgcccttccccagttttcttccttactcctgccccaaattctttgtcactagttactgtaacattaatctttcttaattctttctctgtagtcagtccttcttagttgtttcacagaccctgctgtgtgtgtttgtgcyttaaattttaagttctctagcactttgtgtcttactcttatcttcttactccctctatacattccctggggactttatctctatgtgtatattttgcaatcatttaggaactggtgactttcaagtttagagctctgtcttagacctttctrtgaatccagctgccttcaggacatgatcatttggatgttctacaggcactaaaataacactatgagctacatatatttttatttaccctgctgctacttttccartattaatcacactctgccacaactattgtttactgtctttcttattagactatttaatttgattttgtgtcttagtgcctaaaatattataaataaattttatttcattcatgcattaaaaataatgaaattagtagtaaattatatgaaatgtgaaataagtttgttggaaacagttgcaaactaatggaaactaatcaacacataggtgttttgcatatgtgatattcatttgcttgtatctatttgaactattacaggcagctagtttattgctgcagctcagacagaagtggcatagcttatttttacgccgaatgagagctccatctaaaccttggtctcaagttgatgaagctaccataagagcaattatagctgttttaagcactgaagaacagtctgcaggtttacaacaaccatckgggattggccaaaggccaaggcctatgtcttcagaagagcttcctttggcctcatcttggaggtcaaataatagtaggaaaagttcagcagatactgaattttctgatgagtgtactactgcagaaaggtaaatttatgacattttaccaaaatgggtcactttttattcaggaaaatgaattatttatcttagawtcatgtgcttttataatatttaaaaattacttttttataatctaagatccatgaaaagatagcaataaagtggaaagagttttctacttgttcaacttaattcttctaagtattaaggtaatatgaattttaaactattgatatctgtgagttatttartaaggcaactctttgtcaggaaaaggtcaaaatatctaatttctagaattgggtctctcaaaaatatatagacattttaaaattatgtattttacttgatatatgtgaagtaacattttacctagataccctgggccatactggctatggccatttaaaagaacaacctccttataagccttatctagatatcaatactgctgaytagcattcctatagaaaagtacttcactcagtgacacattgaatgccagttcttggtgtgagggatctagaagtgtacaaaacaggtaagatctcctccagaggatatacatttgattgaggggaggcatataataagtaaacaaatttactgtcatatgacaagatttctgttataatttagccaaattcttcttttcttcttttgcaattaaatgtggtggtgtttttgtttattttatgaatattaatgagataccgcatactgaattatttatgtaaaaaatatattttagtaatatgatagtggttacaataaatcattggccatgattcagaagtgtttctggttataaaaacatttgttagaatcaaatttaagttattttataatcaggttttcaccttgttaaaattcataacaaaaaacattcttggttatgaggctagttttggcaatactggtagaaaagtctctgtagtaagaatttgattttatagttaaactgaaaatagaaacaatggaaacataaaagatacgtaatgcttactgtttttcraggatcaggtggggtttttagtaccttttttgatcagatttttgcatatttgaatgaaatataaaggcttaatatcatttaagcctttaaagaggaataaaacattggtttccatgttcttcagatattacattttagtaataatttaaccagtttccaaggaaagcttgtaaaatgtgtgctgaacctttctttctggtctagaccctgctgagaaaaaggggaagactaagaagtaatttttttacttagatacaccgtactttttgaaaatattgttctagaattttcttgagcattagttatttaggatgtaggaatatatttccataggagttattctgtggtagagttattcctaaaccagcctatgaaaagttctgttagattcaagaaacgtgacatactaatatataatgcatgagtgtttcttgtatgctgattcaaaggaatcaataatttgagacaactgaggaaatgataattttattgggattggtaaccactttggttatgtaaggacaatgcactcattttaacagatgcatatttaaatatggaaggataaaatgacatgatgtgtgggatttacttttaaatatrtaagccaaaacagaaaggaagcaggaaagaaaaaacaaaataatgttagataaatcaactaggtgaaatgttcaaggaactaggtcagtggtactgtgagatgtcctacattctgaatttgtctctgtttttttcctggcactatttatttctataccctatgtatcttttattttttatttatttttatattttatttttgagacagtctcactgtgtcgcccaggctggagtgcagtggcacgatctcagctcactgcaacctctgcctcctgggttcaagcaatttcctgcctcagtctcctgagtagctggaattacaggtgcacgccaccacgcccggctaatttttgtatttttagtagagatggggtttcaccatgttagtcaggctggtctcgaacccctgacctcgtaatctgcccgcctcggcttcccaaagtgctgggattacaggcgtgagccactgcacccggactccataccctatgtatcttatataagctggtggttagctctcagggtttgatttgatccartgttttaacaagaatattttataggtggtgttgtgaactttatatkgcaatacatcaggaagtacttaatgtctgtcccagaaagacccatactttaagaaagattatgaaattcctgactgcgatgtttgtggcatttattcatagaattttagaatataaaaatcttggagtttagatataatccttttattttatttaacagataaggaaattaaagttccaataagttacgaggcttgctcaggatctcatacctagttagttgtaaatttagaactgccatagacatctatatttcctgaccttagtatttttaaataatattccataaatcataagatcattgggactttggattgaaatggcatctgctttgtattataaacttatacataactratctttgtatgacgaacttatatataactgatctttgcttcctccttcttgctcaagagtactgatgaaatctccatctccagcattacacccacctcagaagtacaaagatagaggaattttacatcctaaacgaggtactgaggaccgatcagatcagtcttctstgaaatctacagacagcagtagttacccaagtccttgtgctagtccttctcctccatcctcaggaaaggtaagagtatctgaaagaaaatgtagtaaggaacagatttgtagcacatgtaatcctaggtaaataaaattgtaaaacaattagagtacttttctaattgtggcctcttctagatgtaagttgaagctagcaaacttgatacagtttgagtaaattttaaagtttttcctgcatgccaaatatttctagttattaccatcttggggtattttrgaatgctttaaaactatagatcattcactactggcatgtaggtaggctgtttattatttctttcctatttctttcgaatcctttttttttttttttttttttgaggtggggtcccactcttttacccaggctggagtgctgtggtacaatcatatctactgcagccttgaactcctgggctcaagtgatcttcacacttcagcttttgagtagctgggaccacaggtgcatgccaccatgcccagctgattaaagaaaaattctttttttatagatggggatctccctttgttgcctcggttggcctcaaactcctgggctcaagtgatcttcccatctcagcctccgagtggcagggattacaggtgtgagccaccatgcccagccctttagaaacttttttgctaaaataaataacaaaaagattaatttaactttggtttataatttcagaatcgaaaacagtggtttctttctattgttaattggtttctacagtggttatattaaaaaaaaaacaagatgggatagggttaggaaggtaggagatgttgataagaaattgaaaactatctttaaaaaaacttgtaataagaataattttaaatgttcatgatgtgatgactttactgttttagtagctaagtatttgattaggggttatttagctgcatattgtattttggcgaatgtgcctgttgaaatactctttgttaaataagaggaaaataaatgtttttgtagatttgcattcttaggttttgaagttttttggtttatttatacacctttattaaggtgtaacttacaataaaattcaccagtttaaactgtataatttaatgaattttggcaaatgtatacaatcatgtaactataccacaatcatctacacatttccatcacccctactccctggtaacccactgttctgctctttgtcccttgagttttgccttttctagaatttcctgtaaatggaatcatatatatgtaacgttttgtgtctggcttatttcacttaatagaatccttttgaaatttctattaagtgaaataagccagacacaaaatgctacatacataagattcagtgtatcaacaatctatccatattgttgagtatattattagtttatctaattactgagtagtattccatttctagatagactatggttggtttttccattcatcagttgatggacatttgggttgtttgcactttttggctattatgaataaagttgctaacattgtactaactggtactaacattcaagtaaaatctttgtgtctaaatatgttttctattatttggcaaatccctaggattagtattgtttgagttgtttgataaatgtatatttagctttacaagaaactgtccaactgttttccaaaatgacagcactattttgcatttcctttaacaatcttaagagttccatttgctccatattcttgacaatatttggcattttagcttttgtaattttagccattccagttgggtatgtggtaataggccattatagttttaatttgtattttcccagttactaatgatgttgagcatcttttcatgtgcttattagccattgtgtatcatctttgtgaaatgtctgttcaaatcttagttcactttttgttgttggtttttgktgatttgtcatctttcactgagttgtaagagttttctgtatattctgggtacaaggcttaattattatatgttttgcatattttttctaacagtatgtggcttgtctttccatttccttaacagtgccttttgaagagcaaatgtttttaattttgatgsagtccatttcatcagctttttctattatgattagtatttktttgtgtactaagaaattttgtgtaccaaacccaagatcataattttctcctatgtttttasaagttttatagttggcaatcttacattttagatatatgatttattttaagttaattttcgtttatagtatgggtgagtcaagaattactcgttggcttttgcttatacaattgttccagtaccgtttgttaaaaccatttgtttttttccattgagttacactgacacctttgtcaaaaatcaactggccataaatatgtggtctacttattggactcttcagtttcattaatatctctctctctctctctatatatatatatatataatatataaatatatattatgtattcatatataatatataaatatatattatgtattcatatataatatataaatatatattatgtattcatatataatatataaatatatattatgtattcatatataatatataaatatatattatgtattcatatataatatataaatatatattatgtattcatatataatatataaatatatattatgtattcatatataatatataaatatatattatgtattcatatataatatataaatatatattatgtattcatatataatatataaatatatattatgtattcatatataatatataaatatatattatgtattcatatataatatataaatatatattatgtattaatatataatatgtatttatatattaatatattgtacatacataatatatagtatatttatatattaatataattaatatttatgacatattattatatatatatttgccagtggtacactgacattattttagtagctttatagtaagtcttgaaatcagttaatccttcaatcaattgtccttcaactttgtttatcttcttcaatattattttggctgttccaggtcctttgtactttcatataaactttaaagtcagctcatcagtttctgcagaaaaattttttggtattttgagtggaattgcattgaatctatagatcaatttaaagaaaatcaacaattaacacttcttagtcttctaatccataagcatagtatatctgttcattatttggatagtctttaatttctctcaacaatgttttataaatttcagagtacaagtattacaattttttgttaaatttctccctaagtatttaatgtttttgatactgttctttagaattttaattgcaggtattcattgttagtatatacaaatacatttgatatttgtatatctgccctgaatcctatgaccttatttcatttattaattctattagctttttatgccttctgataataaagataattttactcttttccttttcaatctgattgctgtttatttcttttttaccttatctctctggccagagcctccagcaaaatattgttcagtgttgagagccacatatctttcccttgatcttagggggaaagcattttttgtctgttagtatggtgaatttcattgcttgattttcttatgtttataccccacttggtcatggtgttatttttatatattgctggatataattttgttaaatgagggatctttgttcatgaggggtattattctgtagttcttttttcttatgtatctttgtatkgttttgatgtcagagtaatgccggcctcataagattagttgggaagtgtttgtcccacttcagtattttagaagagatgtgtagaattggtattatttcttccttgaatatttgatagaattcacttatgaagccatttatttatttatttatttatttatttatwttatttttttttgagacagagtctcactctgccacccaggctggagtgcagtggcgcgatctcggctcactacaagctcagcctcctgggttcacgccattttccttcctcagcctcctgagtagctgggattacaggcatgtgccaccatgcctggctaagtttttgtatttttcagtagagacagggtttcaccatgttggccaggctggtctcgaactcctgatctcaagtgatctgctcacctctgcctcccaaagtgctgggattgcaygcgtgagccaccatgcctggccaacagtgttcttttattttacactttactcctttatgttatattgttttcatacattttgtttttatataaatgctataatgtattgtttttactttacatagtcagttacctttatgaagatttcaaagtcagaaaaatatatttttacatttattattactaatcttgtgctcattatwcttttatgttaatacgaatgtccattttgtattatttacttctgcctgaagaacctcctttctgggactctggatacacagatgtaagaccatctcatatggttccacaggtcaccgatgttctcttcatttttttcagtcatttttctgtcttcatttcagatagttctactgttttgtctgtacgttcactgatgtttttatttagtgtctaatctgctgttctttccttctaatgtgtttttaaaggcagtattttcatctctagaagttcaagtcttttaaaaattaaaaaaaaaaaaaatatatatatatatatatatatatgtatatatatcttctggcccggcgtggtttatgtctgtaatcccagtggtttaggaggccaggttgggatgatagcttgaggctaggagtttgagaacaacctgggcaacataggaagaccctatcatctctacaaaagaataaaaaaattagttgggcatggtgatgggccacctgtattcctagctactggggaggctgaggcaggaggatcacatgaacccaggaatttgattttatagtgagctgtgattgtgccactgcattccagcctgtatgacagagtgagaccctgtccccctaaaaaaarttaataatatcttccatttctcctctcattatgttcaagttttcctctaccttcttggacataatgaatgtatttataacagatgctttaacattcttgtctcctaattacatcarctctgtcatctctgagactgtttctgtttattacttttggcatttttttcttttacttttctttctgttttgtcttcttgttatccagtgctttgtctgtggagaaaatgcaagtacaaattttatattccatatgcacatgagaaacgggttcagatttgtaaagagctagtaaaaatctacttgtaaatgtgtctgattgctcattgcaatcagagtctcaagatgacaacagtatttaacttctcttcagccttaattatgtaaataacaacctttgtatattctttgtgtttcttataattttgttgggcagctaggtttttgtatattcctttcaatagcgttagactttgttgtgatgcacagtttagttgcaatcagttgaatccttttgaagtttgcttttaagtaatgttaggaatgggccagagcagtctttattctgttattaatttagttccaatactaaggtatggcccttctgtgggccagtaccatatatattacaggttctatctgttctggctgaagataacacgaaatattcccagccatgagtgagctctaggaattgtttggtctacttgttttcctttggatctttccctagccttgggttattyatcttttttctcactcatgttcaggtcagcacttagccaaaaacttgtgggaacccctctgtgtttcctttggagctctctttatgtgcagctcctttctgtctaagatagtacattgccatgcacagtagccacttcggtctctgaactccagtgtctttctgcacaacttaatgagaccactggactctgtttttctttgtcctctgaaaactgcctccaggcagtaagctggagaagtatttgttttgttttctgattttgaaagtttattaaaacaatttctgaaagtatatttgaggtataaaccaaagttggtactccaggagcctttgttgataagggattttgaatgctctgaaaatgagtacttgtttttggctaactttattttggttgagtcttgtgtaggtttcagacatgatagagctatttgcatttgttgaatatatgataaaatattttggcttatatgtttatgaagatgttatttaatggagcctcttggttttgaaaggtcaggttacctttcaagaacttatgttttcttttatagggctcaaaatctccttcrccaagaccaaacatgcctgttcgatacttcataatgaagagtagcaatttgagaaaccttgaaatttctcaacagaagggtatctggtctacaactcctagtaatgaacggaagctaaatcgagccttttgggaaagcagcatagtttacttggtattttctgttcaaggatctggacatttccaggtgagccaccctgaatcagtaaaatggggttgttctggctntaggttaaatcatagagatttttagaaaaacaactggcttttcattgcatcagaatgcaagaatgccttttgcttgactgagaataagggatatattgcatctctttagaggatgatagaactggaatcctctttgtttttgccttgtcttaccagagtctttccaggtaaactatgtttccttctgaagacaactttagatttactaattctcaagtggattcaaagtaatgagaagcttgaccttttggtaaaatatttatttaaataggccaaggaagttagtattgacaatcagtaaactaagtatgtttcttaacccatcacccatcttgacttaatgtatacctgaatttataaaataatacatttattatttgatgtttattataatttttggaaatgaaagcttagaggttagcttgtatccatttatcatggaataaaaatatggactttgctattttatttagaaatcattattgatatttgaaattgttaggaggctagaactgtttttttctaaaatttgctaagagagcttttaatgaaaaatttagtagcttattttttgtttttgttaggtatctgttatttcaatattatatcttaatcttaaaattttaaaaactcagccttctcagataaattaaatttagacatgctaatctcctcctcacctctattccttcctcccattttamctacagggattttctaggatgtcttctgagattggaagggaaaagagtcaggactggggctctgctggactaggaggagtatttaaggtggagtggatacgaaaagaaagccttccctttcaatttgcacaccatttactcaatccatggaatgacaacaagaaagtgcagataagcagggatgggcaggtatacaatggcatttttttttttwtttacttttgtttctgtttgttttctgttatccagtgctttaattgaggagaaaatgtaagagtacaaattttatattccatatgcacatgggaaacaggggttcaggtttgtaaaaagatagtaaaaacctacttgtaaatgtgtctgattgctccttgcagtcagagtctcaagatgacaatagtatttaacttctctttggctttaattatgtaaagtaaataacctttttatattctagtggcttgtttatttctattgtgttttgctttgtcttcatgatgctatttacatgcattttaagctagttaagatgatggaaattaatgtatattgaccaaatactatgctagctgctttagaagatataatttatttcttatgattaaattattagtccaattttatataggagaaaatagactcaaagattagttttgcctaaggtcacacagctaataatttatctgaaccagtatgactcgtttcaaatcaccatgtaaaaagtgtttgggttcttcttaagtgcttatcataggttatcattccacaggagtactatgaagtgggattcttttcaattgtgtgagaataatttcatttttattctataataatgattttgaagaaatatgttagctagaaatcttagaagaaaaaatattttaataattttcaagataagaagatatagttgcttaagagagttccttggaaaaaaacccaacatcgaatatgctaggtttcacagtaaacctttggaagttccagctgagtgcttttgctgaatctctatgaaaaacaaaatccattatttttaggtagaaacagttccaggactccatgggaatctgttgccattttgtcacaaaagttsagagattttgcagattaactgtaatcttaaatctggaagtcaactccataaaccttaaagcaaagaattagaacaattcataccanatgattttagcatacgctggtaggaaaatgaaatttaaagtgattttcttacatttttatcagtgtaggttttggtcattaaaaattttcactccagttctttttatgtttattttgacttctgatttatctaggaactagaacctcwggttggtgaacagttgctccagttatgggaacgtcttcccttgggagaaaaaaacacaactgattgacactcaggttataccatcttgactttgagtattggcagtatttgtgatcattaggaacctttcagattatttatctttttttttcccctttcttctagaactcttagctgtggaagaacatcatgcctatttataaccactgaatgcactgactttcaaaaactgaggtggggtgtgtgttacgaatgggctttttaacacttttagagtgttgctttagaactaccatcttcatatacaggagaaaggaagcatttaaatttttatagtgattatagagaatgattatatgatgtttgtaatgaataaaatagtagtttcattatttggcacaatagcagtttattttaaacaaacaatttgaagttaaacatttcatttttaaaaacactgaattacagttcttattgatgactttttaatgcagagtaagttgtttaagaaaggcctgaatatatcagaacatctgagcaccattttagaagagtcaactcttaagattatcattagaaaacaaatacgtcaacacctatgaaaagaagcggggaaaacaacaacaaggacaacaacaaaaaaccagtgaaattctacaagtgtcccttttaaaaatagtrtgtgctaactaagggctattcattctgccatttttaacttgagacacatttaagaataaagttggatgttctttttctgtgattatgaaatgcaataaaatctgaataaagggcaaagtttcttcctgatcagattagattaagtgcttagttttattcctaattctgccccttttaacctgatgtgtaccttactctttcctccctctcttcctcccttcctcctctccccrctcctttcctgcatttctccctccctccttccctcgtcacatctcttatatgagcacagtaattatgacctttttgttttggctacaacttgattgaaacaagttcaaaatttaaacaagttcatacaagtttttaaaaattctcaactggtagcttgcttgctgtgcgtcttccaaactaaagcctgcaagcgccacaattctaagtgccgccttccattttttttcagtatgttttcactggcttatgttttcagatatgattttcctttttcgcatatatggtttaataaatgggggataattttttttttgtaaatccgtgcttgtgccaagtctcatatttctttgccatctcagaattatctttttaccaccactgtttataaaatttccttagagactttttgaagggaaaatagagcaacagggaaaaatgaaagaaatgtcttggttactgagctctaaatagacaggtttgatggcacttctcatgatacattttagttattcttataaaagcaaacaggcaaacatgagtgtaaattaaagacaaaaagaaaactctggttttatatttgagaacacgtgaaaaatcatgggtcaacataaaatcttgagaaccttctactttctctgggaaagcattatatagtggtgcattagtttagaaagtcagctatgattttgcctatagttctagttattagctttggggttttcttgtactttaagacatacctgtaaattgaacctatttgaattatattccactgtatgtgtattatggctsttttcctattagagcaacttgtgtttccctgataatgtgtacattttttaggcatgtacttaatagttcacaatgttctaaatttggaaggacttaaaaaaaaaacttgtttaaatttccatctgttttgtaatatctagctctatatgkaaatgatgggtttgttggtatttaaaatgaatacaacttgaatgtaattaaagtgctgttttttggaagcgataaactttaratatacttattaaaatgaaattctattaagtttttcagatcttatttcttatactttataataagactaagttaacaatgatcaacaatatcccctgagataataatgaatttcaaacaccttgaagaatactaaattgatatagaaggtgatggtttgtattgaaactcccttccctgtaaattgccttatttcaataggagatggcaaaaatctcttttgtttagtataaaatattttaaatattaataaaatatacaaaaataggaaacttaaactatattaaaacatttctaaatattatgaatagtaccttgtacttaaatgttagtatttttctaactttattcacaaagttcttgtctaaacatccaggagaaagttagttatagtataatatctttttttttaatagtacaatatcttggtagctaacactactttttctgaacaatttagttcttttctgtcagctaatgtttcctttctttcagctaatgaagccatccattcagaaaaggtggagcagctgctgttttacccagacatttctttgtagaaaatggtagtagcatcttagatacttggcttccatcagtcctttcatctcccagagaattttaatatttgctttcactaattctctggaagcagtttgttgtcttttttttttttttttttaaaggcaaggtctcgctctgtcacccaggctgtagtgctgtggtgagatcacagctcactacagcctcagtctcctgggctcaaccaatcctcccacctcagcctcccaagtagctgggacatgccaccataccatgcctggctaaattttttttttttttttttttttttaaggagacaaggtctcgcaatattacccagactggtctcaaactcctgggctcaagtgattctctggcctcagcctcccaaagtgctgggtttacacgcgtgagccactgtgcttggccacattgtcctttatttataataaatatttaatatcacagtgacatactaagatataacaggtacatttcttgctgtccaggaggagcttcttttgagtaataattttatttaaagttgtgagtaacaattttatttaaaattgtaacaattttcacttttatagtacaattgttatagacaagggttaaggtatttaagaggaggataatcattgaggtcttcatggtagagctgcatttgagcatgcctttcagaagagaatttttaaatggattgggacaaagttaaaactagtgaagagctggaaaaggacaaggtgtatttgggaatatataattcacagtagctacctggtaaggttttgtgtaagagttttacaatgtgaaatatagagtgtttaagaaaagctaagaagtgataattgaatcaagtggaacttgagctttaatatgcagatggggtggctgttaaaaatacttccttggcctaggcacagggtctgatcaataggtcattagttttgtaataggcctcaagaatcttcatgtttagtacatcaactactgtcaattcaaatggacaatactgaaacagattgataaagaaactgtgttttaaagttcatgtggcatcaacacaaaatattcacattttgtattttatgcaataaaaggtgattggagtaccaaaagtagagatatataataaaggatttaccttgttgcaagatacaatgtgttatatcaagaaatagctttagatttaaggttacaatacctgcatttgaggccagcctccaacactagatgtgaaaatagcaaatcacttaacttttctgacttctaatttccatgtttgaaaagtgaaaatagtatttatctatcttagaagacaattagaagtgtcaaatgagagtgcttggaaaggtatgaatgctatacaaatataaacagtattatctgcctaatagtgtccagcacagagtgggcactcaagtatggtagatccctaatgtatatttattcatacctttttctctactaagttcaaagccagttgagaaataagtaggaaggggactgaaatattagttttattgctaatgaagttgaagatcatggctcagattcatggccacacaaaatttctaaatgcaaactattcctcattcattggacttaatcctatggtcataagcctcacctataggaacaggccacatatccagttgttgaggaagagaacatgtgcatcttgagaccatgagacccaaaaaggaaaatccgggaaggaagaatttgagaatactcagtcccttcagaaatcagtaagacgatgtcacttctgctggagggaaggaaacaagggcagaagtgctcttctcattattctgtatgggcaagtgttactttatagtgcaagcaggaactttgcggaaggagagcatgtatttttcctcaggagacacaaggcaaagaaaggcagaaacaatcgtccatgaagtagaagaataccagagtaaccaaccctgaggataagggagcaaactgatggagttgatcctgtcacgttgcagcactggttttgcaaagatgttttatctgagaagagatgtctgtagattcagtaattttggatgttaagctgaagtgtcttctgatgatgaaaccgctaaatatgcctattaatccatttatgctggaggttggaatttttttgtgtgaaaaatcagaacttggcgatgaccttgagcagtagtgtataaataactcccacatgcttagcgttccaataatggaacactaggcataaagggattaagaagcttggcttaatctgagttacttgtgtatttaatgaatactcaaagaccatgtctgttccttcagtttctaagaaaagaagaaagaatgacttaatgggttattttgggaggatggactgagtgtgctcagtttaactcttcctgaattctccatctgtgtactttttctttaggcaactgacaatttctttagaggaaatgcatattctaacttaaaatgaaagagggaaataatttatatgctaatatcctcgtcccagaacttttttgcatgatattcaagccgtttgagcatagtatgctaatagagataagctcttgcagatatattcttcagtttttcctccctctatatcatatacatatcctaatctacttatataaattaagtcaagacaacactttaacatgcacattgaaattcagtgaatattttcaaatattctgctatgaagttgaaagtcaagagtttataagattatcaatgtatttgacacaaattcagagagttctcatttagccaattggaaaaaaaaaaccctttaattttattaatcaaaatgagaaaatcaagcctagaataatacaactatatactcacatacctgtgcatatattgtatgcacatgtggtagaaacaggcttttgggtttatgttcatagtaacaaaaaagcaaatgccatttattccattctattgcagtcagtcagtatcggaaattagctttcaatttagtatacggtaagttttcctaagttagctgtgcagaatcttttggttattatatgaaacagtttcttcatatttttaattagctttgagacacaaaaatccactgtgcacttataagaaaatactgatatttaggaaattaaaatatatttccttagagattatataagtgaatggatgaatagagaaaatgtttattatatcaaaactttctgtgaggtggattattttaaactaggctgattttgactcggcagcttaacaactaatggtaagacggaaaaacacaaaatagtacagaaattgctgttcttagtaatttctcaagataatatttcctaacttcctgtcattctgaaagaatatgtagtggcaaaacaattactctgattatataatgaaatcacagaggcttcaaaaaagcattgttccccatgcctcactgcccactccctcaccccccaatacatggccaacttacaatgatgatatatatttaaattatttctatgtccactgtacacagttatgaatctaagatttgactaattcttattctctaatttgtgaattttttttttaatgggatctcactctgtcacccaggctggagtgcagtggcacgatcatggctcactgtagccttgacttcctgggcttaagtgatcctcccacctcagcctcccaggtagctgagacttcaggcatgtgcaccatgcccagctaatttttgtatttcttgtagagacaaggttttgtcatgttgcccaagctggtctcaaacacctaggcccaatcagtcttccctccttggcctcccaaagtgctgcaattacaggcttgaaccaccatgcccagctaatttgtgatttttcacatcaaacatcaatgcacaaaaagagaaagtagtcaaatcctattttcttgaatgatatctttgtcatagtttttccaaatactatatagtttttagcatattgaatataccttctcaaagatgctgtggactaaatacaacactacttagaaaacggagatgaggccgggtgtggtggctcacatctgtaatcccagcactctgggaggccaaggcgagcagatgacgaggtcaggggttcaagaccagcctggccaatatggtgaaaccccatctctactaaaaatacaaaaattagctgggtgtggtggctcatacctgtagtcccagctacttgggaggctgaggtagaagaatcacttgaacctgggaggcagaggttgcagtgagccgagatcgtgccactgcattccagcctgggcaacagagcgagactccatctcaaaaaaaataaaaaatggcagatgaatgtaatatgaaggaatattagaagctttcatttctagacattcccttgtttacttattctgaagcctacagattcattatgggaaatctattcccttggatctagtattgagtcattgtattttgatctcttgagaagagttgtatatagatttgttagttaacaacctagtcggaagatatttgggtttgggatttgggatgggattaggctgtgaaacagagctatacatatataatgtgtttatgtataaacctggaatctaaaatagtactattgttaatttctatttgggggaatgggaagggccagaaggagacatcttgtgacgtttttatttcataatatgcacataaagatttgcagctggagctgatgtcagatttcattgctatttccactctttggcttcttaaatcaagaacttaattttcataatttgtcagttgccattatttttcattttatctggtactttgtctaaaactgttcttcagtgagtttgtatatttcccacccctatccacaattcgtatttgttccttctgattctctgggcagcttagattacagcagccttgtatctactgacaccttttattcactgaacgactcagcctgactctaaaaactacagcaaagataaacaatgagaaaagaataatcttgaatgagtactataaggaaagacatattcatttaagaatttgtttttagagatgcattcttcaccatttaaaatcttatatcctgagacagagaaagtcttgatgaataaatcaaataaacttcactcctgaataaaagaccgcaactgaacaggtaacttacaagtgactacaaccttttagttctggtgtggaatgagcttcccagaacacagattccccattctgctccagaactctccacagttaaccaaaaggaccacacagcgcagtcagtatgcctaaggccactggatgcaccttgatctttccagccaaatgtaaaatcttcatttggctgttagaatctcaaacagcatattcacaattgaactattctttcccccgtcctgatttacccaaagctgtcctccctttaactgatgctggtttaaatcttttggttgctcaggccagaaaacttgaagtcatcctggactcctttt

SEQ ID NO: 94738 - DNA, 64089 bp, Homo sapiens
caacaggctctgggccacttctacatatcccacataggtaagaaagagttagaattggtgttcatttagtaatttaattgctgcatgtttatattttatgcacttactatatgtaaattatatttttcatatatatatgaaaatataatatgtaagtgtgtataatatataaatgttttttacctaaatcttttttatataaatatataacatatttatataatatataaggatatataatatctataaatatacatattttttcatatatatatgaaaaatatatatatatatttgcctttcaggtcacttttatttaaaaataaacagtagataaaagtaaaagtaggtcgggtgcagtggcttacgcctgtaatcccagcactttgggaggccaaggaggacggatcacgaagtcaggagtttgagaccagcctcgccaacatagtgaaaccccatctctactaaaaatacaaaaaaaattagccaggcatggtggtgtgcacctgtagtcccaggtacttgggaggctgaggcaggtagaatcacttgaacttgggaggcagaggttatggtgagccgagatcgtgccacctgggtaacagtgagactccgtctcaaaaaaataaataaataaataaagtaaaagtagtacctgatgccctattagatattacattcatgttagtagatgccattttctgcctttttcacattaatatttatttttataaggagagtagtattgaaaaagaatgaatgaaagatcgatagattaataagtagattaactgattggtttgtctgtcaatcagtttgagagctagagctagaaataaaaccttaatgagggttgcaaacctacatgcccatatgaaccagccaaacaacatgcagggtaggttatatatatattttaaagttagcacttaatcagatagggtttttttctttttaatttcctacatatttacaattgcttttctctttttctccttagggctattccaacctggagacaaggaatacagagaagagtatgagataatcaaattgctactcagttgataagaatgttaacatactaagttataccagggagagagtgactaaccacattctttaaatatcaatagcttagtcagattgattattgtgctatattgtgaattgagaggtattaagtttcatgaggctttgtcattagtattcctgcttctaccaagaaggtatttaatatatgtgttggcctattattgatgtaaaagttatttaaataagttaatgttagaaacattattcaatttaaatactgaaaacatttcaaagagattttgtttttgttatagcatagcaaagtaaattggaacaatcatacaatgacattttttaaaccaaaattttgtaacttttataacttggagttaagttagcttgagtaacaaaaaggtaaagtggtttttgtttagagttacgaaatgttagtactttttctatgtttaacaaattggcagtttgtcagttatgacatttttgtgtaataaatattttgtatttgtttgaagcatgctttgttttatatagagaatatttattttaaaaatatgtctctcatataccctattaattgtattattgatataatctttttggtttccttcagcaattccaaattttccttcagcctttctggatttcacagatttataaaatctttgtgtctttcacatcttcctggctaatgcagttttcttttctgcttctgtttgcctcaaaataggaaaattctttgttctgaaacatcatctgaaataagccagctttaaaatactgtgatttctcttgatggcacttaaaatgttttaggtggggcatggtggctcatgcttgtaatcccagcactttcagaggtcaaggtaggagaattgaggcctggagtttgacactagcctgggcaacacagggagaccctgtctctacagaaaaaaaaaaaaaaagtttaattaactgggtatggtggcacacacctgtagtcccagctacttgggaggataaggtgggaggatcacttgaacccaggagttccaggttgcagtgagctacgatggcaccactctactccagcctgggtgagagagagaccctgtctctaaaatgaatgaatgaaggaatgaatgaataagatcttttaaagctgttagattaacatatttgggcaagagttagttcttaaatttctaaacttttagacatgaaaacacaatgtaattgaatacagttcaacttttcatattataaaatattcctttctaacgttatttaatttgttctcataggaaagatactatatacataaaaacacaggaaatttatctcttataaatctttttttatcttaatctttcattgtttatctttatctttcattgttaatgggatgcatttaggttaaatgactcagttagaaaggtactatgagtagcggtgaaaatcttttcttattttacagttaatattcaaaatagatggcttccaaattttagaaactgaattctgatttgtacagttattggtgcagaatgagaaaattgacataaaagatccttaaacaggagtgctgattttgttatccaaaacttttttgtaatgatttgaagtagttcagagataaaatatagaggctgggtgcagtggctcaggcttgtaatcccagcactttgggaggccaaggtgggcgtatcacttgaggtcaggaattcaagaccagcctggccaacatggtaaaaccccatctctactaaaaatacaaaaattagcctggtgtggtagttcacgcctgtactcccagctacttgggaggctgaggcaggagaatcgcttgaacccgggaggcggaggttgcagtgagctgagattgtgccactgtactccagcctgggcaacagagtgagactccatctcaaaaaataaatacataaataaaacacagagcaagatgaggaaattaaaagcagaactgagaagctacaagatacagaaaatgtttcttacatattgcttttttacgtgttgctttttgttgcaccgaaatgcagctttcaaattcctgtatccaaggtaagcattctggatgatgtgattcttatggctttgtttttttattttttttttaaataaagaaaagtatggaagttcctctgaagaaatcagtttttctagctgaatctgaaataaatgatgaatttattatatagatcctttatataaaagatgtaagataaacaaatatcttcagttacagacttcatagaagttacaggttcataaacaagatgtcaaataaatatttcttatactggtttaaaaagtacattagctttttctctgagaaaacaccaaatcgcggatgatgccggtgcagcgggggacctgggaggcccggaggcccggggggctctgggatggggaactggggtctcagccggccctgggatggggaactcgtgtcgcggccatggacggggccggggccagctgcagagctcgtggaggcaagaccaaggacaaggagtagatggttgtcaccaagctgggctgcctggtcaaggacatgaagattaagtccctggagtagatctatctcttctctctgcccatcaaggagtctgtgatcattgactttttcctggggcctctctcaagaaggaggttttgaagacgtgccagtgcagaagcagacctgcaccggccagaacaccaggttcaaggcgtttgttgccatcagggacagtggccacactgatctgggtgttaagtgctccaaggaggtggccactgccatctgcggggccatcatcctggccaagctctccgttgtgcccatgcgcagaggctactgggggaacaagatcggcaagccccacaccatcccttgcaaggtgacaggctgccacggctctgtgctggcgcgggtcatccctgcgcccaggagcactggcatcgtctcggcccccatggccaagaagctgctgctgatggcagctatcaatgactgctacacctcagccaggggctgcactgccatcctgggcaacttcgtcatggtcattttttatgccatctctaaggtctacagcaggctgaaccctgacctctggaaggagactgtattcaccaagtctccctatcaggaattcactgaccacctcctcaagacccacaccagagtctccgtgcagaggacccaggctccagcggtggctacaacatcgggttgtacaagaaaaataaaatgaagtaagcctggaaacaaaaaaactacattaataagaaacatagaaaaaacactaaagaagaaatgttataaagtacccataattccagggtaactttttcaaaaaacatacctacatatttttaaattgttacagtcatacagtacatattaattactatgctataattgcattacacattttcgtacatttctacctaattcaaacattatcatgtaatggctaaataacactcaattatatagatgttctatcattcccattctgttatgcacatgccaaaaatcttgtagggataaaatcactcatggaaagccttttaccgacctaggaggcattctgtattatctctgaatgagtcccacattgcaaatttttcctctagatttggatcagattgctagtccttgagctgagaatcagatgaaacatttggcttccctaacttaagggccatgtttattagaattaattttctgagaatgtatagagtgtccatagctgattccagtaagttaaatgtgtataagactccactttaaaaatcttcaggcatttgggggtatgtgtgctaagtgagagatcttaattttaataacagtggaaactccagactgggcacacctgaagggcaaggactgtgagctccgtatttgtagggaagtaccgaggacagcctagaatccgtctgtggctgttaaatgcggcattttgtaaagacatgcaggaatacctgtgaataagtagttaatagtaccaaaaattattcagagcactttggattgttgaataagtgtaagattaccccagcccatagagtataagaattacattttctaagaaagctaacaaaattaaacccaaaattttattagctaagttgatcacagggaacctagtttagttatattattgggtggatccccccacccgctactcaggaatgcctcatgaaagtttaaagggcatagtataccggctaaacaacttaaatccctatttttggaaaaaagaactagaagcatgtttaaattttttagaatgcaggtaattggagaagatattgagcttattttgctgttgcagattgatgcaccattgattcttgataacacgtcgactcaagcaaagtaaaatctgtaagatttgtaaaagaatgacgcaagcagtcatatataggtatgaatatgcatgttgtatatgtttgggggcattatacacagatttttaagtgattcctggtatccagaaaggattaagattaggaaagtctctgagcttttgtagtgtcaataaacatttatctccactggtttgtttttctgtttccctaaccgttcggcttaaaactggccctccaaaaatgaatctgttagcaagtttatactgatccatcctcgttttcagatataccatcctcaggttctacagagccagaattgtctcaaagcgtacttgatgcttttgaccttgcgcttcccaagataaaaattctgacggagggatttgtggacttgattttcacaaggcctgcgaggtgtttacaagcctcgagggctttgagtagaaaaggtagggtcatgcgctagctagggagatatcggagagaggaagtgctgcacaggacccagatgatagcggtttcaaatactggcttagtctgcggcgggcgcaggtcccctcacccggcaccctgtggttcagcacaggagggttctttctctccgcgggcactgattccgggtcgcggcggacgtcgcttccggagcagcatggcggccactgaggatgagaggctagcagggagcggtgagggagagcggctggatttcttacgggatcggcacgtgcgatttttccagcgctgcctccaggttttgccggagcgctattcttcactcgagacaagcaggtaactcgtggcacagtcagccaggctggcacaaggcccgkgctccagcggaaaggcgcggcggagtcggaccgcaaactgggcgccggaagggggctgcgcggccgcccagttggcactgactggtttcaagtgggcttgaggttacccccactctcccgccgtacggtgggaaggtctggaaggctgtaggtcgagggctgtrgcatctccagtttccggctttttcacttcccttttcttctggcaactctgagctgcttttttacccgctcccatagcctgtcactttgcctcattacttccgagtgtaaaaggaaaaggacaaagtttgtcgtcgtatttttagatgaatacttctgtgcatccttgtcctctctaaagtcattaactcttaatagagtgtctgtatggtgttttatgtgtaggagcggcagagaacctctaaggtcttagaaactttgtgggaactataaatctaatggtaggcgaaagaggtgtggtgttgcgtgaagcagcctgttaaaagtatcgcaatagctgaagagtgtggtgcggcagagactaagcgacttcatttacagtaaaagctggggatgagaagaaagaaaggagaaggcaatctttgctccgcattgctgtgttttgaagtgaagctcaaaagctgcttgagactggatgggaggaaagagcggcttgtttttgctgtgttctttccccacgttttccaaattctgagttgctggtgtattttgaacactgcatgaccggatcagtttggggagctttgcagattacttctgcacacttggtcaagaaccacattatggtaggtgccagagtacagctgaacaagacaagcatttgtatagagttctgtgctatatgttagtgtagtgttcataggagtatatagacaggcatgtacataatccagatatctttagagaggccttccttaaacacccttcctaaagggaccacttccaatgaccacctcacattacgtatgtattggtttatttgtttaatgtctttctattacactggattataaacttcacaaaggtaacattttcgtctatcttgtttacctctatacttaggactgggctgccctgtccaatctggtagccactagccacatttggctattttgatttgaattaattaaatcaaattaaaaattaagtgattcttttggtagtagccaccacatttcaagtacccagttgccatattggccagtggcaattgtttctatttcaacatttgcaacagcttagtccttttggtcaacattgcactaggaccttaaatagtacctggtatctgagaagcactaagaaatatttgttgaataatgtgagctgagccctgaaggatgaacagattctcacaaaagaaagagtgaaacgtttatattccttcctcctctcataggtgttgatcgattagcagagcctataccttcactgaaagattcagatttccaaaccgaaaggttatgattgtagtgatatgagatgttttaaaatgttgataaattgtttatatcttaatagggattaattttatgtgaattcaaagcttttagataaaaagtcttccatcctgtttttgttattgatacataatgtgcatatttatcgtatacatacactgcttagatagatgcagtgtataagtcctgtgagctgattaaattgtgattgttaaacagttgaactttgcttgcagctatcactataagtctgtgatttaattttcaaaatgccaatgtgtttggcctgttttataaaattccagcttggacaaatccatatagaataatgcacattggcattaaactgtgtaattctgttcacagcataagtaaaacagcacaaattttctgacttatttaactttagtatgagcataggatcgacaccaggtgttatataacaccttggtgcattggttaagcaatattgtatccttttttgtctaatgtttgtcatatgaatagaatttttacatcattttggttttcttatagcctagttaaccgcatttaagataactgcatatgtcagtttctgtagtgattttaagtttttctctttcctaactcacagactttattttctttagcactaagttcttttgtggtgcatgtgattcataactgactttaaaatgcttgtgaagaaactccaaccttttcagcaaaggtgaccggtcacaaagtttctgctgatctttaagacaaaacagtacattgggcaagccacaactcttacctggtattgcagttaaattccacagtcattcatagagtgcctccccatgtgtctaggtacaggtatacagtgttaaactaatgattcaggtgttcctctgttcgtttctttttaccaataggtatgaaaaagctttgagaaggctaatattagactggatatttagacacttattttcagattcaccattttggcaaaattactcttattttcytgtttcttttagcctgaccaataggaataatttttacttttctagtgacaatgactttatgaaaataaagagtgtattgtctgcggtttcatcagagatttttcttttatattgacttcttaaaatgatagttactagtttataatccaagtgaatattaaatcttgggttgggagctttatcaattaccaggtttcttttataagtagtttagggagtttagtgtggttatgagttattcttgccatttgtatttgggtaatrggaattagagtagtcctttttattaaggaacaaagtagtgacaattttctgttatttttacagtcacctcttctagaagaagggtttaggcagttagcttttatttcacaaagcatttacaatctagctagtctttgtattctcatgtccctctattttcccctgtgtatcctgtgttgtaacctctctcctgcctcccattctgcaactactttgttctttcgtttcctcccttatctttttttttttttttttttttttttgagacagtctcactctgtcaccaggctggagtgcggtggcaccatctctcctcactgcagcctccgcctcctgggttcaagcgattctcctgcctcagcctctcaagtagctgggactacaggtgtgtgccaccacgctcagctaattttttgtatttttagtagagatgcggtttcaccatgttggccaggatggtcttggtctcttggccttgtgatccgcccgcctcggcctcccaaagtgctgggattacaggcgtgagccaccgtgcccggcccccttatcttaaatatatcacagtctagcagtacatctttcaaagtgtagtggtgggagactctaagtaatggcttgtatgtgctttcaaaaatgcacatacctgggccccttcccagaccttcattggattctgtgtgggccttgggagtctgcattataacacgcatctcaggtggttctaaagcaggctaaagttagagactgtttgccttataggagaaacaaatatgcagttattacagcagtgattcccaactctaatgtgtatgtgaatcacttggggatcttgttaaaatgcagattctgattgcataagcctgggtcattgtatttttagatgaatactcctgtgcatcccagtcctctgtaaagttattaactcttaatagagtgtctgtatggtgttttacgtgtaggagcagcagagaacgtctaaggtcttagaaatttactttatgggaactgtaaatctaatggtaggcgaaagagctgcggtgttgcatgaagcagcctgttaaagtatattgcaatagctgaggagtgtgatgctgagtgtgagccggagatgctgcatttctgacaagtgcccagatgattttgttatggctaatcccctgactagacaaaatgattgtgatattctgagggcattctggaagtacctaagtagctcagcctgaagagagacagggactagagaaggcttcttggaagaagtaatcccaaagctaaatcttaaagaatgtgttccagtgttttgttgttgttgttgttgcaaatggacaataagaagaataaagctggagaagtgagtgttgagcagaaaacttcaattagttctctagtagtggttcaaaatgtaaagggatatggtaggaatgtaatctgaagaggtaggcatgcatcagatcatggaaagctttgtgtgcttgtctagaaacatgagttggatatcatgtaagtracaggaatagtcatatatatagtmatatatcacatggtacaggaccagaaccagggagaccaatgaggacactcatgtggtagtccaggagagagatgctgaggcagtgaagtagggctagaaaagaggggatgaagaaaaagaaggagtcccaggattcttgaattggaactgctatctggtctggataataaaaggcaaaaggagccagttgagaaaggaagaagatgattcatgtaatagcacttaacatgtaacctccttaaggttaggaagctttattcatttttgtggtgacatctagtctgtagtaggtgttcagtagatgtttcttattgaaaaagtatgatagtagaaaaactattttacaagttaaataattccacagatatgtgactgtacttaaaagtatttaccagttgaatcagccattgaaaaataattataaatgaagaataatgcttaaaattccagaattcatgcagtctttcagtcatttgtttcgaagtattatggcagcatctatgtgctagtattttaacttcatgattaagtctaatgtatcatctaaggctctctcttcactgacatggttatcaattttatttgtgttcttatttcttaatgtagatgcttatttataattttagatgcaatatgatgtagtcataggcccatctggtatctaggcaggaatgtagtccattgtttaagacacttgtttaagacacttggtaaaggatggggttgcaccagaaagggtcaggacaagggatccaaagtttgggaatctagtcaactctcataaattagtgttttcagtatatttcttatatcagtatgactaagttcttttttccactgtccagactatagactgtttttcattctttttttttttttttttttttgagatggagttttgctattgttgcccaggctggagtgcaatggcacgatctcggctcactgcaacctcagctcactgtaacctccacctactgggttcaagtgagtctcctgcctcagcctccctagtagctgggattacaggtgcccaccaccacgcctagctgactttttgtatttttagtagagatggagtttcaycatgttggccaggctggtctcgagttcctgacctcagttgatccacccgctttgacctcccaaagtgctgggattgcaggagtgagccactgcgcccatccttcttgttgttcttatttaatctttggggtatgcgtgtcttaagcctggaatatttgacatcttttggagacacttaggttaaccctcttgtctgtgaattgattctttggtaaagcaacttgattgggggttgggggatgttactttttcatccttgtaagataaacttcttatacatattgttcagagtgagagaagaggggtgaacagaaagatattgtttgcttatttacacttctcaggctgcagattcagattgagttctagggaaaagaagaaacagaataaacagatattctctgaaagaagtaaaaaagtaaaaataacttcattggcttgattttaggtgcgtgtgttcgcacaattacccctctatacacctgtgctgagtcaggttgcccagcagtttattcccaagtagaagtcrtctaggaaccataaaaccctacattatactatttctctgggaggcccacagcccaaaattcctttgtgttttttgtggcttgttttaattctctctctttcagttttaggactacttgagaattctgatgtgattggaagaggaatggtttcccagactattttaaaggaggccagatatttgccccaaagtgacttattggttctgtctgccaagcatttctgatgggacctctttttataaacataagccattcaccataactctgttactctcataaaccttatggtctcaccctaagtcttcacctatgagttgaaaatgctggactttcaggagcccttaataattaagtatgcaagattttaaaataccatcacatggctgatttcttgtatttggcacttacatgtagagtgcattcatatccaggagcaagtaacatgacaaacagatcattcagataacgtatacagataagagtatgaccttaaagcaggttttctcaacctcagcactattaacattttaggccagataattcttggttgtatggacctgtcctgtgcattgtagacatttagcagcagccgtggcttttacccacttgatgccagtaactccctcctccactgtgacaaccaagaatgtttgattatgatatattatgttagggtcagtgttcccagtagagaaccactgttctcaaacagtgcttctgaaacctgcctgcacattaaaattacctgggaagttaaatacaaaaacaaaccgaaagggcccagaccccaccttacacccatagatttgattgtgaagtaggaccttgatctctatgttatgttggtggtgttttggtcgtttgtttttaagcagattctaatgagcagtttttaagcagattctaatgagaagcacccctgtggagaataccactttgggacttagacttcttgagtagttttgattgtctagtgttgaaatttcaagtaaattacttgaattttttgggctttatattcttcagttagaaaatcaaagagatggactagatcatttctaaatttcttaattttgaaaaaaatgccaacttgtttttatagccttttgcataaattctcttactacatagcttttactgacaggaagatctttgttttatccattgtctgacctcaagtccttcatgttttcctccacttttgtctctgtcttctttttgcccttttccttaataacgctttaataaactgtattagtagatgcttaattgtacctgactataaatataatcatttactttatgtattatatcaaaaccaaaaaaccctgttagagctctccgggagggttagatgtagtattgcaggtcctttattagttcagtaaatatttgagtgcatacaaacaaagtggaccttctctcatgagacataattaccaccaagggcagtgattttcacactttgttgctattatgtagaggtttttcccatgtctaaaggtttattgtgtttggagaagcacattcctctggggaaaatggttacaaccaagagtctatagaaaaggcctgtagtgttatagactgtgattagatcctaaagtmgttgttactcttgtccctccaaatcatggcaaagaccaaggataatggcttccatttattgcgtgcttattgtgagtaggtaagcacaattactgtataaggtatagtaatgattaaaataattattggaagctgattagaaaagtttaggtatcctgcccagagtcatgtggtcagtctagtgaaattggccaacttgaaatttgactgcagagtctgagctttgaactactgtacaacactgcttcccacataaaggagttccactgcccttaatataatcctgatcttacctagataaattacctctctaattcaaatagatctcagtgtgttgttaggattaaattgagataatatatgagaaatgtcccagctcagtgtctaatacatggtaatagtctctcaataggatgtttcccaaatatttatttctgaagtgcacccaaatctctgtagttttagtttttgcccttaagctttggttggaattaaattactttctgatatctcctcctgttatctaatggatgctgctagtctttttccaccagggatcagagcgataatttgcccttaaaaaaaaaaaaaagagaagaaatcactattttctcatctctcctaaagttggtacagattgagcatccctaatccaaaaatctgagagactccaaaatcagaaacggtttgagcactgacatgaagccacaagtgaaaaattccacacataagtgcttaacactaactttgtttcatgcacaaaattgttaaactattatataaaataagcttcgtgtgtaagatgtatatgaaatttaaatgaatttcatatttagatttgggtcctgtcccagtggggtatcatctcatgtatatgcaaatattctaaaatcaaaaaaaaatctgaaatctgaaacagttctggtcccaagcatttcagataagggatactcaacctgtagtactattctagataatagtaytctagatgcacaggagagaagtaaatttattacatacagtggatacctcaggacattaaggcttaactatttcttagaatcttcattgaaaagattacagaatacatcaggtagctctgctgtaaaattttagaccagataatttgaagtgttaatttattactattagtcatatgaattgttagattatggaaatgatgtaacagtactcaatcaagctatactagagactgcttctcaacatgaaaggaattatatataacaaattctttgtgttcaaagccatcggtaagatactgatttttatatgaaagcacaggtttagatttctgatttatagtgtacagtttcagagggggaaggttttgctctatagtttttcattctgccaaagaatgctcctctctgggaaaatagagtgtaagtacatttgtatttttttaaatgttttatatttctcaaagcttattataaatcttttcccaaggaatcatgttatttgtgaacacctttgaattaagacattattctcatattcctccagaattaaatacaagctataattgatcctgacaaattagtgaaaattgacattttcacatatttctaagtcctgtactatttgtactgattagttgtagagaatccttttttaaatctactttagccttcagtttggtgatattctggcttcagtgggtcttgtttgtgtcaatggggtaggattggtttcttaacccccaaatgtccccttttgaaaaattgaaacaaaaggcttgactgatagtattaagttacaagaatatgtatatatatattttttgcttttgcaaggtggaagtattgtttaaattattggaaaattagaatgattttattatttttctagaccaggaagacttcagacttaagtggtatgatagttaagatggaattttacatttttttcttttaggttgacaattgcattttttgcactctcygggctggatatgttggattccttagatgtggtgaacaaagatgatataatagagtggatttattccctgcaggtccttcccacagaagacagtgagtgagtttttagcattttatttttagtgtgactggttgtacctgacataacatgtgttggactagaaaatcttagtacttgtatactgttaacatattttatttatctgtgattttgttgtaatgcagcattgccattctgttgaaatacagtacttaacaaatctgatcataatctcaagaaaacaatttagagtyatctggaatttaatagagattcacagttgtggcaccatactatgttgtatacttccactttgatgactacttgttgattatttatagtcagtatttatgtttgattagttctgtagcattaactctgtttttcattcccaacaattcttgtcttttcagtgaaaaactctttgccatcgaaaagttttctttcagtttcctgattattttccctccagtgtttcattagcatttttaatggtttcttaaagctcttatgtatgcttcagtcatttttacacttaacacttaaaaacttttgattaattaaatgaattctcagagttcataaattacgtaatcaactgcaaatatacaagtttttataaactctgttattcactctattaagtataaaatatctaagatagatataacttatacatgttataaattctaaccttaaaaacatcaaacaaacaaactcctagaaaatcatgcttgtttttttttgtggttcgttggttagagtaatcatatgtaaatctcatccagtgaactttggagaaataataagctaaaactttacttagaaagaaaggttttctctgtttggcagacgatcttgaacatagtttgtggctattttattcttgaagttcatagtgtttgtttttatataactttttaaatctatgcctatttacaaagtcttattaaaaaatgatttaagtattttgaactaggtctatcagaattaaatatataaatatctaatcacttttctgctagccccaatgaaagcatgtataagtttggtcaatagttacagatctaacatgttgatgagtaggatttattgaatttctgctaagagtactattcttctaaacctgtagagaagagctgtgataagttgcaagttatggtcctcattttccaggagcatgtggccgaggccacgtcttagtcctagtcacttgcaaaatacatgtcaattgttgttttccctttttgccggatgttttttaataatttaagtgaaagtctgggattttttaaacagttgattattagactgaggtatggtagaattattacagattgtgcttggtatttttttttaattataagtacatgcccggtttttaaagaaatgtatcttacatggtacagataggaaatcatatacacactgtggcacatacgaaagctattccctaagttcttgccgaaatatatttttatattattttttaattaaaaatttactgaaactcgtactcctgaaataaaatagctattgtctttatagaaaaggatggaccataacatttaatgagagaactcaagctgtaggttatagtttccagaccattggtcacttactcaccatgcttcctactttctgtcttttcttctatttccccccactattaaggattatttggtggctccgtaattgakcaattttttggtctgttctttaataagtgtttacttccccctaccattttattagtgaaatgagttttttataacgctattatatctatgttgttttaaaaagctacatacttcttctcattatttaatcttgtgagagatttgctattatctggagtttcatattatccataataattttgtttgttacataatcaacagaatggctaaaaattaaaaaggtggaaaataacaagkgttcacaaaaatgtagcaaactggaactctcattcactgctaaaggagttttatagctgctttggaaaactatttggttatatttactaaagctgaacatatgtatgttctatgacccaacagttctagtgtatactcagcagaaattaaaacatgttccccaaaagatatgttctagcatgtttataacagtattttttataagagcctacaactagtaattatacagactacccatcttcagtataatggataaaggatatattagcatattcacaccatggaaaataatacagtaatgggaatgaacagtctacaactacattcagttatttgaatgagtgtcacaagcatgtttatgagagaaagaagtacattgtatatagttccatttttacaaaatacaaaaataggtcaaaccagtctgggcatttggggagtactagaaggaagtgggagaggcttctggagtgctagtcatgtactttttcttgagctgagtgctggttatacaggtgagtttattttgaaaaagttcatggagctttttaattattataggagtacttttctgatgtttattatacttcagggaaagtttaaacattttttggagttagaattgcagctcaccactccttttgagaaccatcagaattttctttcccattaaactgtcaactccatggacttcactggtttgaaacccactgccaatttttttcttcagtcattgctgcttaagttacttaaaatatttttgcctccacctgaattgcaaacctctggaagggagacaagtgaatgtgtcttctatttcttttccctctcagtgcttattgtgtatcagtagttgttagactattaaatcacctgccccttctccaacttttttctcttcctcttttatatattttcacatttagcctaggacctcatctggctcttcaaatattttctaattcataaagcatttgcaaactggtagaatatgctttctgcaactcataggtctgtatttgtcctactttgagataccacataaaatctagggaattataacatctagaaatgttaaacaaaacctggggattataaagcaaaaatttgatagatttgactaaataaatatttaaatactttatgtagtaaaagataaataagtgatgaatttgcagaaaattatggcttgtataatattaacatcgactataaagaattgttaaagattcagaagaaaaagatacattgtcctttagaaaatgacaaaatttattaagtagttaacaaaagaagtacagatacataaaaagatgattaaccttactagaaatcagggaaattcagtcaaaacaatgttacaaaataaatgttcatcaaaagtgaaagttacataaactatggcccagtaaagaatattatgcagtaaataaggtagagctctatatatatactgacatgaaactgtctgtcatatatattagatatgagttttaaatttcttttcaaagaatcaatatgtcagtatgttcaattttttgccttctacttttaaacttaacttcctcgtaaagcaacctttttcaatcrcctgccccaccctgactcattctgattacctgctccaccctgactcattccaattacctgctcctccctgactcattccgattacctgctccaccctgactcattctgatctaccctgactcccaccaaaccactcaccttgtctctctctttaaattagccagttggaattagtttagcctgtttggtctaaccctagccaataggggaacaacacagcagcaggggccacccgcgtcagggatgagaaccccttcccctcccttgtccaagtgtgtgctcaccattgctccatctgtaagggcacatccttctatagaagtaaattgccatgctgagaagaaaaaagaaaattttatatttgagtgctatttcttttgtggcaccgaaactttacttataatatatatgattaaatgataaatttaaaacatatacagaggtgctttaacaatctatataaatgtgcaggaaaaactcagaaaggatacatagaaaatctttgtggagggggaagtagatgggaacagaggtggggggatggcaagataagatactttactgtttttctatatatctgaattgtttgaatgtttaccataagtaaatatgtttctgtatttaaagttttaaactagaaaaatacttagcttaacctctcttcaaaacatacaaaaataaaaactaaaagttcatagctatacgtaaatactgatatttttgctaatggaagaaataatgcaatacattatttactattttataattttcaaagcactgccaaatacataatcagatagatttattcttcacctaattggcctgtcccaagaagaggaaactgagacgcaaagtgattcagagacctgtctgaaacctcacacaaatgataagagatagaatcggattgacatctggcacttctgactccaggtttcaatgttgttttactgtttaagtatatgagtggagacaatcacgtttggcatataaggacattgtgaatatttaattaaaattaaccctggcctccacttaactccaggattataaagaccctagtggtttcctagtaataagtgtatggtgagaccactggaggatcgggtccttctcattaacttcaggagggaagtattcgggaaacacaatgggtcaggttgggaattgtgtgtgcccttctttgagggcacaaccagagaattttagacttagaacagagtgaggactattacagtccatcattttacaaatgaggacattaaggttcaaagagattaataatttgtccacagtaatacagctagttaatgctagagacaagattagaatgcagttttctagtcctttggatattttacttatatgtgctgattcagtgcaataggtgctctgtttaccatgcatgtttttctgtgaggtacagatttttctcatgggaactcagagactgtcttatagctttacaggaaaatctagtatctgttccttaatagatcccataaattattaggattaagtgtttggaaacatagataagaagatttaatattaaagggtaaaatgtttaatgctttcatttttttagtggattcttcagatggctcactttttaaaaaataacatgggggaagtaagtatggtttcatgtggctaagtcaagcgtgttgcatattttaaaaattataagtcatctgttttggaaatattatagatcaagacattttgacaaaaatggttttacaatgttcatttatatatccagcattcccaggtcagatgtctggtagaccattccacagaccttttcacagttcagctgcaattctgaattctcaatttgctatcttgttgagggaaatattattaagtctctaatctctgtgaaagaatatctcctgtctgccttttctttaattggtgtaggtccaattctaaaacaaatgtgtgaaatgtggaaaataggtatatttaaaattttttttttagctattgaatgtttcatttaccttgtttcattactttcttgacatccttaaggagttgtgtaaggcatgtcttcttactaggaaattgtgtttcttgagatttatgtggaattatttctctatccataaaatataaatgttcattttaaaatcagaaagtagccacattcctcacttgaattctgtttgcttagggcaaaaacttttaaaatgaggattagaaagttaagaagttaagaacatgagcaaatcagttttgaaatatatttaagaagcataatcatcattaatagtatggtgatattttggcccaagagctgtcctttattatacctaaatataattttgaatgcaattttatatttcacaatacagtttattgctttttatgaaaagcaactcccctgattaaaataaacctctttaaactctcaaacttttatattccataagtttataaccgttttttaaagaatatctaaatgtactatctttcaatgcttgacatatagttggttttatgagcttaatagtaaaacactaagttttaaagtgacatatgactcagtcatcaggcaagagtcagcttaataaattttcatgtacaaacgtgcaaataaatgaattattcttccttatagttgataactatagatacattatattttctaataacacacttcytgcatacttacacataaacacacacacatattacatccatgtacatactcccatttttgctgcctttctcatctacccagttttcatttttcttcagtaacctcaatttttatgatatagtgctatctaaagtacttatgttaaacagcataaacaagtttgactctatagttctacaaaagtatatttaccaaatcagtagttcttgattctgactatgtgtcaaaccgggattgtttttctttttaaatacaattttccaggccctatcctcatgctttttaacaggcatgggaggggagatgcaagaggcatctctgttttttcaaaataggcaattgattctgatgggcagccagaccacacaaagaattttcagtttgttttgcaactgttaaataggaacactagatggtgctgtttgataacctggaaagaaatttatactgtacccagagtatgcattcagcgataaatttacaatgaattgtgtgtgtatactttcttaattatcatgaaaaggtatgcttactagaattccaaaggaaagcacacaagagcagacaaatattgacagaaaccgcaaaagagtacctaataaatatttttaagtggtgaattttttttttttttttgaaatggagtatcattctgtcacccaggatggagtgcagtggcgcaatcttggctcactgcaacctccacctcccgggttcaagcaattcttctgcctcagcctcccaagtagctgggactaaaggtgtgctccaccacacccggctaattttagtacttttagtagagatggggtagaattctccatgttggtcaggctggtctcgaactcctgacctcaggtgatccacccacctcggcctcccaaagtgctaggatgacaggcttgagccaccgcgcccggcctaagtggtgaaaaattaagtggtgaaaatgttacctcctaatgagcatcattttttaaaacattaggatttaagtgtgtgactgataactcaatttagtaaatgagtaattttcttgatttcttagttacttcatcatagcttttcataagaaacaggagaattctcttactgtagaataaagtataaactttagaataaacttctttatccagtttcatagtccacaggtgattaagaagaaggcaaaaaatactacattgtcttttccctatactgtgaccgtggtgcttaagatccaaacacttttttcatgacagtatacagtctttctggaaaaaaaaagaaaaacatttttactttaaaaaagctttccttgataaattgcaacaaaagctattcatttcttcctgtttcacttttgataaaatacaattaactgattttgaatggttactgtttattaagccttgtttcactttgctaagtacaatctaaacatgtcctttaacctttacaagaagcctgaagtatattacttgcaatatgttattgttactagttcaaaaatggaagaaactggctcagagaggttgttacttgcctatagaactcattgataggaagaataggatcctgagtttgattccaagtgtccatgccataatctcctaaccttatatggtacttttaagtattgatatttctgctgcttttcagaaaagttatttatttaatcaggctaaaaacagaagtgaacaaacagaaatgtcatttactgattcacctctaagaagatgaataaattcatttatttcactcagaagcagatattttattgagccactactatatgtctgcctctatgtaaaacacctgacagaattgtttaagttggtggggtactcaacaaaggtgtccagttgcaagtataaatgcagaactgacagatggtatcagagctgtcttccatcaaaagtagaaatgggatcacatttttatggaggactgttagcagattagtarcttgaaaggataccctttaaaaaagacaatcccaagaacaaaaagagaaaaaaaaagatttaaaaatgttttaatcatataggaaaataygccttttgatactgcccctcatccaactagagaaggattaaaagaagtgatgataaaaggataggctgggtgcggtgggctcctgcctgtaatcccagtactttgggaggccaagacaggcagatcacttgaggtcaggaattcgagaccagcctggccaacacgatgaaaccccgtctctactaaaaatacaaaaattagctgggcgtggtagctcatgcctgtagtcctagctatttgggaggctgaggcaggagaattgcttgtgcctgcgaggcaaggttgcagtgagccgagatcatgcccctgcactccagcctgggcaacagagcaagactctgtctcaaaaataaaaaggataaatgaattcataacttggtaagagaaagataactttttattttttttttaagtatagcattatgtacaatttggaatatggggggtgtgttaggtagaatcctttttttttttttttttttttttttgtgagacagagtctcgctctgttgcccaggctggagtgcagtggcccgatcttagctcactgcaagctccgcctcccgggttcatgccattttcctgcctcagcctcccgagtagctgggactacaggcgcccgccaccgcgcccagctaattttttgtatttttagtagagacggggtttcactgtgttagccaggatggtcttgatctcctgacctcgtgatccgcccgtctcggcctcccaaagtgctgggattacaggcatgagccaccgcgcccaacctgtgttaggtagaattctaaagatgttgccccaggatttctgttccctgttaattcagtcaaatactaatctgggtactgctgtgaagggactgtgtagatgggagttaaagttatactaatcaactgaccttaaaatgtggagcttatccataggtgacatgtgtacaggtgggctcagtataatcacatgaacagcagacgaacacagaaacgttcgtcatggaattgcagagaaagggagcagaagagagaagagaaggtagagagggtctaatggaaaagatttgagtgccgttgccactctgagatatggggcccatatatgagaaatggcaagagaggatctaggagcaaaaagggatacctaccagcaaagaaatggagaactcagtcacacaactgcaaggaagttgattctgccagcatcctgaatgagcttggaggcagattgttcccccaaagcctccaagtaaggaaggtagccctgcctacaccttaactttagcctgatgatgcctgtgttagacttctgaccttacaaacagtaaggcagtaggtgttttaagttgccaagtttgtggtaatatgttatggcaacagtgactaatacagagaacaaatttcagccttattcatatcatctcacaccattcatattattttgtttattcccttccagtctttgttgatatgtgccatttgcttaattataaacataaaaatgcacatttatttttggatcctacttttttgcttaacttgatcaaatacatttctctgtgttgctacatagttctactgattattatttttaataggaatatagcgtttctttcagtacatgaggcatgatatgcttaacctgctggacttttatggtgcttctagattttcactattattaaactgcagtgtgcatttcttctcatacttgaaattattggaattgattctcagatatatcatgactaggtcaaaaggttatgagtgtttttataacttctgttatatattggcaagttttaagtagcttaccaatttaaaagtccttaggataagagaaccataatttgactgggtcaaaaggatatgagtgtttttataacttctgttatatattggcaagttttaagtagcttaccaatttaaaagtccttaggataagagaaccataatcactgaaatcataatcaccattagtatcttttttttttttcaagacagtttgactctgtcgcccaggctggagtgcagtggcacgattttggctcattgcaacctcyacctcccgggttcaagcaattctcttgcctcagcttccccagtagctgggattacaggcaggtgccactacacccatctaagttttgtattattagtatagatgtggttttaccatgttgaccaggctggtctggaactcctgacctcaggtgatccgccctcctctgcctcctccccaagtgctgggattataggcgtgagctaccacacctggctgctagtatctttttaaaatacatttttcgccagtagggagatgataattggtggagagtttaaatttagtggttcctaatttgttcaaagaattaatgtataagctactattttaagttttttggggggataagaagctgaaaaaatatagtacctaatgcagaagtaggagagtgaaaacagttaataatgaagttagtcatacactagtcataatctcttatgaaggtagttcttcatatcagagactatttttagaccaactcgatttttttttatcagcggtgcatttacagtctgctgatactgcattgttattttctgcatctatcatactgattttctaatagctattaaaaccataattgttgtatagttgattgttctttcaagttcccaacttatattccattgatatcttgagaaatgaaaatttttagatagaaaaaaagtatggataaacatattttgattgagtagagagagactaagtgctaacttacagtgttctacatacttcaaagccaagtggattactggactcagaacgaaggtctagctaatgtggaaatacaaagtacatattttctcttcagctttaaacctttagtttgctcccatgtaaagaagcaatgagttaaagtaaaaacacactaaatgagttaaagtaaaaagacagtagaccctattgtgttattaaccgttaccttgaacaatcacttaacctctgggcttctgttttctgttctgtagaaagggggattgaacatgttgatcacataaaaattgatctgacaggagaagtatgaaaggactgtataggcagtgaggtgggctattaaaaaaaggtacatgatagaaataattatgttttttgtgactcatatggaaattaaatgaggraattcccataagcacctagaatggacctggcacatggtaagcattcagcattagccagtatgaaaatggagactaaaatagtctgtttctgaaagattgtgtaattaaactgctttagaatctgtgcaaaaataaagtgtactttaaataagcacatgcttttattttctaggatcaaatctaaatcgctgtggtttccgaggctcttcatacctgggtrttccgttcaatccatcaaaggttggttctatttggttcagaaggaagtasaagggatgtagggatattttaataaaagagaaaactaagaagttacacagaaaaaaacaggcttccagatttcaatgtggctaaatgttgtctaataatatatatatattataaactgaaatcctttaaaggaaacctatacctactttacttcctcaaagaagtgcactttcttccgggaagaatacatgcagtacataaacacacacaaatttctattaattgttacaaaaaattgtctcagtatcatacatctgtgtgtaaaagttattggtgatttcctgagtaaaggaaaacagagcactgaagtgttttgatacctgctgtgtaagaagccagtaaactttgttgtgtttatagaaagactctacatttagctcacatttcttaggaataaaagaaaaagcccttctaaaggcagtgattgaagacctaggtagtgattattttaatgacttttattagaatatgcagaacttcttcatggttatatccaaaggccttgataccagcacatgccaatataaaaacagtgagtcctaacagagggaggagctttatttcttcttcaaaggagcagacccagaagaaactttgtaggtgttccrtatgtacacaaaatacaagtatttttctacagtagaaagtggagaaaagcatcattttttctaaagcggcctcacaccatagaaactttttccctgatggggccagcctgcttatgtaatggttataagccagtatcttgttgggctgagtatccacttgcaaggtaagtggagagctaccagtttttccgtaatcagcttcaaatttttggaataaatagcagtaatgttgaagaagatgacatactttgatagaggtactacttcagctttcttcctctgccttaagctgtaaaccagcttgcctgtgtcaaggtcatatgaatttaccagcaggactccaattatgggtgcccactgcatttagcagggaatgagaaaacaaaggattcagaaaatttgtcccttttcatgcctatcatattttccaccttaagctaatccagaatacaggtaatgtcttcatttagtcataatgaacagaatatcgtgccactagttatgatgaccgttatatagtactatactatatatagatgtctacctatatttgttacagtgctttaataacattacttttaaaatatgatccttcccccaaccaacgcctgcaccaaaacattttcaaaataacaggagtaaaattgaagaaaaaaccattattgcccttggttcacagagtctcctgaaactcctttttggaccttcattcacctgcaccctgatatcttctgggcaagctaggtctcacttcatgctgtattaccttcatctgaattctgggtggtaaaaggaactagatattccaagtggtatcacatagaaccgtcactgagagtggtgactgagcgtctaggagacagattaggccaagagaatgtgaggaggcacattagattgtccagtacagtatatgaataaaatattgtcactgagttttcttctgaagccaccaaactacctatggaccattcactgacttacctgataaatgcttgggaccttcaatggctgtagagcactttttgagaaacactgatggatcctcccactattgtcacaatttcctttcacaaatcccatgctctctakcaaattttktgttgtccttaatgtgcaccccagaattatccttctctaatttgcgtttactttttcttctacctgtaatacctcctcttcatctatacctgcccaggctcctcttctgcagaaaagaattcctatttaaacccatgttattattatccctcccttatgactactcattacattctattgtaattatttgagtagacttatcttctgctcttaaggttaaggaccacatttaatttatgtttggcttccatgcagttgttttaacatagcaggtatttactttaagtatcaaaaagttaaatatgcaataggaattctaagaagtcagttgtaaatgtggaataggatagccaggagaactagagcttgagttctaaggaggaacttagaatgaaagacataaagatggaaatttgcttggtacatttgtgagaccatataaagaactgcatatctggccaggcacagtggctcacacctgcaatcccagcactttgggaggatgaggaggatggatcacttgatctcaggagtttgagaccagcctgggcaacatgggaaaaacctgttctgtacataaaatacaaaaattagctggatgtggtggcaggtgcctgtagtctcggctacctgggaggctgaggcagggcaggaggattgcttgagccttggagrcggaggttgcagtgagcgagattgtgccactgcactccagcctgggtgacggagcaaagcctatctcaaaaaaaaaaatgtgtatctaaasgtgggtaggtggggtgggttcagattattataaaaagggtagtgaacaccattcaaattcattctgtgaggaaccatagaaggtaagtatgcaagaaaatcttacgattcatgggtggtttcaagacccttggatcttgactccaaagaactagtggtccgtctgatatttgccttgcacttagtcaccattaagataagtaacagctttttagacagtaacttacttaatcgtcacaataaccttgtgatgtactaatatcttcattttctaggattaggaacattaagcaagccagtgagaaatagaaccaggattttatgcatttcaatgattgtaaaagtttacatttattatagaaggcagaagagtttattttaattgtatcgttttttagtttcttatatggtgatcactactgtggtatttcatttagatttgtgctatataaaataagttttgttttagaaatctttttttytggaaggctatatgcttttctgactttataagacttaaattataagtgatagcgtgattaagtttgaggtttaaataatttagccaggcatggtggtttgtgcctgttgtagtcccagctactctggaggctgaggccggagaatcacttgagcccaggagttggagactgcagtgagctatgattgcaccactacagtccagcctgggtgacagataagaccctgttmctaaaaaaaaaaaaaaaaaaaaaaaaaaaaaaatccaaaaaaataagtaatacataatttgctttacctgaatatcataactacttccataatgcctgaggtatcaaagaatttaaagattaagtagcctgtgcaatcatattcatattgagacatacataaaatggagatttgtttttctcaataagatgtctatacaaatcagtataagccatatttaattttactatttactaaaaccttrtgtcagatttcttaatgaaataagttttcatttcacttcattaattagtactatattaattttgtatttaggctcctggaacagctcatccttatgatagtggccacattgcaatgacctacactggcctctcatgcttagttattcttggagacgacttaagccgagtaaataaagaagcttgcttagcgggcttgagagcccttcagctggaagatgggaggtatgagtgattctttgttactttttttgtaataaacaaaaatatattggaactaaaaaatggatacagtactatactagatctttagaggatcatactctattagaaccccacctaaagcttacgaggtacataattaagtgcatagtcaaaaaagtgacctcagatttcctctgtgagtgaaaataatagtaattacaatagccaaacacctttatcttccttcttaataacaatgggtacataaataaatggttgaataatttcaggattggaatctaatttacattctagatgaaaaattgatattttgaagtacgcatacatttagtctggacctcagttccttgctttatggtgattagggaagaaaggggtgaacactgaatattgtattccagagtaggtagtttccatgacatttttaaaggatagaaaaaggagttcgtatgttcattgatatttggtgattcacatagtgtgtctaaagatgaatcttcctggagctttaaggtagaaaaaaaattttaagtctgagaagcgataaagcagtagtgaaaagattaaggaaaagactgcaaacaaatcctgctgtgctgttaactctttgtgctccatctactaatagctctgttttcccgtcagtgttttcaaaacactgctcttgatgagggaaaaataaatgtagacaagtagaataaatygacattaattggaaaccctatgaaactaaatatttacttcatccagtacatatatgacttatgtctcaatatttcagtgtagtctttgattattgcttccttattcttgtttataaatacatacacaacatagattgctgcctctctacaactaatatgtaaaattaaaatacaatatgatcaatcgattaaatggttatctgtgtatacatttagaagaaatttcacatagaaaaacttgggcttggaaatttcgtatacccagtaggtctcaggttttaccttttactttttctgccattctcaagccagtatactgcagctgtccctggctaggatcaaataagcttatgctgagtaagcatccaggagggagtaacatggtagtrtgtaaaaataccaagwagtcaaaagtttgtagtagaatgatgatttagagaaagttttatattattcaagttagtagtcttattctttattgaataataaaagtagaatattgaataataaaagtagaataatcaacagatttttctgttagtaaagacaagcaggaggtgtttctaacccccatgcaaaaaaatcagagtccagtgttaatagaaaatcatattgttgttattattttcagtttttgtgcagtacctgaaggcagtgaaaatgacatgcgatttgtgtactgtgcttcctgtatttgctatatgctcaacaactggtcrggcatggatatgaaaaaagccatcacctatattagaaggagtatggtgagttctgttgataaaattgactatttaggttgtttttgctggtacatgagggctgtattatagtgtatgtctcatctcttccgccaacaatttgtaaataagagcattaagattgctttttggtaaattgtgtatcagaacacaataaagaaataatcttaaagtgcagattgactccttggccattaaaatttaatatgattttatttaaagaagcagtatctttataagaaagggattggttgacttaaaagaaaaataagtaaaatctgaaagtcgaatattgacagcctattctagcaggagttagtagagagtcctgacamgcaaactggaagattatgttatctttggtgagactatttctctcatctttttattggcattagtaaggaaagcttagtcttagccagaactatcctttgctctactgtgtcatctctgtataaaaggagaaataaaacttctgcattccaggtttattatttcccaaatatgaagtttttcattttatagattattttgaggctgttagaatattttargctgttaattcaacttttcataggcaatatttcaaaatgaaaatgcctgtgagttcctaagaagaatggagttgcatttaagtgagtgtgtaacagtggatcatatttttgtagattccacaacagcccaaattttaaaaagcctctggatacagaaagaagataccattaaaggagttttaagaggaaaagagatttatgtttgataggagggtgggtgataagaatttttggtatgaatagtacagaagtaatactgtcttctcagtgcactgtatttrgaggtgcagcaagttgatttgccctgtgtctgctcacttggttaaggtggcatatgccagagttttctctgtaaagttagtgtttttccctttgtaattaccgaatatcttgtggtgagatacctggagactaaatattcagtgagtccctaatcaaatttttatccaatagtgttgttagtatgcattgatgattttccagctctagcatccttcctataaatatcagttaaaattctactgtttgaaaaaaactttctctctgcatttatttatttacttatacttacttatttatatctctatggacttcagtttcttattttattcagtgggttgtaatctgttactgtcattattttgatgctcagattgtcctagattaggcctgtggaaccccttttagtaggctctatgcccttttgacatgttaccctcattctttgaagacctccttgctttctggcacaagatattccaggtttatcttctacttttccatcctcagctctggaatcagtcatttctttgaggagccttggttattcttgttggaggatagggtttagaaactagaatctgggtactaagtatgctcattggtattgcgatgtcattacttctaggccttttctcgggcagagataggaaatgtatgtgtacataggcatccccttacagacacacagaatctatatttctgtatctatttatatgtctatatattaaaatcatgaatctatcgtgatgcctcaaatttcagtcttaacaccacagggctcattttaactttcgtcctttcatttatgactccatttctgatagtgacaagcagtcctggctcctattacccagaatacattggttctttttgttttgagtctgagggcatatagtcaaagtactatatttaagaagtactccagttacttattttatttcccccctttaatatggttatgttatctgtttgaagtaccattaggttatttgtttctctttgaattccattttaggcttttccttcacttagctctctcctgcccacaacttcgttgactttatttatttacttaatatgtgaaaaactaatttggttcttaaggtcagaactatacaaaaagatatatacagagaagtgtgactccttgcccctcaccctccctgtattcccccctcttcttaactcccatacttaacatcttgttccctgtcaccctgtaggtaactattctcgttagttttcagtttatctttcttacatttcttattgatgagaagatatggatatttttaatgcttttcctttcttcataaggtagcataccatattctttttttttttgctgtttgcttttttcacttaacaatatagcttgggagaaaaaaaaaaacaccaatacaatgtgaaaattactccttatcagttcagagagatttttctctttttcttatagtttcctattatattactccactgtgtggatgtgcagatgtaccatggtttttttcagctattctacatttagagcatatattttgcaattacaaataatgctgtaattaataacttcctgcatatatatttctatattgttatagatacatcttcagggtaaatttctggtagtggaattgcctgatcaaaaggtaaatgcatatgtaattttattagagattgcccattttctctccaaaaaggatagaccagtttgttttcctaccaatatargagagtgcctgttttcacatagcctcaccaataaaaagcgttatactttttttgtttttacctttttttctggtagtcgaaaagtgatatttcagtatatttttaattttgctgccctcctctcatgatttttcattttattatttcttttattatgagtgtaattgwccattttcttaactcgagggccatacaaatccagactgcaggccagagttagcctttgggccattgctgacccctagttctagtccattattttgcatttgctttttttttttttccttcttttttttctttttaggaattccattttagtgtctgttcttatttttttgcctgaccttcttttcagccactttctctttgacctttttgacttatctcatttttattctcttggatgttttctccttttttcagtgtcccttgtattttcatttgagattattcttccttagtcatcctgtaatttaaaatttatttcttattttgtctttttcttctatttcttttctaacactatttctctttttatttctattgtttgttcatctgtttttagcttttaatttcgttttttatttccaaatggttgtttgagggtatgtatttgagtgtggagtgctacattacagttttcttctgattcatgcctatttcttgggagtagaggcagattttcatatacttaggtgttagcgtttcatttgctgtattttcatctcagagttactttgtatgttagtgatttttattttttctgataagaattcctagtttaagattgttctcttcattgtaatgcagtatgctttctttactgggtggctttttttgtagctggggttgttctatgatttttctgrtaggaaaaagkttctcttttgtttctcaggtatctaaattttgcttttttgagctttcctttatcacctgattttcaaagggcttctccctccttttttaactttcttcaccaaaatttacactctttgagccctgccactttgacttgcacattcttttaagtgccttccatatagccagtgctgtgtttaccaggcctctttctgaacaggctatcctcattttgcatgacagtgccatactataatgataaccacacaagctgaaatgatacaaggtgattttaatcatcaatgggaaaaattatgattgttttatgacctttaaaatttttgccaaaactttgaaaactcttcctgtcagttataaatgtatgatgttttaaatagtaaaatcagtatatagtatactatgatgttttaaatagtaaaatcagtatatggtatactataatttaaaacattagaaatattgtgaatattgccttcttctcattatataaattataagatggagtattttttctgtgtcttggcaaatgaccacaatctaagtttctatcagcttccaacgttgtgtgttttgtgttttcagtgttgtgaagtcgctgagaattccttttatgtgaagtttttttgcccatagcagttccctagaacatcttcctctttttttatcacaagctcttcccttgcttatagatgtttcaccttcacttagttcttctggtggtatacctagagtctcaaacagcaatattatcaacattcccgtaatagctgtttcttctataactctaattttaagttcatacccagtgttaatgctttttatttctttactgcactttcatctttgttggccaagcccctctttctgttatgccttttaataaaacatcatgtgggtttatcactgagagacaaagaacacaaccacagtctgctatctgtgtgtgaactgaataacatgagcaatgaccaattcctaacagactttgaaaaaggtggtatgattgatcactgatcgcgatgcacatgtgttatttatgtagtgatttgcagagtgaagagccagcaacggagttttgtactttttgcaattatggttaatatgctgctgtggttactgaagtttgttgtgttatttagctaaaccatggcaactggaatgtgtgcataagagaactgtgcaaagtgagaactgcctgtatttctcatatttagggtggactttctcttaggcagtgattttagatcaatctcagaactactgttagctcccctcctctcatgatttttcataaatcacccttgctctctgcaaaggtgtgtagagttgcaatagacggcttgctgggatttgatgtttctttttctgtagacaggtaatctgaagcttgagtgtgtcttcttgctttgctaagatttgagatttcaaagttttattgttcttcttctgttttgattttggagtgtatgtggggagattcaaataatggtacccaataatggctaccattattctcagtgaccccagactgcctcagaatagacttgtttcatgtttataatgttctatcagtatgaaatccttacattttcctccarctcacgtatacttgcaatrgtaaaggagtaagktttggagcttttattgagtagggattgaatatgtagataactttgaataatctattctcagaatgtgcctagtgtatgcatttagtgatttggcttggtgaataagaagaraaaatcaggtatttgaaaatgcctaatwctacttctccatggggaaaaacgcatattttggaagatgtaaaggagaaataaaatttaaagagacctaaaaaacttagttcattggcaacttatttattcatttattattattattatttccctattaaactgaacaatgtttttctttttcagtcctatgacaatggactggcacagggagctggacttgaatctcatggtaagacatcttaaataagtgaacatgtagtttcttttgttcccttagacaacatcttgrtgtcttcagtatggagaacctcagaagtttttctcaacccttggtgcagcataattttcttctttgtcactttcctgattctcttttgacaccattttgtctatttgaagcctctttggtcagtaatcattcaggtgttattcaggctgggatgttcatatgatgttttctagtaatctattcaagtgttatctgcatgaaaatatcttgggattgtttcttacactatcattagaaaacaacaggttttctttggcataactctaaaaggctagaccaaatatagaatattaaatatgaatgcacaagttcatgaagaaatgaacatttttattttccttaacaaaattattattagtcatagttgtaaaacattttgctgcttagcttatattcagtgcaaacattaatacagtcttttctttcatgtttttttccactttggcagaactagaataatgatgtgatagtcactaagtgtcagcacatcaatagcctgaattctctcaagttgaaatttccatttggagataaataagcttccattcttcttttctaaaaagaaaaaggccaggtcatggagactctctgagtgaatttcactttcttcctcatcacagcagttttccatataattatttgttatctccatccctttgctagcataatgtagcagaaagaacagatcagtgttcttgtctcagccctgacaccaactgagtgaccttggctcctcatgtaatttctcggagggtttcctcatcaacagagtagaaagaattccatctttctttaggattgttgttagtattataagagatatgggggaaagtggtttgtaaatcataaacctgtataaaaagatatttctaacaaatattccttaatcccatagccttgtatacattctgggattttgtcctatcaagtatttcctcctcttctcacctcttcactccctccttcaatttaggtagttgtagagtatgtgtctctaaggggtatatagaacactgtcctggagtttcctctgaagccatactataattatgacaccatagtttttgtgtgtgcctgagtctctatgagatggagggtgggaggagctggcaataacaattatgttactagtcatcaccacatgatcaagagggatatagttatagttgtacaaagaggaaatctggcggctctaagaatttctaagaagacaggatctggtgtttactattgtaggtggtattagtgtacactctggctaaggagtcacctcacctgtgagacagctgatattatttccaagacattgggattatattctctggaatatgaaacagaggggctgcccaaacatgacactgtctaatgggtcctgtcaggaaaaaatcttcctgagttatacaagtcatgattttgaattggtatggcttgagtaggctgtacccattaggatcatcagtgatgggctatagttcatgcccaaagcgtatatcttccttctatctataaatttggcttggtaggtttgaggcctaaagccctagaggaaggccttttaatcatagtgtcacagtgtatttgtatatcttaaataggttattataccaaagtatagccccttcagcctttggaacaaccaagcaggacctgggtatctggagtccctggtaaggttgtctccggccaggagcatcttcctcagtattacagtatggcctacaaataccaaatattataattttctttgtgtgctatgaggttagataggctgggaagtactaccctaaaggattttggtttagttttctttccccttctcatcaccatctatactagcaagtgaaacctctttctaaaaagtagtcctgcartttggcaacccatcaagtcattgtgttctctctttttcttttttattgttactgtctttggaaaagtgttccaaatgtactattcacctttcttcacaaatgacttgttctgtaattctctgtgtaagcctttagcaacttaggaagtttgtctttgaaagtcatgagtgatctgtatttcaaatccaatatctttttctcattcctcatcttatatttattgaagcatttgagctattaacctccccacttctttcttaaaacgtcacattccacttgtcctacttcctcatgaattasttctggttccttcaccatctttgtttcttcctgtcacttctytacctcagttcagctttctttwctctgaatagttcttcctaaatctcaaggcttttgtacatgctgttcattgtacatagaatcttcctccatcatcctccacccccagcatacacctggttttctttcacatccttcagatcttggttcaagctcgtgatttaaaattgcaaaccacccagatacacatgcagtatttataataraattgcaaaccaactgcacatacacatcccattctctaaccccctttctagatttatctttctccacatcacttactattttataaacgacctatgttttatctatttgtttattgtctgcttcttctcacttaaacctcatgagaacagagttttttgcctatgttacaaactgatgtatcctctacacctgtaacatgcttggcacatagttgaacaaactaacagatggttctttattaattatctctgtgttgatggcacccaaaactgtgtttcccagtctgcactgttacttctgtgctgcatagccctctttccatttgcttgcgaggcatctttctcgatatgacttcagtatctcaaactgcatatttttaaaactgtcattctcctcttcagcctgttgatgctattcagaaataacgtagatttattgattttttaaaaaaatttttttggcctgggggaagccagcaatctggaattttgagtttaattttaatctccttttcagtttttgtttttaatttgccagttacaccagttgtcctccataaattagcaacttataatccctgatctacagactaagaggaaaataatgtatttattaaccagctgctgtttgcccactaccatctgatactttacatacagtctcattgaatccccatatcaactctctgagaatagacatttttgtcttagtcagaactcagagaggtaaaaccactatgagtatkaaagaataaaggctgtaatagaaatakgattttatacacaagtgtggaagaagatggagaagaacctaaaaggggtagttggagggtcagggaaaatcactgacaagtctcctgaaacagtggcacaggtggacaagtcaggccatacagggaaatctagaaagccagacacagtcacctgccagattgtgactgtggtggataagtctgtgaagggctggtgctcctgcatctgtatgtgggcctgacgtaaccagggcaagagtaagaagaatttggatgacaagtatatgggagaatgagggcaagctggactctaccagcatcactgcctttgttgcttacctcctctaaccataaccagggtaatgagtgttacttgacttccaccatacaagtctcacacagattgctctaacttttgaccatacagggaagtggatcctggggaacagaattctagcttagccaagttgacacagtagaaaaccacaataattattgttatttcactcagagaagtcacttgcttagtaggcttacatatcaggttaagygtcataacccactttaaaaccctgtgcttgctcagtaatctcatcctgcctacaattaagtcccttagtttattcctctgtaatctgattccagtctagctttgtagacccacatckgagtgaccccttccatgcactctaggttgtaagaaaacatactctccaaacatttgtatgtggcttttcacctctggacgttgctaatattccttttcctttgcttgaaatgcttcctttccacttgcttctgcttgtttctcttttcataaccgtcagagtttaatctatctttctatacctgtttccaggggttcaagtgtcaccttctctataaaacatttcttcatcttttgtcccccttagttctgagcaaaatttcccttttctgtattcccataatacttcattcatgccatttttatggtacttacctctgtttatctttgctggattgtaagctggtcatatgtcttattccatatgcccttgtacaatgtactatttgatgaattagttatcctgtattccactttgcatctcttgcttggaaagttgaatttggaatgtgtacttctgttagtttgttattaatttagtttcttcgtgtgcctttctcattccccaatttaaatattattttatatatatatattttaattcaactactcttctccaactgtagcttagcttggagcccatttttcatgaaaactaaacagacatattttatccttttaggctgtgatcatcaaatgtagtgattctctttatccccatgattcccttgagatagtgcatgttgagtgtcccttatccaaaatacttgggtccagaagtgttttgggttatggaatatttgcattatacttaccaattaagcttccctaatctagaaatcagaaatttgaaatgttccagtggacatttcctttgagtgtcatgcaggcgctcagaaagtttcggatttgggagcatttcagattttagaattttggattagagatactcatcttgtacagttttagggtaaaatgttccttttgttttggaagaattgaattttcctgctttgttagagataaaactattctcgctgcccccacccccacccccgccaactcaggattcataatgcagttcagataaattaatttggttccatgattcttttaaaatatctctacttcttaattataaagataaatattaaatctaaataatcaactcccttgaatttacttcacttggccgggcatggtggctctgcctataatcccagcactttgggaggccgatgtgggtggatcacttgaggtcaggagttcaggaccagcctggccaacatgatgaaaccccatctctgctaaaaatacaaaaaaaattagccaaatgtggtggcacacacctgtaatcctagctactcgggaggcagaggcacaagaattgtttgaacccaggaggcggaggttgcagtgagccgagatcacaccactgcactccagcctgggtgacagagcaagactgtctcaaaaaaaaaaaaaaaatttactttacctttttaatatggtgtttaattgtaaaatgatgtacttatttatgtacctatttatttagttttctactttagctatatgatttttgactaccttaaatttcagaagacatggattctttctgataacttagtatatacaagtactaagagaatctctaaaactgagctggaaaacctgtgggagcaaaataagttataactgttacactgttaaaatataagtagatcataacataacagagctgaagtcaggaacacctcctttaccctgcagttggaagaattggggtaggttaagagagagtctctatggtccctttcatctgtgatgttttatgactgaagtattctgcatatgctaattctccatataactgaagcacatcacgtaggtggcaaacttttaaccatttcagatgaaaatctttcttattcttttatttgtatttgccttaatattcttactattatccttaaacttttgttcatactatgtcttcaactaaggcataatgagcacagtttcaccttttcttgatgaattcaaatcattataataaagaacaattctagtattgtacttttaatataatgatatagtattcttgaaatattttgaagtgtgtacacatcattgatctaaccccattcagccccaaaaagatattccattttagttcttgtgcctgtttttaaatagaattttgtaatctacttatcaaaatgtcacttttcttttcttcctgtttttatgtctgcctttaacactcttctaacatactactacttttttttttttttttttgagacatagtctctctctgtcgcccaggctggggtgcagtcaagggatcgtcctacttccaccttctgagttgctaggaccacaggtgcacaccaccatgcctggccaattttaaaaatatttttttgtagagacagggtctccttatgttgcccaggctggtctcgaactcctgagctcaagcagttctctcactttggcctcccaaagtggtgggatttacaggcatgagccaccatgcccagcctaacatactagtttttatacagggttttataactagttttttagagatttgtgtaaaacaagagactttaggagcaacaggcttacctgttggtaaatgaatgttaaagcatagactttgtaaatgtttctggcaatccagagtccaaacttacttctggagttactatgttcaaaatccagtagtttggacaaagtaaagagtgtttttctttgagttgtgccagtttgcattaagtaatcctaataagtagtttgaggagtaatccttaattgcctctttttacttttcgggagtttgaaaggttacttactgtctattagagactttatatttaatgatgtaataaaacttgaagtcatggcttggttatcatgaaagaaaaattggaactagtgagtcatttgaaaaggaaataagattactagttgcttaatagaaattattttaaaaggttgyaataatttttttagcttttcttttgattcactcaagactaacatagatgtcccaactaattctgaagattaaatagttcttaactgacagtaacacttctaatatgataactaccttgasttttctagagggaatgctcacctttcctttgccagagaatacattcaagatttgtaacactgaaaggaaagttaaggcatgagatgtattaggaacaaggcatttaaattgctgaaattaataaaaatcactaggtgaagtcataataaattgcaagtataagtattttcaaattatttggagttgacaacaaatagtgccagtaaaaagtgttgtttgttttcttatatggaaaaatactgacttttcatttcctgaggaaagtacctttgtgagtgtattagttttctatcgctgccataacattttagcacaaatataggggtgtaaagcarcacaaatttatcctctccatttccggccagagctgtacatctgtaactaagtctgaactgagacttacagggctaaaatcaagatgtcagcagggccggctcctttcgccaacagtgtctccagaggagaatctgtcccttgactcttcccagcttctagtggctgctggcattccttaccattggctayaacactcaaatctctggcaccatagttgcattgccaccccctctctgttagtctaatctccttctctcctcttataatggcacttgtgagtacaattagggcccacccagataataccgaataatctccccatttcaagatcgtttaacttaatcacatttgcaaagcctctttctccgtataaagtaacattcacaggttccagggattaggacttaaatattggggaggcattattcagcctacgcagtgggtatggatacgttttgaagtaatgctgtgcatctgctttcatatttggtttccctctttcctaccgcccccatcccccaccattcttttcttccttaaaattcttttttttttttatactttaagttctagggtacatgtgcacaacgtgcaggtttgttacatatgtatacatgtgccatgttggtgtgctgcacccattaactcatcatttacattaggtatttctcctaatgctatccttccccactcctcccaccccacaacaggccccggtgtgtgatgttccccaccctgtgtccaggtgttctcattgttcagttcccacctatgagtgagaacatgcggtgtttggttttctgtccttgcgatagtttgctcagaatggtggtttccagcttcatccgtgtccctacaaaggacgtgaactcatccgtttttatggctacatagtattccatggtgtgtgcattttcttaatccagtctatcattgatggatgtttgggttgattccaagtctttgctattgtgaatagtgccacaataaacatatgtgtacatgtgtctttatagcagcatgatttataatcctttgggtatatacccagtaatgggatcgctgggtcaaatggtatttctagttctagatccttgaaaaatcaccacactgtcttccacaatggttgaactagtaaataggaacacctttacactgttggtgggactgtaaactacttccttaaaattcttaagctgactagttgtagtatctgtatatcagcttctaacttgtttatsttatttgtgaaaacttgtttgtagcttagggttgatggagcctcaattcataagcaatatactgtctttaagagagttaaaaatcagtctcaggtgattgggtcctgggcagggagttagcagtcccggactttagttccaaatctgctgttaaccatgtaattttaaacaagttccttaatcttgttccaagtcttactttttttcataagtaaaatgtttcttatagctttatattctctgttttaacaaatattgaagacttgtgtttagtggttattttaaaatctcatcttttaaatttaaattttatttcactattttctagaattatataaccactttttccccttgaacattttgtactattttcataagcatctaatttgaagtttaaaacrttgtgtggttttgattaacaggaggatcaactttttgtggcattgcctcactatgtctgatgggtaaactagaagaagttttttcagaaaaagaattgaacaggataaagaggtggtgtataatgaggcaacaaaatggttatcatggaagacctaataagcctgtagacacctgttattctttttgggtgggagcaactctgaaggtaagagaaataataaaaaatgagaaacctatattctgtgttcatatagattgtgctaaaaaggtttratctttgtaatgtgtattaaatattgttaggtttaggctactggattttctcttttgctctgccaaagctagtctctgtatggtttttccatagaaatcagtgatctcttgtgctgcttgaaaattttcattcttggaaaactcaagtaacccagaacttgagttttatgcctacttaaaaccttacatagaacatattaaatacttactttcttgtgggtataaggtaataaaaaagttggaactgactagttcatataaatcagggatctgtctgaaaatgatagcagtaaaggttttatgggaaggtattaatcttaaaagacaarccatgggtcatttcttcaaaaaccatgtaaggacttttttattatttatttgtttaaaccttctgaaactcatcaattgacatgccagcacattttttcccatctctactaccttttaatatacctaattccgtaaggttatttagtcactaaatacacacaagttttctctgtcttaaagttgccttttcatctttaagaattgttaccttgttctgatattctgccatgtaacaggagtctgttagaggagtccatgtttgtcttctccataatatcctaattttttctcttaaaatttatgtataaggttgaaaaaaatttggaaaagaatggtttaaaatgatgacagtagtctccctgtctctcctcacttgtagtaccatttctcaggtgcatttcaatttttttggactgtgggaaatttcaagcatattcaaaagcaaagagaaaggtataataacacccatgtgtccatcaaccagtctcaacaattatcaaccgaaagctaccctttcttcatccatactctaattcccttcaattcactgaattattttaaagcagatcccatatatcattttttatattctctggaaattttttaatataatctctaaatgaaaataactttttaaaaaaaacagaaccttagtgtcattatcacatctaaacaattagccataatttcttattatcattaaatatccagtgatttcctgttgtatcacgtatatttcctattgtatcacatcaagaggcatgtaatatccaattatctctccttttaatcaaagagctccacagttgaaaatatacatagcacattatactaacagtttaaacatttgtaagtatacakttcactagcattaattccatttacaatgttgtgtaatcgtcactaccatgcaaaactttttcattatacccaacataaatcctgtatacattaaacagtaattccctattcttctttcccctcagcctggtaacctctcctctgctctctgtcactatgaatttgtctattctaggtacctcatataggtgaaatcatacaatatttgtccttctgtttctggcttatttcacttagcataatggtttcagggtttatttatgacatggcatatatcaaaatttaattttttaatggctgaataataatattccattgtatatgaataccacgttttccttcttcatttatctgttgatagtcacttgcgttgttttcaccttttggctattgcaaataatactgctaaaaacatgggtgtataaatatatgttcaagtccgtgctttcatttttcaggggtactgtatgtatataggagtggaattgctgggtcatatggtagttcttcatttaactttttgaggaaatgccaaacttttccacagcagctacaacattttgtattccctctagcaatgtatgagagttccattttctctacatcctcaccaacatttgttttttctgtttgtttttatgtatatatattaatataatagccatcctaatggatctgaagtgtcatttcattgtggttttgatttgcttttttctaatgatattgagtgtctttctgtgtacttattggtcatttgtatatcttcttgggagatatatctattcaaaccctttgcctatttttaaatctggtttcttttgttataaagttgtgggagttcatatattctggatattaatcccttctcagatatatgatttgcaaatattttctcattccttgagttgcctttttactctgttgatggtgtcctttaacgcacaaaagttttttgatgcagtacaattttatcaaaatttttcttttattgattgtgttattggtgtcatgtccataaaattattgctgaatccacggtcgtaaagattttccccagtgttttcttctaataattttatggtttcaggccttaatgttgggcctttcatcaattttgagttaattattttatgtaatgtaaggtaagatccaacctcattctttgacatgtggatatctaattttcctagcaccatttgttgaaaagactgtccttttccatgaaatggttttggcacccttgtcaaaagtcagttgactatatatatgtgaggtttgtttctggacktcttattttattctgttgttttatatggctgcccttgtgccagtactatactgttttaattactgtagctttgtagtaagtttcaaagtcaagaagtttgagacttccaacttttctttttcaagattgttttggctatttggagccccttgcaatttgatatgaatctggtaattgactttcccatttctgcaaaaaagtcttttgaaattttgatgggaattgcattgaatctgtagatccctttgggtagtagtgatatcttgacactgttgagtgttcctatccatgagcacaggatgcttttccatttatataggtggtcttcaatttctttcagcaatgttttgtagttttcaacatacaaatctttcacctttttgttaagattaaattctcagtatttaatcatttyagatgctcttgtaaatgaaattgctttcttaatttccttttggattgttcattgctagtctatagtaactaccaactttttatggaatagttttaacaggcattaaggatcattgcttaaatcaattatggcattaagaggttacaaaacagtggtattctttcattccttctcaatttattaactagcattgttttttaaagaagaattttaccttaccctgagatatactttgtacagagaaggacagataaatactgaattctttcccttaatagtgttcaacaaaatgagttggttccctaccatcccctcagcctttccaataaaatattagattttagagtttgggttttttttttttttttttgagaatcattgtgaacacatagattttaacattttttagtcatatattatatataatatatattagttatatatgacatwtatatatatatatacacacacacatataatgcttaaattgtcctatctttagtctataagaaccctttcaagttgtcccaagtcttttttatttgacgtcagtagtctttgacagctttctgaaggcaaccacttttaaactttttaaaaatgttttaattcttgtggacattaccataactttaaatcacagactgacttcttatcacctttagacattattgatgattcccaactatgagaaattaagatttagcctctcacttttccaacaaattgttacccgttatagttagttctgaatattttcctcatcttctaycttccaatgctatataaggttacctttatttttataatgttaagttaggacacattcatatatttgttcaatattaataatcacatctttcagcctttgcctataggttgattctaaaatttaaaaaccagtaatcaacacttattatgggatagtgaaaatattgtttattgctaagccaagtgcagtgttactattataattttttcatttttatgtaatgaccagtgtgccactgatggaaaatattcctaacatcaagattcaaaaaagtctttttccttatattttattaattaaatcaatgtaaatgaataaatttgtttcctgtttgtaccataactttcttatgagtttagcttttctttttgagaaataatgcttcttcattagtcactaaaagctgtggctctctctggttcattaacatatattaaattgctttgtatcatcagaaatgtcttgaaccctcttacctactgtgcacctcatcttgaacttcacagtattatttatttatttgtattttacttttatggggtcttgagagaaaagccaagtacatgtcctaaatcattaaaaactatatagttttttatgttgcaatcatttttgtcttacctttttctttcctaattaaagagctatacttttttactattttcaaaactgtctgtagcatctggttagtaatttttgtttgctctttttttaaaaaatatttttaattccagttactactagtttataactaatagctcaagagcttatcataagagttaaaatatgggtagataaaattgtactttttaaaatgactgattatgttgagtggattcgagttgtcttttgaatttagcttaatgtgatttaaagggttcagttggcctggttcagaagaaggaaatagagagtcgagaaaaggagagtagatttgataagaaaattaaaaagttaatgtgatttactcatttcaaaagtgctcaaggccccagagacttggtctgagcaccttagctaaagaaaagcatatctaaatgacacgtatctgaaatttgagccaaaggttgatatgagttttatgtcagtaaatttttatttgtcatgtcatttcagcttctaaaaattttccaatacactaactttgagaaaaatagaaattacatcttatcaactcaagatcgccttgtagggggatttgccaagtggccagacagtcatccaggtaattattttctttgtgaatcagaacaacctttatttcctgaatagatcttcaagcatctttatcagaaaaggcatatgatagaaaatatatccagttgcaaagttacattaaataatattttttaaaaggtatattgtgtaagcttaggataaatttagggtattagagagtataaatgaaagagtttattatcaagatgcatgggaatrgtgtgcattttttcccaaatattttacttagtaatgttttatttcatttgcagcaataatgtagatggtctgaatgggtcctttccaaagaagagaattatttaggccatccaaagccgttaggattattagtcatgacttgaactaagtataataaattactcccaatcctgaagggaatcagttcttactcttttcagaagtcattaaataggccgggcacagtggctcatgcctgtaaccccaacactttgggaggtcaaggcaggtggatcacttgaggtcaggagttcaagaccagcctggccaacgtgttgaaaccccgactctactaaaaatacaaaaatyagccaggtgtggtgatgcgtgcctgtagtcccagctatgcgggagtctgaggcaggagagtcacttaaacccaggaagcagaggttccagtgagccgagattgcaccactgccctccagcctgtgtgacagagcgagactctttgtctcaaaaaaaaaagtcattaaataaaatatttcaaatcctgaatatatgtgtttctcacttcccatactcttgttctccaaatttcaacagattcagacaatataaatggcatggcactcaaggcccttccaaaatttggctcctctcccacctctagcatcattctgcagcctacacctcacccgacatatgttttcacctccagcaaaatgagtctatatacagcttccctataaaaatccatttaagtgtgttttgaaataatttcaaacactgacacttttgataagcaagtagttaaagaattagttacaaatatgaaactagacacaaggaatgattgtttttgccagtattgcaatagagtcgtggtttttattatcagcctggaaagtgcctcatcaactcatcttccatcacagaactgctgtggttggaatgtgtgattgaatcagaatataaataaggagctcatgaaatcaatttttgtatttgaaatgagcaggaatatttccttacacccctacttgcctatattttcatataaaacatgcttcctaggccaggagttttggctcacgcctgtaatcccaacagtttgggaggctgaggtgggcggatcacttgaggcaaggagtttgagactagcctggccacatggtgaaacattgcctctactaaaaatacaataattagccaggcgtggtggtgggtgcctgtaatcccaactacttgggaggctggggcagaagaattgcctgaacctgggaggcagaggttgcagtgagccaaggtcacaccactgcactccagcctgggcaacagagcaagagtacatctcaaaaaataaaataaaataaatggccgggtgcagtggctcacgcctgtaatcccagctttgggaggctgatgctggtgaatcacttgaagtcaggagttgaagaccagcctggtcaatatggcgagaccccgtctctaccaaaaatacaaaaatagccaggcayggtggtgcacacctgtagtcccagctactcaggaggctgaggcaggagaattgcttgaacccaggaggtggaggttgcagtgagccaagatctcaccattgcactccagcctgggcgacagagcgagactctgtctcaatcartcaatcagtagtaaaacatgtcttcttagagaaagtgtacattgctttcaaagtcgtaagccaaagtgtgtcttcagaagttaatttctcaagcaaaataatatcttgaaatttttgatatctctagtgcctcaaaactgagaattattttggtcttcattccattttttaaaccagtgcagggtactgttttaacaaataatgggagtagggaaatgacagtctcttaggaaacatttcttgtataaacatacttgaaatacattcagtgtttccaatagcttttttaaaagaaagttcttgaggctttttccggagagttcagttgctaactttaacatttgtgtaaatatttggatgtactacttactttttacagatacattacaatgttttcagagtatgcaatagaaagcatagaagggctttgctaaattgaatttatgtgtaaagatctggtcccagaatctttaatcattttaacaagattctttaaaattaagcttattcttcattctagtgaatttagtggcaaatttgatacaaagggattttatatacatttatgaaagaaacttcaaaagaataaccttttattgtggagtaaatatatatttcaacatctaaagtgctttattatggagtaaacatatagttccacatctaaagtgcttgtacgttgccacttacagataaggagtttttttaaaaacacaatttgaggcttcaaacaattgagttctgatctcattggctgttacaaaaatctttttgagaaacaaataagttttatttgttactttacccagagagattttagttttacacagttctattttatgttattatagatatatattttctgttgtactttttcctagaaaagtttcctagtttctagaaaacaaagcttaatgttgctttgtaccctttgtagttttagaataactatatggatgtaatatgacaggtgaaatcaagtttattttttatagtctgaaagtcaaaggaaagtgagccagaagaaacctaagtattttctgaaaaggcctaaaaggtgatcaacatgggcctccattagttaaataacattttcacaatggcattgagtaagcacagctatttgtcatttctgttttgaaaaataagtgatactgttgtaagtaaagctttttctttaactcttttgacaaagtttgatgtggtaagatgtgttgaactttttgttgttgttgttttgagacagggtttcattattttgcccaggctagagtgcagtgatataatcatgcctcactgcagcctcaacctccctaggctcaggtgagcctcccacctcagcctcccgagtagccggaactacaggcgcacgccaccatacctggtaatttttgtattttttgtagagatggagcttcaccgyattgcccaggctggtatcgaactcctgtggctcaaggaatatgcccttctcggcctcccaaagtgctgggattacaggtgtgagccaccacacccagcctgttttgaactttaatagctcttaaggccataaatgtcggccaattcaaaaatagaaaaaaattttgactggtacaaaactgtctttttaatgttcctrtaactgcaaagctctgagctcttcagaagtctacataagactcctaggcaggaatggccatgtgatttcattggccactttaatagaagaggatcgctgccccctgaaagatgggaaactagtgagccagtgcagaattgtcatggtatgagcactcatattatttcaaccaaatagaatgtgagtttgtttttattgtcagatcagatatttttacaatgactgacattaccctaaataggaggattaaatatggcacagcattccagaatggattatttttgcataagctccttttatttaacacaatgttaggatagtactgcatatggtttaggaactttcagaggtaaaacgtggagcgagggatattgcaacttagattcagagttttgttttcgttttaaagaaaaaaaaacttaatgatatagcattgaagctactcgttttcatgttctctagtaagcaagaggggaaactccccaaagtgagaagtcttacatatgactgctgctactcctgtcttttaatcacagaggttatggacagtatcagctcttcagctggaaactgttttcctttgttaatgatattttcatgaataaaatattttattttgatcatctgagttttttttttaattggtgtttgaggctttgagaaagcaaatatttttaaaactatattagcatttctctaaacttacttttaatggagtgatgggctggtaaatatgtggctaaaatattctgtagaatgtacaagtaagaatgcctattatgatgttttaaatgccttcttttcagatgctttgcatgcatactttgggatctgtggcctgtcactaatggaggaaagtggaatttgtaaagttcatcctgctctgaatgtaagcacacggacttctgaacgccttctagatctccatcaaagctggaaaaccaaggactctaaacaatgctcagagaatgtacatatctccacaygactgattttagattgggagggtggggggatttgyagcataactgtagctcaagtttaaaagccatgtataaccaagtgtgctctttttttaaaaggtagagtcttacaatcaaatctcctgctgatttcactttgggatatggtcttgagccagtaatctttatactgggtttcaagaaaatctttgttgaagtttgaaccacaactttgtcgtggttcttaaatgtttatactgtatttctaagaagttgtttgaggcaaattaactgtatgtgtgtaggttatctttttaaaaactcttcagtgcaaattgtatcttattataaaatggacacaaattttcaagtttacacttcatatagcattgataatcttcasgtgaacacttagtgatcatttaaaaagctcactgctgatcgtagaaaatttgctttaattaattaagtatctgggattattctttgaaaacagatgaccataattttttttaaagaagagtgacttattttgtcttattcttaagtaaagtgtgccaattaaacctgtgtggcctatataaatgaagttaataacttcatagtaagaataaataggtttaactaatgtgatagttttctaaaaggagattgtttgaagacaactattatgtaactgagggaaaagcaacttaactgtatgtgattgtgaatgagaaagttttgtgctatgtgggtcatttatctagacattgctgtggtgaataccagttatgtttgattttattctcaaatcattagttgccttttttttttttttttttttttgctttctaggaagaaaacaatcttttttatctagaaggaaagatactttgtgttttcatttttagccatttgaagtttttaatttattgcccccagtgtgttagctgctctaatttcaaactaatacttttctaatttttttcaaattaaataagtaaaaartacaaaaacagaaccattcaaacagattcagtggtgtaactcaatacatggtcatttttattctcatattttcaggtaagtgaaagggaaatgcgaccatttagagggtaagaaatagggttttgtttttgttcattgttttgttttaagtctatgaactagctaattataaaggaggtagtataaaaactcttcattartaattaatttatcaataactcatatccrttacttgctcagtgacattcagaactattgcgtctagtactgaaatggggaaagaaatctcttcactaaaggagttggctttaagttagtcttggtgataataaatgttgaaatacaagtatcagtataaaaactggattactggtatcactgtttaggcattgtaatactttaaatgttatctttttttctaaatcagagggaaaaaaatgttgtgaaataacagtccttcccaagggaaacactgtgtacttggagaaatgattgatttattattggcatgcttagttttaaacctgagtttgccaactgtatgttttttaattagaaataaaataaatcttctgatggtgggggaaaaagtaagcttaataacagatgttatccgtctatgggttattccagttgctactatttaaatcctggcagattaagacatccatatctcaaactaagtcatctcttagacattggaagttaaagtagcatatatataatggctttaggactatataaaaagcccaaattgttttttctgtatcaccaagaaaggttagaaggcaataaaggtagtaacagtgattttattcataaatgttagagaaaaattccaatctaaaagtatttcataaggctaaatattttctaactccttataatttaataccataagattataaattttagtatgcttctaattgatacacttgtgggagactttcttgtgaaactttatggactagtaaatgttcacattccacagcaactgaattgaccagaaaatagcagcccagtgtgaattgtggagaaactatttctaacttttctaaatagttatttacaagaaaagcatttatcgattaaataaattataagcaatatttcacatatacactttattccttaacaggagcgatgtaatgagggaaaatacgaagtccgaaatctcaaaaagctctgttacctactctatacttgtctccttcccgccccctaattttgtggcattttttttttagaaggtaggaggaggagctttattttgagcatctgtgtacaaatgagattaatcagatcatatggcctaatttaacctgtttatcatttcagtgtttttagatttgatctataatatatatgtgttatyagatctttagttatttatatttaatctaaattcatatagaaatcttgctgacagtggtatataatttgaaaactgttggacctgatcatttttgagagacagttaatgaggaggtgctctggaatcagatgacctgggtttaaatcccagatttgccagttcagcagcatgatcttggaccctaactctgccgtggataaaataagggtaaaacctaacacacagggtttaggattaaatgagataatacagataaagcacttaggatagtacctggaatacagcaaatttcaaattataggttctttataatgatcataaaattatttttgtaattaaaacctctcttctacaacagaaagaggtcttaacagtttaacctcagggaaaatgatgacaacagtgttgttttctaatctccccataagaatacagagcaactaggatagccacagacactattacaacgctagatgacaaggtatctctatgaacttcaaaatacaactaagtgaggacaaaccactgaaccacatagtttcagtatctgtgggaggaagtagaaggaaggcagctggtttctgacagctctgcaaattggagaactacaacactgcccacagtttctcaactacaaagtgcagcgggccaatctaagaacagacactgaaactgggaagtgactacagaatctcatttgcagatgaatgttaaagcaatatgataaggtctgctgattgcattagagctgtctgggttttacgctgtgtacctcttgaagcttatgagacaaagcccagcactgaggacaaacttctagaattagaatccaaatgggcaggatgggtaaaataggacaaaggaaagaagatctagataagtattgggaagaaaggccaagacacagagacattatatatgtgtattttcatatatatatatattcttttaaatcactgtgaaaatgggagctctaaggctgtgaagtcatcctagagccactccttcctcctaaaagtacagaaaaactcatttcagttaaggggaaaaaaagagtaagtgagccaggattacagtccaactccagtcaaagttagtataagaaataagagaataaatagatcaacatcctcacagacaatgaaagcacaccggaaggacatgaccacaagacagataaaaacctaatatttgccaaaaaataaaatgcaaatatgacaggaaatttatattaattagtacagttatcaataaaagtaggaaaaggggaaaattaaccaagtaccaaacacttggagtaaaaagcaaaataaagcagaaggaaggaattaataaaagcaaaaaagaattactagtagaaaaccaaaacaatagaggcaataataaatccaagttggtgatgggtagtgcggggagttgagtcagataaactaccagctaacctatttaagaaaaaaaggaggaagcacaaatacaaaaatttaaatgacaagggggaaatagtaaaacaggaaatttgtttaaattgactattttgagcaattttacacaataaattcaaaaactattttgagaaaaatgcaaattgccaaaatttactctaggtagataaagtcacaacaaaccaattaccgtagaagaaacaaatagttaaaagtaccccttaccaaaagaagcatcaagcccagattgtttcaaggggatttctaccaaaccttttaagattaaataatcccattcttgcttaaacaattgcagagactaggaaaagaatcttgaacctcaaagtgccaaaaaaagaaaaaaaacaaataaagaaaaactcctgaattcattttataaaatgaatgtaatagcattgattcaaaaacctgacaaagatggtaccaaaaagaaaatatagagcaatctcatgaatattaataaaaagttttaatgataacattagcaaacaatccaacagcactttcaaaaggtaatcatgactaagttgggtttattgtaagaatgcaagggtagttcaatactagataatctgttactattcatattaagagttaaaaaatatcttcatctttgcagaaaagacatgatagaattgagcactcacttatgttaactatactaagtagaaattgatgaataatctattaacattgtacctctacctaaaagccagcatcttaaatttcaaagcaaaggagactttccagctgaagtcaggaacaagacatgcccactaactcctctgctacttaacaatgtgttgagagttatagccaatgaagttagacaaaataaagacgtgaattggaaaggaagaggtaaaactatttgcagatatgaatatgtatctagaaagcccaaaggaacttgttgaaaaactaaacaataaaagaacttagtaaagtagctattaaatacaatttacataaaaatatcagtaggcttcaccagacacaagtgcatactttgattccatttcggtgaagttcaaaacagacagcatctatgtatggtgtcagaaatcagcaccctctttcagtcactacctctcttcccaaaggtaagtgctgtcaaaattaccatcaattagttttgtctgtttttgaattttatatgagtggaaccatatagtatacattatttttcaactggctttaactcagtaggactgaaagagggtacaagggagactctgcggtgctggtaatgttctgtttcatgatctaggtgctggttacgtaggtgcattcaccttatgaatatttatcaagctgtatatgatttgtgcacttttctgtatgtataattatagctcagtaaaaatgtttactaaaaagagtaacaagactatatatatatatatatatatatatatatgtatgtatatgcaaacctaaactagttagaagatacttgaagagaagaccacctttgtgatagcaaaagtaaaaagaaaacttaatgtgtaaatttaagacacatctaaaatctgtatgaggaaaactaaaaaaactcttgagaggcaaaaatgtagattccaccaaatggaaagatacatgatattcttagatagacaacatcaaaacatgtctttccccacttaggttcatttataaattcagtgccattccaataaaaattatattgttatttgagagaacatactagaataaccatggaaactgaaaagaattagaggggaccagccatatccgacactaaaacatactctaaatcctccatggcagaagctatcagaattttttaaagtgtgcacactttttggcccagatactctctatctatagatttagcataaagaaacatgcaaataggcaatgatacattttcaaggatctcacagccacatttttgtaattgtgaaaaataagacacattatgatacatttatgtaactcaatactatgcaactgttaaagtatggatattggaaggcattcgtaatgttgaataaatgaaaagttttgtattggcacataaataggaagtccaatggaacagaagaggaattccagaaatagactcagtggcatttagaatacagtaaaggcagcatctcaagttagtgagaaaatgaacttttaagtaagtgctattgagattactggtgcttaattattcagatatttacaattttaaaaaatatatagcttatttcactttgaacctttttttaaaatggtcatttagttttataatttaaagaaaaatgatagttctctccccatcccagcctatactatacccacagcctatacttcctggaggtaaacaccactgttgcatacatctttcagacctttaatctctgtatatagagatatagaaatagagaatattctttaaatatctgaacatttaagtattactcatcccaatacaatatatacttatacaaatagatatatgtatgtatactatacataaagatctgaggtactaaatattccatggttttttttcattcaacaatgtattatgaatgcctttcaatagccatactttaatagttgcatagtatcacgttgcataaacatattaggtcagtgcataagtaattgcactttttaccattttaatggcaaatgaggcactgattaatcagtgccttatttttcacaactacaaaaatattgctgtgagatccttgaaaatgtataattgcccatttgcatgtttctttaaatttatagataaggaattactggggcaaaaagtgtgcacaatttaaatttgatgtttttgtttttgccaagctgctttttaagaaggttgtactaatgcacacttttatcttgacactaagattttaaatatgatcagaaaatgggtttctgatagtaaaactgtctacttgtaataattgtggcattagaaaagacctttgtggcttcgttcctcaaactcatttacgaattataaatctgaattccaaatatgaattaactcacacaagataaagctttaacagttagtagcagtactgtaactagagtgcatgttttctgtctccagaaataacattctttttatgccacatttttttaactgaggtgatcattctccaccctcttctttccatgtttttccatgtttgttcaaacttttcattaaatatcttgaggctctaactaaattaagggtggccattaaaattgtatgtgggattccctgaaccaactggtaatgcactaccagcatataaggtgtcctcattaaagcagttggtgattggtacatgggacctcactcatgtatgtttgcatctacttgtgagtcaaaaagttttcttaaagtataggtgggatcatgaaagacatacaattcactggagaaattgtgaaaaagtaaaagattatgaatttaggctcaaagccaatttccctctcatttaattctacatgagcaagtcaaggagtttggtagagctttatgaaatctctaaagattgaaggaaaacaatcactaaaatcgatttgataaagtgcaactaagtagtatgctagcctgttaatggattttcatcttgtcatttaagtttcagcaattgagtaccacactagaacacccacaaatgagattctgttacagagtatcttttttctactacagaacatactgtagacagttattcagtggttaacttgtggaaataatcagaagatgcttttcacttttatgactggatatattttaatatttatc

SEQ ID NO: 94739 - DNA, 32477 bp, Homo sapiens
aaagcataatacatacattaatataaaacatcattttattaacaaaattgtaaatgtttttaataccttacacattcaataaatgtttagtagttctgaatcaccgctcttctatataatgttaatggtttcttggtgaggtagtctctcttgttgactcagtattttgctatgaaaatatacacaagttttctggatctggatttaaattcttaaaggatagcagaggctatgtcctcttaactttccagttctaatattccttttactgtaataaccacagaagttctttctcacatttctggtaacctacctatcccaatccctatacaaactctctaaattggttggtttattatagactttgtttttcattgcccctcactcccagcctggaggaacctatagatcatttattctacctcttcattgtagacataaggaaacagtaccagagtttttatcaaagtaaagttttctaaacctggagtccccacagatagataaagcatatatggatggacttcttgtaatctgtaaaatttttgaaattttttatgaacttttttgtgtggatttatttggggggaggggatactggggtttatactttgttttatcatattcttagaggggcccgtgatcctgtaaaaatctaagaactatggttttagaggatatttgatattacttttataccatatgactttgaaaaaccacttaaaacaagttgcattaggttatagaacagaggtaaagtgatttcaagtcattctcggctctttggtaagattcattcaaagggagagattattgattgcatcatatctagtatttcaaagtctgtggattggatatttctccgtatcttaacataccaccaaaggaattaacaaagactaaggggaaactatcccttcctaaaatcttttcccccagacctgtaccttgagagtctgtcttctgctttccacccttatccaaacaaaacactaacatgcctgcaggtttgattctttatgtctgcttctccactgaacaaaagtaacccaaagtagtggttgtttacctgattgataaaactacattaaagccattaaaaatctagttgtcaggtagccagcctagtagaatattgcttaacttttgaatttgggtgtccattttattcctcaaatttgggaagtttgtggccattatttcttcaaataagctctgtcccttttgctgccaccattatcccacacccttaatatccccacacatttttctcagatttctgcttatataagttagaaaactcaagtggttcttttgattgtgatgcagctcctcatgggccacactttgtacctcacattagggatctgctgggacttgagtctagttataggtctaggagcatagaggggtggtgggggtaggtcctgaggagaatcagcattgtcttgcttggcagctgcctcaggggaggccattattatttcctcaggcaatgcagggttaacccttcagacaaaggtggaaaggccattaccaaccccaatgaggttggagaggccactacagctggtaaaaaaaaaaactcatcagaatgtaggaactggccaggcatggtggctcacacctgtaatcccagcactttgggaggctgaggtgtgggactcttgagcctagcagttcgtgaccagcctgggcaacatagtgaaaccccgtctctacaaaaaatacaaaaattagcctggcatggtggcttatggccatagtctcagctactcgggggtgctgaggtgggaggatcacttgagccctggaagtcaacgttgtagtgagccgagatcatgccattgcactccaacctggccaacagggtgaaactgaaaaaaaaaaaaaaaaaaaaaaactcaatgttcctggcttcagggtcttcccacacgtccccatcccaacttatagaatctcactctcccagtcactgtggcttattttaccagtagacacactgaggccttttgtaattgcaccaatcaaatgatgaagactggtgtttgattttcagcaattttagcctcatgtctacaggagagaagatcctctttcagggcacgcctataagctcttaggttacttatgtggagcttgagccatgaatttgaatccctgaagtcatcctttttttttttaaataattttgcccaacaatattagaagcaaccaaccaacattggtatatttcttagttttccataaatatttgaaagtattatagggccgggcacagtggctcacacctgtaatcccagcacttagggaggctgaggcaggcggatcacaaggtcaagagtttgagaccagcgtggccaacatggtgaaaccccgtctctactagaatacaaaaattagccaggcatggtggtgtgtgcctgtaatcccagctattcgagaggctgaggcagaagaatcgcttgaacccaggaggcagaggttgcagtgagccgagatcatgccactgcactccagcctgggcgacagagcaagactctgtctcggaaaaaaaaaaaaaagtattatatatagagtcacttaagttcctcacctctaagaagtggttgattaggagtatccaatgcagacattttgcatacctctatgaacagttcatttcttggacaatcagtgctctctgtactattaaaaggagagccaggctgggcgcagtgactcatccctgtaatctcaacactttgggaaactgaggcaggaggagcacttgagaccaggagtttgagaccagcctaggctacatactgagacctcatctctaccaaaaaaaaacaatttggagggctgaggcaggaggatggcctgagcccaggtattcaaggctacagtcagctatgatggtgccactgcactccaacctgttcaagagtgtgaccccatctcaaagagtagagcctttagcattttcaaatctaatcagactaagagccaattccaggaaccccaaaaccaactcaggaaactcatccttaaaattttgttcctctagaacctctcctgttaccaaaatctgtcttaggattttccagagagacagaaccaatagaatatacacagatggtcaccaacttgtcatggttcaacttgagatttttcaactttagggatggtgtgagagcgatacgcattcagtgaaaactttactttgaattctgatctcttcataagatagcaatactctactgtgatcatgggcagtggcggcaagacacagctctcagtcagccacgggatcacgagtaaacaactgacactgttcagtgtactctgttcaataaatcccatgagtcagtcaacaccttgttataaaacaggctttgtattaaatgattttatccaactgtaggctaacaagtgttctgagcacatttaagtaggctcggctaagctctatgttcagtgaattaggtatattaaatacattttcaactgacaatgttttcaatttacaatgggcttattgggatgtaaccccactgaagcttgaggaaaaaaaaaaaaatatatatatatatatatgcagagagagagagagaggatgtttattaggggaattggtttacacaattagggaggctgagaagtcccaccataggctgtctgcaagctggagagccagggaaactaggagcgtggctcagtccaagtctgaaggcctgagaatctggtcggagttcaggtatccaagggcaggagaagatggatgtcccagttccggaagagagagaattcaccttttctctgcctttttgttttatctgggccctcagccaattggatagtgcctgcccacattgggtgaagtagatccttacccagttcactgattccaatgccgatctcttccagaaacactcagagatgtcccagaaataatgcttaccagctctctggggatccgtaaatccagtcaagttgacacctaaaattaattatcacaaacattgtcttgagagcctggcagaattatattcaggaaacttattaagaaactgccattcactcagcaaatatttaatgagcatctactatctgccaattactgttttaggcactgaaaggcactaccaatgtggaactcatattgtagataagaaaacaagtaactaatactcttttaatacgagctaatcacaatgtaaaggtgtaaaacatagtccccacccttgaagaaatttagtctgctgagaatactaatgggtaagcaagtatttgcaataccatgtgacttaggctgttatcaagtaagcattgttgctgaagattacagagggatgctgaagaaagctacatcaagaagcattggagttggctttgattagagaactctcataaagtctgttccaaaagcctcaaaagtcaaagggcattattagtaaagcaggaacaaagctagatgtgattacagattgttagagccagcattagaagttgctgaaacaatgaacaaggagggacaattttaccatagacctcatatagacacatgcagaaactaagtccagtttttaaaagaacattaaaaagcgcaacttttaccatccattataattaaatttctccaacaatgtcttcatcataagaatcactaacatgtattaagcacctgtgtggcaaacattgtgctgatggattcacaggcttagtcgttcctcctcaccacatccctgaggtaggtgctattttaccttcattttacagatgagaaacataagaggttcagagatttaagtgatttactcacttagctagtgagagagagatatgggacttgctctagtcttactgacgccacagtctttgttcttatcccctgtgactgttagaaatcacttagctccatgtaacaaaaaacgtgaaaaacactaaagtttattgtcctcacataagaagtccagaggagttgttgccttgaggctgtcatcagggccgcaggctccttctcttgctggtccctgtcgttaatgtgtgcctctggcctcagatgaactcactaaatggctgctctgtcccacggcatcctatcttcattccaggcaaaaagaaagggaggagcaaaagctaaaagcctttcagaagggcttacttttctatttaagaaggaggccctcctcagaaattcccacctgcatttcattggcaacatctatgctgcttggccacccctagcagcaaacaaggctatgaagtagagacttttgttttccagctttgacaagtgaaaaaaggggaaagtgagttggatgggtgctgaggaaaccaatttatacagtacatgtacaagtagcctacacaatcactctgctcactggcactacagataaagcacatgttgctatcctaacctagagggctcatgagatctagtcctttctttttgaccttatatctctgttctcttcagccaaactggggtttttcgctgttaacatgttcccttttaagcctccaccctgtcatccaagtttcacgttctccccaaccccattcccagtgtagtaaaaggctcctggcattctgccactaaatgtgcattagtgttagaatattctgagcatgaaaaaataaaaatcacaactgtatctcaaacaaaaaggatttttttttttatttctctcccttaaaacaatccaggccaagtgacaggaaggctccagaattttcagtgacctgggttccctctattttgttgctctgctatcttccacacgcagtttccagctcagccaatctcgtctaccctggcaccgcatatagtaggcataaacaaaacagagaagtggagagactgaagtgaaggaaatgatttccgcatcctaagtaagctctaaggtgcttttccacttttcaccttccacttggaattcatagttctacctgaattccactagatggcagcacatacatttataaagtgtatggatggagccactaaactctgaaagcagggaaactacaaatcccagcatgcattattaagcgcttgacttgcttccagacaaaggttgtctcaagtttgttgctcaaaccgagttctggagaacgccatcagctcgctgcttaaagtaagatttcctaatacttttgaaatgaaactttagaacggaaagaggggaggtttaatttttagatgttgtttttttctgcacgttgcctgtttcaaaattaatctgagcagttagatcagtgtaaagatgggtttttaaagagcctgaaactctgtsgtatgtatgttttataaagtagcccaagaaaaaaggattcttacggtatcctaagtgaagagttttcttcctggctcttgaaaacaatggcttcctgaatatgctgtttgtgtctctgctaatcaaaaatcaacattttgattctaacttttggactaaggaagccaacatgtatggttttcacattggatatattgagaggtgccttgttttaccatttcaggccgtgtttgctctcattttctcaaagaaatctgttttagtttgagattacagtttatcaaatgttaaggctttgaccccaaaatctggtcccagaaagacaggaaggccagctaagaggaggttttcagagtgcatagaaaggctgctctgtgcttcggcatttgttctggaagtgcttcttcggttggcaaagattcctagcaaaacctttgactggaggctttacagggccatacacccaatatcactaatgacagtgttgtaaaatagcttttgtgcaccatgcttaggattcaaggaggataaagtatatctttctaaagttatactttagaaactgtcattccatgttgaaatgataaacattccatgtttatcttttgtgtaagaagtaaaaaagcaaaaattcattgcatcaaagtaggtcaggcactgttaaagccaagcttccccatcgcctaaaaaatgtggacaaactcagaggaagtcagtgattataagctgatccctggagccagttcttacataattgtgttagtctgctcctccaagaagcagactccaagatagaattaaatatgcatggattttattaggggaaatgctgttgtgagagagaatgaggagagaactaggtaaggctgtgagagccatcagacctcgatgcaagtccacccgcgagggaggaaaagaaggaaaccaggttgagtggaagcatcccagacagctgtgcagtctaagagaacttcagcaaggtaataaggagcttctctagccagtcatccgttggggaggaggtctatgtctcccagaaatgagtctgccttagtaagcatgcatgctcaggcactggcttgtaacggccccgagaaggtggcctcagcacaaacccagagaggcagcagcagctgcgcctcattgtccattacttcctggggtcagcggtctgcgaggcacaggctcctggtgccacagtggggatttagagaggcccgcagggctttgagtaccatgagacaatgccatgagatcttcccttggacctgcaacaagaaggcctaggtttgaattcatagctgcaaaacactgggcaaataacatttctttgaaattagccacgttggtgatcaggtcctacctatctcatctctgaaacacttctccaatccacctatctctccatccctgctattttctccagccctgctatttcaccagcgcccccactagataaccctagcagcctcctaatggcaccccatgctcctgcccaggtatgttctccacagcagtccttccaaaatacgaatctgatcatttcacaccctttccataaatccttcagtggctgttgcctataggagtaacttgcccttcaccatgtggaccttggaccaagtgtggaggtttgaaatggaagagcatattgggtataaaaaaaaaaaagtttggctaaagagagaactgaaataagttcaaagagaaaggactaggtaatataagccctttaggcaaggctatcaacctgtacaaaatcaggcagataatggaacagagtgattgtgtaggctagtttgcatgtactgtaagttggttcatcaacaccatccaactcactttctcctattcttcactttatcaaagctggaaacaaaagtctcaacttccaacctctttgcagctaggagtggccaagtagcatagatctggtgaatgaactgcaggtgggaatttctgagaaggtttccttcttaaatagaaaggtgagacctctctgaaagccttttggcttttgctcctccctttctttttgcctgaaatgtggatatgatgccttggacaaagcagccactttgtgagttcgtatgaggtcagaggcacacattaatgacagagcccagcaagacttggagcctgtgtccttgaagacagcctcatttgatggtcatttggctcttctccacccccagcctcactactagctctttctctcactttgtgatctataatccaagcactggtgaaatatctcatgcacatgagccccggtgtcagtgtttctcaatcatttagaaattactgattatgcctgttaatgtgttactactgcatgcttaaactttataagaggatcggcagcattgtgggctggactgttcacatagcaagagtctggaagtctaagtttagttctggctttcccattgactggctctatgacattgggcatgtttcagcagtttcctcatctgtaaaatgggagtattggatgtgatttgatttttccatccttttttttttcgatgaatatctgagaccaactatgaaatcttttcaagagaaaaaaaatcataagcaattgatagtgcaaacctcaacaaaagtttatggaagagaaatcaagaagcagccctgagtagtaaggacacaaataatgtcatagcaatgtgtgcaggggtcatggagagagtgatggtggtagtgaggaaactcagcaccagaggctgtcctctccaggtactgaaggaaggataaggtaggttaaagtgcaatatctgggctgggcacagtggctcaggcctgtaatctcagcactttggaaggctgaggcaggtggattgcctgaggtcaggagtttgagaccagtctggccaacatggtgaaagcccgtctctacaaaaaatacagaaattggctgggcgtggtggcaggcacctgtaatcccagctactcaggaggctgcggcaggagaattgcttgaacctaaaaggcggaggttgcagtgagccgagatcactccattacactccagcctgggtgacaagagtgaaactccatctcataaaaaaaaaaaaaaaaaaaaaaaatggccaatgtctgtcaccagtcattacttcagtgggttatggtaaatgtgtttgatatacaaagctaggtatgcagagtaagcattctaggagaattcagatgatgggactacttgcacagaggtgctgtcttcaagttcctgaaggagctcactaaattattcttaaaagagcacactgaactattcattctagatgttactgcctgctcaagatcatgttctacagtataacccattaaacacacatgtctttagattaaaccacaggttccattatgggtcgacttgatgggaaagtcatcatcctgacggccgctgctcaggggattggccaagcagctgccttagtaagttataagttactatctttgttgtttgcctactaactcttgacatattgaattatgtggactgatgccatggttgtttacttctgctctgcttttttatttttttacttttgtgcttctgttgtcttaagttataaaaataaacaaataaataaataggtccctactcctgaccccaggcagatgaaggaatgaatacctcatatttagtacatgacatcactgataaccattgactctgagaaacttctctacttcagtttctctgcatcatgatatattcgctacagagggcaaacagggttacacagctttctgaaattgtgtcagtttagatatatgactccagagttataagacaggttaccttgttctcctgatttatatcaatttctgttacattatgtaccccacttaagctaatatcggcaccttaagtataacagtaccttaagtataatggcagggtatggtttgacatttatgaaagcactagcatactcttagtaggaaaagtgttgaaacaaccaatttttctcttattatttggagtttrgtaactcaaactcagaaatgatatatagtctcattacagaagagcagtattttgagagtattgaaaacagctgtcatttttttaagaacgttattttgtttgatattacttaaagggactaagtcagatgacaagcacaatgtatgtcacattgttctaattaatgataaaaataataacaatggagaaggggtaagactagatagtttaaaattctagctatcttatagggaaaagaacaatgaaaataagataaaggagaaaaagaccacatgatgttccattcatgagcacagtttattcaagtaaacaaaggatttatttgtactttgtgtctactaggcttttgcaagagaaggtgccaaagtcatagccacagacattaatgagtccaaacttcaggaactggaaaagtacccgggtaagcaactcagcagcttgaatttgggattcagtgtctgcaaggtattataaagcatggcgctcacatgttgaaagaaaattccctagctactgagctccactgccgtgctttttagattctctctctgatatgaaatctatattttgtgaacctatagacaaaaatctgtgacttacatgcatagaaaaatttgaggacgaatacttaaaatcctttatttagctaacacatttgagggattcagttcctaattacaaacttacatgtgaaaatttactagttgttaggttaacttttcatgacagcttttcacttctgtgccctcctcctctaggatagccctgtccaatagtaacatgttgtgagctgcctgtgtaattttaaattttctagtatccacattaaaaaagtaaaaagaatcaagtgaaaattaatttaataatatattttcttttatccaatatatctaaaatataatctcaacatgcactcaagttaaaaaattaatattttaattttttcttactaaattttttatttaaattattagaagtttcttacaaacttcaaacattaattttctcctctttgcagcttttctcttaattttctcttctttgaggtataattgagaaataaaaattgcatatattcaagatgttcaacatgatgttttcatatatgttgtaaaataccttgtgaaatgattatcacagtcaagctaattaacatatccattacctcatttagttacctctgtgtgtatgtatgtgtgtgctaagaatacctaggatctaccctcttagcaaatttcaagtatacaatacattattaataactatagtcactgtactgtatattaagtcttataactgcaagagtgtaccctttgaccaacgtctcaatattttcatactaaatctttaaaattcatgtgtattttacacttgcagcacatttcatttcagactagctgcatttcaggtgctcagtagccacatgtggctggagacagcttagctctaaaatcacacatcatcatragaaaccctaagagagtacccagattattaggtgtgtaccaccacttcttcaccccactgaaccaaactccaacaccaaaggattttaattgcagtttacccaaagaaatcagaacagagaacctatatgaaaggtaacccttacagcaaaatagaacaggttacataatcaaacagcaattagttccttgaattagttaattgaattggaatatgttgaattataattcaaacaagtcaaagtaaagctgctgcactggggaagcacaaagataaggaaatgtttctgaaacaaaatttcaagtcttccctttctttatgaatcttttatttctatattcccccaaaataaaccatatacatattatttataatatattataaattataaaatataatacacattatagataattatatattatatgtattatacatatattattatatattatacatatacatattaatacattgtatatattataaattatattactatatattatatgtattattcatatattattatatattatatgtatacatattaatacattgtatatattataaattatattactatatgttataatatatattatgcacattataaataatatgtgtatatatttataatgatgactgctgcttttgttagacactgtttggagtttctcagcaactagtgcagtgtgtatctctcaggtgcccgccatgccagatctctcatgtctagccttcaagggtgtcatcccttcttctgaccctctcatttcttctccttgcagtttagtccagaaatacatgtatttgactggatacccttgactaacagagtcatttctaataaataatggaaatgacataaaggggaagctcacaaatagaaacagtctcttattccagaacacttgctcttctccacccctcactcagacaaaattctgattactgtataggtaccagcaacccagtctctggcaggggaaggataggggaaggacatcttgaatatatgcaatttttatttctcaattatacctcaaagaagagaaaattaagagaaaagctgcaaagaggagaaaattaatgtttgaagtttgtaagaacttcaaatgagcccattttcagttattactgctggcttactgagaaacatctaatgtacaccagtcattctttactataaagccattgctcagaaaggacccttattattcaacttggaaaatggacagagaggaaggaagagggacggatgggttattggaggagtcaagatggactttaagtttactaatgagactctgaagattcttaagaccctagtaagaaggtcagcaatctatgaagcctagctggatagatgttgcaatcttcacacttcacacttcaaaacagctaaaccttcaaggctaaacatttttaggaatagtgcctcttgttttatttttcaggtattcaaactcgtgtccttgatgtcacaaagaagaaacaaattgatcagtttgccaatgaagttgagagacttgatgttctctttaatgttgctgggtaattcataactttttagtttcactttccttacagaaagttttctatgactttcattcaaagaattttcataatgtggcaaaatcattcattgtgaaccatgacatattccttgggaaatatggctagattttacacagcattttcattacacataaaattcagcaggtaagacagccttagagtttgacatgatctggggcaaatgaggtctactcaagacagatggtactgatacaaagctgtattatgtgttacaatgtatggaagttaaattaaagcaataatttctgatcatctattttataaatagtcttccaycctcatgtaagaatacaccyagaaacatgaaacaaatagttagcaaagttagtttctgagcatctattaaattttcagccatgtaggggatgtagaaataatcatgtggttcctgctgtcatgaaactgacattctgactgaaatagcagagctttggtacatggaagtcacagccaacaatattttataatgaattacataatttgggtccagaggaccaaatcagtaagggttccagtgttttggaagcttccctcagaaaacgtaacttgaaaaatagtgaaagctactttacgggtttgttttgttctgccttaacgtctctcttacaacaaactaacatctctcagtatgttagaacactagcagtatcactttgctgctctgagatgttsagacacttgttttccttgcaattttgatttcccttgagaattctaaatctgtgccacctgagggcactgttgctcttgaaataggaatcacataggcaaatagggcagatgttttttctctctctcttttttttttctgaaacagggtttgtcttggttccccaggctagagggcagtggaatgatcatagctcactgcatcctaaaactcctgggctcaagtggtcctcttgcctcagccttcaaagtagctgaggctgcaggtgtgtgctaccatgcctagccctgttcgcctttatttgttgtttgtttttaatggcattgatgtttccagcacaattaatataaagcttcttatgttcggtgaccatacttttgtttggaaaacaaggatcttgttttcagatgacatttctagcttaagttgttgggattcttactaatataatatactaagtgatactatgaattgtttaaagtcttgataagggaaagagacagtggtctaagtcactaagtgacaataaaaataatcagcagatggaatagaaaaattttaatggcagttattcttccattgtttaatcactcttctagttttgtccatcatggaactgtcctggattgtgaggagaaagactgggacttctcgatgaatctcaatgtgcgcagcatgtacctgatgatcaaggcattccttcctaaagtaagaccaccaccaccaccaccaggataagcaccacattaggtctctgtactgggcacacagaagggattcccacatgtgctgaagagtgataataactaacacaatgattaacttgcattgaacatttatatcaaggcatttcacataaattaatctatttaaccttccagctcatccactcaaggaatatttattaagcactttccacatgccaggctccattctaggcacagaagacacataagtgaactaaacaaagtgccttctataaggcaggttccattattgggggtgagatgggacaattagtaatcaaatagacatagaatatgtggcgtggttttaaatataatgaagagaaagaagctaggatatcaatgcggcccctctggactccaccgcaaaggtgaaactggcatagcagtccaagaagtgagacagctgatcattcaggtaccttgggagatgattccaggcagaggtaacagcagggaggcacacgagactggaatgatcgtatgaggtagatactattatctcatccattgttcagaagatgaaactgagagttcagacaacttgctcaaggtcacccaactagcacatggttagaaccaagatttgaagcctggacgttgagccccttcgtgaatttcagtctaggctcacactctcaagagggatgtaccccattgcttttctctgccctgaagcttctcccttcgctcttgttttgatctgaaccacagtggtactgggcaggtgagagacagtgtgtgctcaagacagcattcctccttgaattctcaagccttcacacaacgcatcaatgtttaaaattttattttataaactagcattaagtacctcttggtataaatcactatataaagtgttctaggggagtataaacatgagcagcgtacatccctgatttcaaatgagcttataaaccagtagtagcagacagtgcaggctgagacaatgaaaggggttgactgggtacagagccagctcaactcaaggttgtaaattgaacctagtgaaatgcagaagaacaacttttcccttccatcccagctggatttgwtgtcctgtccatgtctgggcaggagaagagctttgttaatggcacagcagggctgatattctactctgaatattcaacctaatgttaagaaggttccagatgaacattaacaggaaaattagagaaactgacttagtaatgaagggactttgaaaaatctacttgtttagtgcytagaagggatttttgggtgggtccacagaatgttgaactagcaaatttttataacaaattgttttttttaatgtaagttgattttttagcctatttggagtttatgagaaactatagtatttggaacacgaatgtatttttgaagacagatcctttgcataggttacaggggtagagcagagactgtggtataggaggaaagcttaggtcatcgtgggtaagactgttgyacatgcatgagactcatttgcaaaaccaggctctaaaatgctttacaaattttagtaaaggaagtaggtgtggagtacagtggagctgaaatgtaaacttgtgttaatttttaaaatatacaaacattaacttgcaaactagtgagtttgcttgtgatttacaatatcttaacaattatccatgtgggccaaaaacacagatttgtttaaaaaaaaatcccaagagatgttaatggcaggaatatggtattagtgcctcttgtttaaagtgaccttgacaaaatcgaatcctggtcttggactctatcatcagaagtccttaggtgcagtctgcgccctgcycctaattggccatgtgccatagagatggcacttgtaccctctcagtacatatttcttttagctaaaaaatgaggatgataggttacacaatcacttccagccataattatctatgatcctctgtatcattaactatgacacacatatcccatgttagaactttccaggggaagctaggatttggagtctaggcagctctggaaggtcagctggtcagaacataggaacactcataggaaatttttattcatggatagatacacaggaaagcattccaagactggaagatcagtcaaaaggcagagaacaagttgaaaatactttaagaagaggtcaatgcagaatccaggctccaccagaagagaagatccattagggcaaagatttggggatatctttgttatttgggttggtttgtttgcttgcttttttcccccaccttgctgtgtcttagaagagtcttcagcgtatagaggtgctccacaaacatttgtcaaataaataaatgaatcaaggttgttagtccagcaggaaccactggagacccaagtggccaggttccaccagggttaggggctgagctctggccaatggagacagaagggctgggtcagagtaagactaactagatacagctccagggactcttaaggggtatttctagcccctacctaagcttctgggaggtcaatcctagatagcagtactatgtaccaggcacttgactttatagtcatgcctgccagagaaggctattgcatggggagccagggagagcctgacaccatgacgacagctcctgacctggactgggaaggcagcatgggaacaggtactgactaggggctctagaagcagcagagggacctcggttgaacttggttgaatggatagtgcaagtgttagggggcagcactaatgtaatgtctcttaggtggctttattctaaggttttgcctgagataatattgcatttctagagaggactagagattgaacctacataataacccatctttatgtattaaattggggtatatgtattctatatgtattttaaatggggaatgctatttgctaaattggataagaaagaacaattttaaggcttacttttcaacaccattacacttgaccaacattcttgacactttttatgagaaccccatttcattatgatcctctttattatataaaacacacaattaagttaaacattattttttcccctgctgtcttccttagcttggttgggttacagtcagcctctccttgtatccacttactccattcagcatagtgccttggggttagtttagattctgtttttaggggcaattagtagctaaatctcagaacaaagtcagaagaatatcctaagaaatcaatcatcttggccacaccaatcctggatccattcaattatttactttttcctttcctacacctctttttctaaaagctgctaaagaaactcgtcccaacagaagtcattttttttctctggccctttacactgcctattgagacttctatgtacatgttataattagtaaagtttgaaaacatttttaaattcatagcagttttctttattatatatttatttagctataggacagggcccagcaatctgtgttttaaactagcacctcaggagattctgattcatcaacatttattgactgcctactgtgtacactgtctaggaggacaaaacagccaaagaccctcatcttaataaattcacactttagtgggggaattctgaagaaggtgttcttaggaaacactgccctaaattggtgaggcccaccatccctgcagcaaccatctacaaggtcctgcccatcctgcctcagcsctctcctcctcagctacccatagacatttctgcagctccacctttatcactctttcctgaagcctgcatcagcttccactagtctctgggcaccacagtaatccttgcaatccccaagtctgaacatgccacttctctgctttaaacccttcagtgtcactgcatcaccttcagggtaaaacccaggttctaaattcagcccttgttgacctctgcagcctcattgcttccacaccctgcattccagccagacccagcccctcctcccagttcccgatggaacctttatacctgtgtacccactcctcaaaacatccttttcttttatttttctgactaatactctagtgttcaaaattcagcccatatccttccttctcaggaggtcccctctgagtgtcgcccagcctgaattgctccctttctgccctcaccctgctgttagatctctgtggaggtctctgctgtggctggatgtggattatgtgagccactctaaccagactggttgcctcctgtaggcagtaatctcctggacctagcacaatacctggcctcagtaggtattcaaaaattatgtgttgaatggagtaagtttcccaacatcagtaacacacaataacaacatttattcacatttcatttaagtcagcattcactcgtagtcttgctgacattcttgtaccatgggaaggtggtaatccccctgggaaatgccagtgagtgcagtcacattgccatcatttcccagcaatagttgatgaggtgttttgggttcactgttaagactgcttaatagtgcttaatgtgactagctaatacagtaattaaattcattctgcaaaccctaagaaaatgcaaatctttttaaaaggtagtattttagcccacaaagtggatttttttttttttgtatttgttttgttttggcagatgcttgctcagaaatctggcaatattatcaacatgtcttctgtggcttccagcgtcaaaggtgggtctgtctccttccgaggactgcgatgctcatacacgcacatcattaagagctctgcgtttgggaacaggcatagcagagattataatttcaagtattgaaatgatttcaaaactgcttttttcaaaattggtattaagttccttaaccacagatcttttgctctcgatgtgagccagtggtaaaattaaattaaaatgtggggtatttttgccctcccttttattctttctaatggacatggaaatgaacatcaaactgggagaaagaaccatttaacatttaattaatttaaaatagtgtattgagcaccggtatgtgctctggccataaaagaattcacagtccaaaactaggagcaaggcagcaaacatcatcttctccagtgtgatgatatataacagaggtttgtacaaagcgctgtcaaaatacagggaaataactgcctgtgagtttgtggaatgcttcacaaagacagttgatctgagccatcagcaagaagtcaagttgaaggacaaggacagcagtrcaaaatgtggattatgtcacaatmtggcatagttggatctgtgagtttaaaatgaaatagttactgctgagataccatttcttctctttgcaaggatacacatattcaacatacacaagagaggaatgtaaagaagtgcctaggcctcctgttttattgttttgttttgttattaatcttcattttcttttggaatctgcctaagagttatggcaactgatgatgagaaactaagactaccaatgttaagtaagttcagcatttcaattaagtctcaattaagttgtgcctatactgatattatttccctagatccagaaactgactctattgaaggaaaaaaatctgatatcaatctttttaaaaggggaggaatgtgggagaaagcatgaaaatggctactgggaaaacttatttgtgttacctttctgaaggaaaatacattttttattccttcaattgttgaacctttcctccaccctcaggagttgtgaacagatgtgtgtacagcacaaccaaggcagccgtgattggcctcacaaaatctgtggctgcagatttcatccagcagggcatcaggtgcaactgtgtgtgcccaggtgagtaaggcacacctgttttgtaagcaaagttttactgaaacacttccacacccaatttgcttatgttattgcctatggctgttttcatgctacaaaggcagagtttagtataatagttgcaacagataaaatgactctcaaagccataaatattttttgtctgcctctttaccaagaaaggtgtgccgatccctcatacaaagcaaagaagaaaagcagaactttccttttcttaataactataggggtgtgtctcattttcacaataaccgtagatgtgtttattaaattgatatgtacttttacctggttctaccaatctaaaaggaacttaaggtatctaataaggattataatattctttaaaaagaaatgattgcatatccaggatcaaggtttcccttggtagtgcacaattgataatggggggtggtgtgtgaaagggaaacatttcaatatgacctggggacctttcaaacctgaagggcatgccagaatttagggaaggagttcatggagagaattgtgtggtttagaaagacccacaagagattctgattgaatcttcagttgaaacccactgacttaaagaggggaaactaaacatcccccaagctacagaatttcagcgattgagatgttctgttttatttttcttggaacagaaatgtaaacgtaggtaacgctaagaaaaagaagaatgcatgagaggtcatttcattgggttttaatgtacatcctggcgatacttgagtctagctattcttggtgccatttacccagtggaataagtggtaaaatgatttggaaaatgtggttgtttcagcgactggacttatcaggagattggaaaatatgttatcaaactctttggaacaaggaactagctgtgactcagtgaaccaatcacagaagaaaacttgaggaggactgagtatgtctgagatgctgctgatggttgtatagtcacaaatctccagccagacttgtgtagaccctggcatagtatgtctgtgccatggacacagctgaacccagtgacattggaatactctaaaggcatgggcttgctctacagttcttatttaatagccattagtaccagtcatatgtaagatatgatgttcatttacctcagagggagaaagctattaaagctgtaagattctgaaggagtgttagtgaaagcttgaggtgcacactgttggtaaaactgtggactttaaggaggctattgaggaaagtgaggaaaatattattgaaaattagaaaaaagagtgtctttgtcatacagtttcagaaagtacatcaacactgttgcctgtagtgtgaaggtagaagatgttcctaatgaactgggtgatctaattaaggtgatttctacccagagtcttgaaagtgctggctgcttatagtaaaatgtgacaagagacagataaccaacctaaagagggggttccaaaatggagtcaggctttctgattttgaagatttccagcttcatcagaaaaaaatagcaaatgatgctaaaattaagaaatgttttctgaataaagatcaaatctatggcactctcaggaacatgatctaagggtgaagtatgactgtaaaaccatttgttacaacctcagaaagatcacattatttgccagagtactctttagtctgaaaaagggccctctaaagagaatgaacagtttatgtccgttaacaaaaaagtctgggtaacgtgctctaggagaccataaactaagtggaattttaaaatgttagcgttgttcttatttttcttttttaaagtaaaataactttaaattagattaaattatatttttgattaaaaacttgaaactgtggttaaaagtaggcatttgaaacaatgaaaataggcaaggtgataagaaaaatttagcgccacctgaattaccaaggactatggtagccatgggattgtccccaaagatgccacagtgaacttgacagcaaagaatggttttgagatcattgaggcaaactggctccttaagctggcaaagtgcttgtacgattttatctacatctcagggttattgtgaggattagctgagatcatatgcataaatgtatttaaaatccataaagcatcatataaatgcaatgtractaaaatatatgtccttgagaatgctgggtgattcatccagagtccctacatagtgtcacgaagaatcatagtctgtgtttttaaaatcatagaaatgttattgaagaaattataagcctattaaataagaggcctcaggcaggcagctgtaaagttgtcattttaagtcaaggagaagaatctcactgattgtcatatggaaaggaagtttagttatcgatttctttttcagtgaaagtgagtaaccaagctgaatatccccctttgatttaggaacagttgatacgccatctctacaagaaagaatacaagccagaggaaatcctgaagaggtacatctagcatttaaaatgtatttaaaccttttgttaataaatgccctcttccatacctatagcagacaaattcatagagacagaaagtgaaatggtagttgccaggggcttggaaggagggaaaagagtagttaatgcttaatgagtagagaggttccattttgtaagatgaaaagagttctgcttgggaagctgaggctgggggatcgcttgagcccaggagtttgaggtacaacagtgagctatgatcacaacactgcactccagcctgggcaacagagcaagactctgtctctaagaaaaaataataataataaaaataagagttctggagatggacagtggtgatggtggcacaacagtgtgaatgtacctaacactattgaactgtacacttaaaatggttaagatagtaaattttatattctgtatactttaccacaacttttgaagatgaaaaaataatgccctcatcctttaacattagctttctgatgtgtcacaatatctgtgggttttagtataacacaaacaatttgagtaactttggcaaaagaatcaccataaccctagttgattattcatcaaggcagcaagccagtggattctcttgcctttaactccttgaacaagatgcaggtgagcacatacagctgcttccatcactaatgtctggtatggtctctggtcacaggcacggaatgatttcctgaagagacaaaagacgggaagattcgcaactgcagaagaaatagccatgctctgcgtgtatttggcttctgatgaagtaagcactattcttcccaaggagttcattaccctcaatcacatttggccacaatttgctcatcaaaataatatcattttagagagtttrtggcatatatgtgctaagatgctacatttataagatagggataagttctcatttaatttgctcaaagaaagaccacttcgatctgagccactaattcttccttattcagctttacataaaatcttgtagcaaacaaaatggaggactaaaaaagttaaagtgctcaattttctgagagacagttcctttcaaaaattataattggggaaaccctgattaaatgcaagtcaaaaaattgaacctccaggattataagagctctaagtgaaatggggagaggattaagcagatttgtgttcagtggacacagaattcgcatgtggtgttttagttttacttgtgacttgtttgggagaattccactggctcttttttctctattaattcttacttgtggccgggcatggtggctcatgcctgtaatcccagcactttgggaggtcgaggcaggcggatcacctgagttcaggagtttgagaccagcctgaccaacatggtgaaacctcgtctctactaaaaacagaaaatagctgagcgtggtggcrggcgcctgtagtcccagctactcgggaggctgaggcaggagaatcgcttgaaccagggaggcggaggttgcagtgagccgggattgcgccactgcactccagcctgggtgacagagtgagactccgtctcaaaataaataaatatttttaaaaattcttacttgttcatcatcgtgtatggaaattcctaatttaatctcttccactttgcatctgtttaacagttttttccttaataactattgtttacttttaaatggcttaagatgaaagcaaaaatgatgcttataaggtatagagcacaagaaggtcctcctctgttttatgtctctgaatactacaggaacaaggaactgtaatgtgtgagaagagggaaggaaaggggactaggcgggagcgaggagggaacaactgatagctcctcttcccagtaacttggtgcacaccagatagttggtgaatgtgacaaatacagggattgaaatgtttccgtgacagcgcagtttcttctcagaacttctcccaactattaacaacaattgttaatagctggggaaattaatagacaaatgtttaatgaagaagcacatgagcctttgtgatttctctgaatccgtatcttcagaakagctcatttgatttgggtactgctgataagctaaattacccttagttagccagagcttaggttacaagatatttggaagtgttgtggcttgaaatgtgctacaaaagtacctttggctttttagaggtttccagaggagttcatatgtgtaacagagcttgtcttttaaaagaacttgggggagttggaggtatttctttggtgaagtgactaataactccctagttcacctactgtatattatcagcttttatctattgaactcttaaaatttctctattcattatgatatccttacttcctcttccattgtttcaggcttcagatgaatttagactgtttgagtctttattatccattttaagttaaaagatttttaaacttctaccaaaaagatcacttcagccttatttagaaaatgaaaaatttatgggaataaaccagtaattattttttaaattccttagttttataaagatttggatatctgaaactaatatagaatatttttatagcttaatggattatagttattatcattcatgtaaatttttaaaacacatttagtgtgcttcagctcctacaattatccacttataattgatcaactaaatatatgctgtcttttttaaaaaactggtcattaatatgaccattttatgactgatacacttatgttcaaaagtttattagtggcataaaacttagctagttttgaatagttctgagtttcaaaatgaaaatgtgcttttagcctatatcctaatttggggaatggctatacatcactgttccttaatttggggattctgagaccaaatacctaacagtgacaggtgcttagacaccagccagaggccatttagttccagatcacaggacactcagcagttctaaatcaaccaaatgttaatttggatttccctgaattaagtgtttaagtgaggtttcctgttaggacaagggtaaattgtttagttatcctagtcacaggaaaatttsaaaatacagcctgtatcaaacctggttaattgttctgtctccttgtgtttrtcactgcagtctgcttatgtaactggtaaccctgtcatcattgatggaggctggagcttgtgattttaggatctccatggtgggaaggaaggcaggcccttcctatccacagtgaacctggttacgaagaaaactcaccaatcatctccttcctgttaatcacatgttaatgaaaataagctctttttaatgatgtcactgtttgcaagagtctgattctttaagtatattaatctctttgtaatctcttctgaaatcattgtaaagaaataaaaatattgaactcatagcaggagaatagtttttaaaataaatctcgatttgttagcatctgtcttagtcactttgggctgctataacaaattaccatagatggagtgtcatagacaacaaacatttatttttcagtctggaggctaggaagtgcaagataaaggtgccagcagatatagtttctggttagggcccacttcctggtttgcagatggtcctcttcttgctgtatcctcacatagcaagagcagagaaaaaaagcgagcgctcatgtgtctttttataaggacactaatcctgttcatgagggcactacccttatgacctgattacctcccaaaggccccacctcctaatgtatcatattgcaggttaggatgtcaacacatgactctggggtgatacaaataggccattgcagcatatacaattaaaatgtaaatatgaagaaaaaaggaagtttttgtttttttgtgggggagatgggggttaaggaagaagatagtaatttcaggactaggcatggtagctcatgcctataattcctgcactttgggaggccaaggcaggaggatcacttgcggccaggagttcaggaccagcatggttaacagaggctaaggcaggaggattacttgagcccaagagtttgaggctgcagtgagctgtaatcatgccactgcactccagggtgacagagcaagaccctgtacctaaataataataataatttccacttcatttttcaatattcaaatatttttatataattctgcattgttctgtatgtagatcctaattttaaaattttacaccatcataaatgaacaaaggtaggaaggagtttggcttcaatagcttacagtaaaaggagtaaaggagttcagcctcaaaacgatattgttgacctgttatgttatgaaaaataatccagtgtttatacttaacggatgccatcccttattatttactattttcttagtctaactaaacaatctttattaaaataagcaatgatatttgacatgggcctaagaaatatatagttagctaacaatattgtcagttagagggatttcttttctaaattaagtacagatttcttcaccaaactccaggataacagaaaagaggacataaaatttggacatagtttctggataaataaatgtaaatttaaatataaattatgtaacaggaaacaaacgaaattaaagaaaataaatttttcaagaaaagtaaatttatggatgttaattctgtaacattgtcagggcaaagttttttgtttttattttaatttaagggttttatgtttgttttttacttgttgcaacctcaaatgaccaaatggtatgatgcacactgagatactcaataaatgtgcagtgattcttagccttttttcctagaactttaatattaacatggaaaattctgaaatggacaacaaaaagataacactttgtgtatggggaagaatatcatgcagttgatgacggtacattaaaattcacacaaaaggacattttgactagcattcagaaagagtccattgattataagattatctatgaggttttggaccgggcactacactaccgaattatggctaactttggtttgtgatctagaccaagtcacccaatctatcttggattttagttttctggtttatgaaattaaggagttaagctaaatgacttgggtttcttttcgtgtatcataatcaaaatgctgtaacttctctagtgaattcatagaacactgactcttacaagtatgtcatgaaatactttatgctgtgagcaggtatacatgtataatatatgtatagctatgaacaaataaattttaaataaatgcacaacgaattctacaaaatgggctccaacattaacaaatgatctgagttagtctttctcacagccgaccataaactataaaacatttttataaacactatcagcaataaaaacgaagtaaaatctagccaaaaaattcaatgttctccaaagtcatgttaatcaaatcaggtgatatattaatgaagtacatatgactaaaaggaaaaatatatgtcattcctgtggtaagaggaagctgaatgtcactagaaatttttacaagctttaggagaggaagagttccgtttaggaaaataatcatttcagatgatctgaagaagggtattggatggaacctatccaataggttcatcacaaaagaggacctgagagacaagaatgaatggtttctgactggtggagaaatttgaggataatctcccttgcttgaaaagcggtgattaagattggcacttgcttacaggagtgaaaaacaggtaaggggtgcgcgcgtcttaacacacacaagaggaaatacagagaaaaggaagacacaaacatgaaatgagaattaaatgaaatagaatcacactgctgatagaagggttaaaaatctaaaatacaacaagaagggcaggtgttaagcgataaaggggggcagaacaagtcttttatccggccatttaattggtcaccttaagaaagaatcctatcttcccaccgcagctgagaagacacttctaagaggtacagctaaaaggtggaggactgatagacaacttagaggttggtttcgggaacgataaaacaagtaacgggctgcccggcctgcgccgcggagtcccgaggagcctgcgctgtgctcctctcgcggtgtctcgtcatctccgggaagactcggcgcctgggtccgcgctctctgggtaagctttccgggaagctttcccgggagctcgctggtcctggccccagaagcctgcggacccgcccagggaggataagcagctgaaagaccgcgcggtgccgctccgaggccccgggacgtgggcccatggtcggcctggcgccacctttccgggggaagccacgcgcaccaggcatcgcacgcggctctgcacccgcgccgccggacctgaaacccggcggagggcacacggggctgccgctgcgggccccggaccaacccatgcttactccggagcctgtaccggcgccgacgggtcggacctccctgcgcggtgtcgcccagcgggttcgtgcgaaaggcggggccgactacacgcggtgccgcgccctgagaccgtttatctgcagtcaacgcagcctcccggctcagcctgggaagatgcgcgaatcgggaaccccagagcgcggtggctagaccgggctccgccgcctcccccacagcccctttcctaatcgttcagacggagcctggtcgacttcgccggagactgccaggtgagaggccccagagacactaagggtaaaaataaacccagcgccagcggcgggtaccctgtaggcctgctggaccggagacgcgagcgaggggcccagccttttctgtttgtacacccggtgacgggcgcgtgtctgtttactgttgtaaggtgttggcgtgggttttcttgcttgcttttattttagttctcagattaaccagagggggtgttgcctttgtggactgggttagcatcctcgaggtgctaagaatcatcgtatgctattgactgaagaatataaccttaagacagcagtagctgctgtaagagataaagtaaaacatctcagtaactaaacatagttcaggcttatttctcgttcatgtcaagtccattcacgtgttcagctgttggccttctactcaattattcaggaacccaaactccttttatattatggctttgctatcccctaagaccttggagtccttagtttccaggcaacggacagaaaaagaaaagctactagaggattgcatgaggattgtttcttatgggtgaggactggaaatcacatactatttatgtccacatgccattgaccagacttcagtcacatgccacactgacctgcaagggagactggaaatgtactatggacccaggcagaagagtaaacgattttggtaaacacatatcagtctctgaccatcccttaaagggcagactgcatcttagtcatctttgttactcttgtgcctatcacaccagagaaacttgttaaggctttgtgaggccgaggtgggcatatcacctgaggtcaggagttcgagaccagcctagccaacatggtaaaaccccatctctactaaaaatataaaaattagctgggcatggtggtgcacgcccgtaattccagctattccggaggctgaggctgaagaatcgcttgaacccaggaggcacaggttgcagtgagccaagattgtgccactgcactccagcctaggtgacagagcaagactccatctcagaaaagaaaaaaaaggaaatgaaacttgttaagggatggggttgttatgtgtctaaagttgaaacttaaccatatttcattgtgattgcttaggaatcatttatcatcctttatcatcctgtaactagattacaagatctgaatataggaactatttaagaccgttcacttctgaatcctcagctcaaggactgggacgtaacaagagcttaatagctcttgtttgttgaatgaatgaatgaatcatcagagaggaaaacgagggagacagtttgtcaatgttggagttaggaaatactgagaaggtgacatttgagttagattttgaatttcttcaagtagaaaaagcagaaatgaaactccaggcagcaatagtagtgatattttattgttgttgttttgtttcatgagtggaaatttggaaaacaaccaaacgtttataagtccaacttttcttcattcagtattcaaatattacaatttaacttcagggtagaggaggggaaatacataatcttacaatccaaataatttctgttgactaaaagaatggcagtgaaaaccttggcactaatttttaactttataaaatgttattttctggacatttttgagaaatttcaatacaaaggcagtgttctgatcattcattgtctatgatgattttgcactgtaacaagaagctagaaagatagaaactaaagtttgtaagacagaggttcctcatcactgctgttcatcagggcttctcagggatggttctgcaacaaaatcacctgttatattggttaggatgcttttggctgcaagtaacaggatattcagccaaaactcccttcaaaaatacagatgtactttgctcatacatgaagatgtttgaaggtaggtgggtccagggtttgttcagtagctcagtaatatcagggctctatgttgctttctgtgttcagctaatcttgacttttcttcatgggtgaatgatggctgctagaattgtcccaagaaacccatccacaatcccaacttcccttgcctctttacctggtcatttaaagacaaaaagaggagaggattttcctcctctctctctgtctttattaagaaggaaaatcttatgtaatatgccccaatagtcttgcctacaaattccaatggcaagaaatgaatcatgctcactccttagccaataagtggcaaagaggaatggtgttacagagattgatttacaccaataatgacttatccctagggcgggagaagggtcctactggcatacctgaacacttggcatttagacaggccataagtcatgtctgtcccacttggggtagattcggtctctgtagattctgattttagtgggcctagaaataatattttaaacttttagtaagtatatttcactttggtgaggagagagaatagaaaggatgaaagcaagtattgggtcccttatgtaggggtaatttccttttattcttatctcattatatagtgttttccttcatgagtcaatgaaattactaaatcaattaaccaaataaaatagcggttgttttcctttggtaacttggccacatgtatttgacacacctaagtctttcagataaggtagttctcattcagggaaacactgttagtcattttagtaattaattgtctaagaaagtgttaagccctactctgagcctgatctgaattcctcattgctgggtagggctccttttgggaaa

SEQ ID NO: 94740 - DNA, 86859 bp, Homo sapiens
aagacaacctgttgaaaatccatggaaatggtctggaagaaaatagtttgagataaaactaaggtagtggccattaaagcagagaagagagaacaaatgtgagcagtagtctctactaggattccctaaactgcagagaacaatgtgttcgtgcttgcattttcgttttcttttttagcttaaaacaacagaaacgtattcactcacagttctagtggcgagaagtccaaaatcaaggtgtcagcatggttgattctttctggaggatctgagggagaagctgtggtgtcccttagcttgtaggtctatcaccccaatctctgcctccatcttcacatggtgttctccctttgtgtgtgcccaaatttcctttttaaaatattttaatataatttcgacttttattttaggttgaggaggtaaatgtgcaggtttgtcatatgggtatattgtgtgatgctgaggtttgggatatggctgatcctcccacctaggtagtgaggatagtacccaatagtcttcaacccttgacctcctgcctccctcccctttagcagttcccagtgtctactgttgccatcttcatgtccatgaatacacaatgtttagctcccagttgtaagaatatgtgttatttggttttctgtttctgtgttaatctccttaggataatggtctccagctgcatccatattgctgcaaaggataagattttgttcatttttctgttttgccaatttttttttttttttgaagacagagtcttactctgttgcccaggctggagtgcagtggcacgatctcagcttactgtgacctctgcctcctgggttcaagcgattctcctgccttggcctcctgagtagctgagaatacaagtgtgcactaccacacccggctaatttttgcatttttagtagagacggggtttcaccatgttggccaggctagtttcgtactcccaacctcaagtgatctgcctgcctcagccttccaaagcggtgggattaaaggcatgagccacaccgtacctggcctgttttgccaatttttaaatgtgagttgttcatcttcttattgagctcaatactgagcaaggacctaatattcatattgacttttacatccctttttttttttttttttttttgagacggtttcgctctgctgcctaggctggaatgtagtgccacgactcaagcaattctcttgcctcagccttccacgtatcccactattaagataaataacaggaccaaaaaggaagaatgaaagaaccagcaccatcagagaaacaaaatctaggccactcacagtgcctcacacctataatttcagcactttgggaggctgaggtgagtggatagcttaagctcaggagctcaagaccagcctgggcaacatggcaaaaccccgtctctaaaataagatacaaaaaaatgagccaggtgtggtagcgtgcacctgtagtaccagctactcaagaggttgaggtgggaggatggcttgagcttgtgaagtcaaggctgcaatgagtgggtagagatcatgccacctgcactccagcctgggcaacagagtgaaaccctttctcacaaaagaaaaccaaaatctagtcagaaaagaaaatttcaaagcaacttgaatagctgatttggtcaggctttgtgtccccactgaaatctcatcttgaattataatccccataatctcgtgccaagggaaagaccaggtggaggtaattggattatgggtgtggtatcccccatgctgttctggtgatagtgagtgagttctcatgatatctgatggttttataaggggctcttcctcctttgctcggcactwcttcctgccatgatgtgaagaaggtgccttgtttccccttcgccttccgccatgattgtacgtttcctaaggcctccccagccatgctgaactgtgagtggattaaacctctttcctttataaattacccagtcttgcgtagttctttatagcagtatgaaaacggaataatacggtagctaccaattttagcataaattttctgaaagtttagacattgtcaaaatgaagtatcttctttgggaaacaaaattaggtttaaccttttattatatatagtgacacaggctagctatgacacctattccttatgacatataaatactattattaaaacattttttaataatagctaaaaatgacataaaatgacataaaaatgacatagacaaactccgatcttaatgaggaattacattccacagaactagaacagaatttttccatttcaaattttcaaacatctacatataatatagccatatcatcttatgataccataaaaataatactggcagcttggttgctagttattttataacatattttctcatttatcatatgtagctaaacacagaaattatttctatttcttaactgtagaaaagataaaatattttcaatgcatgagtttactattaccacttaaaacctaaggtagggctgggcgcagtggctcacacctgtaatcccagcactttgggcggccgaggcagacggattacctgaggtcaggagttcaagaccagactggccaacatggtgaaactccgtctctactaaaaatacaaaaaattagccaggcatggtggcacatgcctgtagtcccggctacttaggaggctgaggcataagcatcgcttgaacccaggaggcagaggttgcagtgagccgacactgcactccagtgtgggcaaaagagactccctctcaaaaaacaaaacaaaacaaaaacctaagttaaacataaattagataatcacagtaatttatcttgaacgcctcactcttgaaaatgtgacataaacaaagatagttaagttgtttctgataggtgagaactgcctgtatttaactagtatatggtcattaaagatctccatgtggtttctaagaatgcagagtcatcataagagagtcaatagctttaaaaaacagctagatttaaatagggaaggaaatgtaggcaataataatgtgaactgtattgttttttgctctaattttcatagaagaaaatggaaatattttttggtctcctagacattttaaacaattgctaaaaagttgtcttccaggtttttattttaacaaaagtgtacattatggattctacaagtaactcatttaagaaagccaaatgtcattaactgttacaatctattcagaatgggagaccgagagtggaaaatagccactgaaatttttcttctatagtactccaaaataaaccctgcaattgttttgtccaatccaaaaagggctatctcatgtttttcataaaccagttattacaagcatgttcatgtttcctaaataaaccagcaataaaatgagaactattaactatagccacactgtaatgggacttaagttaaatgtatgttattaaaatacttctcagaatggtcattatttctgagaatcagtcttcatattaaatatttaacaacttttaagaggaagttactatatattcttaagagagaaaaggttttggttgagttttcttaatgtctttaataggaattaaatatttgttgacactagggatcctcaagaaaagaaagcatacttctaaaatctagccattaaatctagtttcatactttctaattttcttcaattatacttgatttacagagaatcgaaactaatacaaatgcagccaccatctggaaaaaacataggtaattcattggacattttcctttcttgactgttaaaaattcctcaacagttaacttatgcaaattagtaagaaggtacaaatgtcaaaatgacaaaagggtacaaaagtcacaatatgatcataccgttttggcctggtattgctatttaagtgaagacatccaaaagggagaaatatgacaactggtatttgcttacttgccaatgaactattacataatgaattttaaaaaatagaaacatttctaatttccagttgtaagggaatgaatggttaggcccattgtgatgttaaaactaaaataagtatttagttgttagggaaaaaatgaggattatattaaaatatgtaaagtacttaagtaaaagaagtggggaaagccaaaattttatggaattgctgcaattctgtcagagtaaactggtaggatcaaaagatctgatgtttataaacacttgatgtgaaacgtttttcattttattttacttttgcattgcttctgatgtttaatgttcctttttaatgtttattattgttaccatgctttctattcaattgcatgttttctactaaaactcttaatatttaaaaaatattaaaatctcacaatccactcaacagagcgtctgtctgaccataattcaatgaatctctagatttggaagagaatttgtcatctagtttatcccttctaaatctatcgaccacccaccaccagagtctttttgtttgtttttttcatctttgagaggggctatcactgaagcaccacatttgtttggggaaagcattctttaatttaaaaaaaaatcttccttagactgaaattcacctcccaataaccttcactaatttggttaatttgttatcagttctatattttagtctacacaaatcttatttttcttctaccagacagctgtgcgattgctgtattttaggtcaggtactacagatctttagaacgttcccggcgaagcaaccctatttacctcagaattatcttaattcatgtttgcactccctgataacctaggacataggagttcaatacttgctgattccttcaccatcctactcggtctgagttccgtttagaaatatcccccttacaatgaaatgctcataactcaacacaatctcccaagtgttgactgcattctggagattttcatcctttagatgtgaaatcctcatgagttgtgtgggttaagtgagggtccttaagtatagaacgttacatatattcactaaatttcattttctaagatttcactcctcataccggccttcgaatactttcttgggtaaggtatctttcttccaacttaagttaccgcagcgggccccgggaccgtagaaacggagatgacctcaaatgccacctatgataggtcaattctaacctgagggaatggaggttatctcctaatttcgttactaaataaaacggtcatatacgtgttacgtgtaagtctatatttctctcccacacactcccacccacatgctgagggtacaacccagccggtagctggggctgcctgttacatgaggccttagataacgacgacttagcccgctttaaaataaacaagtacgctacagagagcgatgagcaggacaggagatgaaagagactggcctgttcccaactcagcaccttctctgcaaaaacctggtatcttgccacggaatgacaccggagacaactccgaggacaaaagaccctggggcatcaagcacccggagactgcctcacaggcgttccccaggcagctgcgtcggcgcgcgcccaccttcctctgcgcgcggggatcacgtgccaggcgccgagctccgtcccgccccttggccctaggatttttacgcctccttcccccgcttggcgaacgtgcaaggatggggactggctgatgggggaggattacctgtgagcctagcgaacccggtaatgctttcagggactgggagccgcttcagatatgcagggagctgcaccttcacgatacgggccacgctctccagcaccatcctggccagcggcgtccactcctctcccgagccccctccgctctggccaagctgcagcgcctgcgccgggagcggaagcggccggcgggcactggcggcctcggcctgggcggcgggcggggcggcgggccctgggaggagaggtgacctgccgggcgccgattggcggcgggcgagtgacgtacgctcgcggcggactgccgaggcgcgggaactggcgggtagcgaggccctcctcggaatctcgtgtgaaggtggccctcctcttgggcctttaacgtctgtagatgctggagaccagcagaaaggatactgtgtgcgatgagataagcatgtgagaatgctttctaaccgaaagtgcctttcaaaagtgagtctcttgctgtctctacttcgtcccctctcgccccgcctcttcccctacagtttggktgctgtggccctagggttgcatactcgyccatgagtatcctccccctacccagaccccagtgcctaattttactccttcacccaaaggccaggcttaaaaaaataaaaattaaaatattttaactaaaccaggaactgtttacatctctgccccttggcaacttaactgcagccctagctccaaaaacctctggtttttgccactcagagaagattcgtagtagtccttccttagatattttcagttccttttccttcgggaaagtggtaaaagaatccaaagctggccgggcgcggtggctcacgtctgtaatcccagcacttagggaggccgaggcgggtggatcacgaggtcaggagttcgaggccagccaggtcaagatggtgaaaccccgtctctactaaaaatagaaaaattagccgggcgcggtggcaggtgcctgtcccagctactcgggagactgaggcaggagaatcgcttgaaccagggaggcggaggttgcagtgagccgagaatgtgccactgcactctagcctgggagacagagcaagactccgtcacaaaaaaaaaaaaaaaaaagaatctaaagccttatgtatggttttctttatgttacaaggcttctgctgaagtctagcgcagggggtccttatggcttccctaggccacactggaagaagaattgtcttgggccacacataaatacactaacactaatggtagctaatgagctaaaaaaaaattttttttcataaagttttaagaaagtttacagatttgcattgagtggcattcaaagccatcctgttgggcaagcttgatcttgaaggttttaattttgttgttgttgttgttgttacaaggtttcgctctatcgcccaggctgtagtgcagtggtcagatcatagctcaccgcagactctaactccggcttaagggatccttctgcctcagccttccaagtagctgggtttacaggcgtgtgctgccacacccaacgaattttaaaaatttttgtgtgtatgtagatggagtcccattatatcgcccaggctggatagttgtttttattaatatctctaaaagatttgaagggtaagaggagaaaatttcactcccttgaaataactttcttgctatgactttgtttcatattttggctgaagtcaaaatgtccgaagttgtgcacttgctgattggataatgtgtgtgatatcttaataatatgcctcattatttacagttctacacttaacaacatataataacgaactgctaatggtccagtatttcattgtgtatgacagtgtaacagccagttataataaatactttccatttttccccttggtatttttattttacagtgagaaaaggaaggaattttttaaagcaatctttcattctctggactgtataaatttagtgtttgtgattgtccttcactaaaaaagaatatcagtaatagagttgaccaaaatctagattaaataattttctatcattataattgttcaaaattgttaaagtaaaacttacaatggaaattctacaaacacgtttagatacaggttcatgtttttgagctagggcagtayagaagatggtgtatacaaagtgatgtttaaaaggttgatgggatttcctttagagagagtttggaggtaaaccctggagcttttttatcctgaagatgatggaacttgaatatccttgtcctctggactattctgttaactgttatctttaatctctgtggatctaatgtagaagcacccttgggtacaactagataccctagttgaggtaggggtaggttggaagtggggtacattaggaaaagaaaatctggaaaaggccattacctattcgtttcttctcttagaggatctgtcatcttgacaagggcaagacgtgctgtgttgagtttaatttttccccttggtattttaaagtgagaaaaggaaagaatttttttaaagcaactttacattctctggactgtataaatttaatgtttgtgattgttgtgcattaagaataagacctccaagcagtttttctttaaagaattaaaaaatacatacctcaatttaaagatatagtaaaatgctcaaatgccaaatgtacagttccaggtaaccaccacccacatcaatatacagaatgttcaatagaggcgtttttaaaaagcgacccttccaaccacatccaccaccattactactattctgtattgctgtgcatgtttttgaccctcacatataagtaattttacagtatgtaattttttatggttggcttacttcctcttagcagtttatgtgaatagctggtttgctattttcaagtagaaaaaatgtagtgaatgcaagtctatatggataaaacttttttgggaggccttgaaattcagagaaaaggtgtggatcatatattaggtattctgatgcattacatgagctatgcgaatgtgtaataggagataattcctaactccaccaatttaaaaatccttattatccacttaaaaggaatattttcttaaattccctttacttaaaatttaaatcctgttttcatttatatttgtatttcatttccacaaccctgccttcttggctgcacatgaaacatggtctaaagataatattgctctaaatagatgtaataggcttatctgaccaccttatgcgatagtgtttttagactccatctttaaaagacataaagaaactgtggtcagaaaactcaagataaatatgtaaatacagttaaaggagtcattatttactttcaagcacttgagcttggatcactcatcttctgcctgtcctagctaggcccaagacttttatttctttcatgtttttttcccattaggtcatccagtgccccaaattcaaatatgatcgttaagatatagcccaaatctctatttccagcccagatttctttaggctaatcttaattctaggagtctaattccaaatgcctactagtctgctcttgacatctttgcccactgtgctattggtttgttcatcagtttcactggtacatgttttctggaaaatattaccttgttggttacattggttgcttatcttttcctgttgcttatcttctcctagtgtatgtcttttttttttttttttttggttgagacagagtctctgttgcccaggctggagtgcaatggcgcgatctcagctcactayaacctctgcctcccaggttcaagtgatyctcctgcctcagccttccatgtagctgggactacaggcgcccgccaccactcccggctaatttttgtatttttagtagagacgaggtttcaccatatttgccaggctggtcttgaactcctgacctcatgatccacctgcctctgcctcccaaagtgctgggattacaggcgtgagccaccgtgcctgrccgtgtatgtctgtttttatactgaaatttggtttgggtgtagtcaaatttattcatctttttctttacaatttgtgttctgggagtcttgtttaagaaatctttttctacccctaaatcacaaaggtattcacctgtgtttttgctaaaagttttaaacttatattcttcatattagggctttactcaacccagtacttactttttgtgcatgagaaagggatctactctcatttgttattattttacatacaracaactatgttctagcaccatttattgaagagttaaacttgtttttgtggtttgtaatgtcacttatctcaaatcaggtttccacacatcctgggttgcttattctcttccattgctgtatttgtataacctctataacaataccatactgtcataattgctacaactatataagtaagtgttaatatctagcaagataagcttccccacctgttttcttcaaattgcattgtgaatgcctggccttgttactactctrtgaatttcagagtcctcttgtcaagttgtatgaaaaacttaactttttactgaaaattaattagggcctcagttttcttctctttgatatggtgataccagtggttatgactagatacaattaattttgtaatatactcaatgaatggttattatcattatcgtctttaccatcaatgaatgaccctttactctggctttcagaccttaaattcagcaattttactggtgaccacaatctcacattctggtacatttttactgccactaaacatyctttgatttagttttgaaaccctgtctttttctgctctgtcagcccattcctggatttatttatttttctcattcctgacaaaagttgttcaaatcttcactattttatattaataattatgtcttctattaacattaccaggcttattttgagctcagatgaccttgatttttagttactagagaagcttttctcaccatcatctctacttggtcataatcccttctatatttagcttttgttctgttctccaaatctaactgctccctgtattctagagctgaatccctttaagaccttgctccatcagttacttctcaaattttaattttttttgttctttactggccctataaattgatgatttccaggcttttagatttcatcagccaataaatttttaaattgggaagtcaagataggtttgccaattttttatttggtcaagaaagggcatttaataacaatataacaaaacactactactgtctacttactgcaaggaattacatacagcattatagttaagactgtagactcttggagccacactgtttagactacaattctgattctactaggataaattatataacctgtaaaaatgtaggtaatacctacatcttaaggttgtgttgtgtatattcactgaattaagacatagatagcaattaaaacagtacctggcacatatacatgcatagttagtatgatatttcatcttcatcattttttttacctcattatcaactcatcttttttattattagctgcaccttgtttttttcacagtggttggtctagatctacatgatcaatgtaattatgtaatgtgtcaatactaataacatggctattgagtatgtaagattgttaytaatataaaatgcttaaggaaccccatgcagatttctggagctctttctctagatgtggtttgtttgacccctccaagtctcatattgaaatttgatcccagctgggcacggtgacccacgtctgtaatcccagcactttgggaggctgagctgggcagatcacttgagaccaggagttcaagaccagcctggccaacatggtgaaaccccatctctactaaaaatacaaaaattagccaggtgtggtagcacatacctgtaaccccagctactcaggtggctgaggcatgagaatcacttgaacccgggagatggaggttgcagtgagctgagattgtaccactgcaaccagcctgggtcacagagtgagactgtctcaaaaaagaaaaagaaatttgatccccaatgttgttggtagggcctagtgggaggtgtttgggtcataggggtggttccctcctgaatggtttggtatagtccttgtgataattagttcttactctgttcgctcctgtgagaggtagttgttaaaaagagcctgggsscgggctcggtggctcacgcctgtaatcccggcactttgggaggccaaggtgggtggctcacctgacgtcaggagttcgagaccagactggccaacatagtgaaaccccatctctactaaaaatacaaaaattagctgggtgtggtggcacacacctgtaatcccagctacttgggaggctgaggcaggagaatcgcttgatcctgggagacggaggttgctatgagccaagattgtgccactgcactccagcatgggccacagagtgagactctgtctcaaaaaaagaaaaaaaaaacaaagaaaaacaaagaagcctgggcatacccatacccctcacttctggcctttctctctcaccatgtgaactgtgtattcatgggttcctcttgccttctgccctcagtgtaagcagtctgaagatttcacaagaagcagatactggcatcatgcttcttgtacagcctgcagaaccatgagccaaataaacctcttatttaaataaatgacccaacctcaggtattcctttacagcaacccaaacagactgagacacatactacaaaagttaaatgtactggacttcttaacagtagctctggtagttaaagggcaattcttaaaatatctgaagaaaaactacctataatttagaattctataccaatccaaaccaagaacccattgtgaaactacaataaactcattttcaaacctaaaaggtttaaaaaatacacaatctacgcattctcttctcagaaagctaatagaggatgtgttccacctaaatgaggaataaactaagaaaaagtaggacatttgatcaaggtataagaaacccaaaataagagaaaggtaaaaggaatcacagattgatggattggaaaagtagatgaaattaatggaacaactaatatgctttaacaaattaaaaggatacttacagtggactataggttggggttaaaataatgattatcatatgagaaactaatcaatttttttwaaaaaagaattattattaaatctgtctattcaacattttaaagagataaactttttttattagaacattttgattttggtgtttggtgttcttacttcccctttgtgtatgaggaactacatttggaactgccttgccttaaccccacagttttaagaggaagtccagcaaactagaaataaatggaaaactaaagaaacaaaactgggatctataaatcaataacatggcgaaactattttgaaatcaccttccataacactttgtggtactaaaaactaacagtatatagaattatctatatagccaaggtgggaggatcacctcaggccaggagtttaaggttacagtgaggtatgattatgcctctgcaccccagcctgagcaacagagtgagaccctgtcagtcaatccataataaataaataaacaagcaaacacatgatagaatagagtgagctctgaagaaagcttctcttttctataattctgtaagtgtatactgacataccacttttgcagtcattgactagacaaaagattatggttacaaagcacatatatgatatacataattgtatatgcatatgtgcataattaaaagcttaattccatagatctttgaagtttcttttgctattttggaagccatcttttttgccttagaaattccatggttactgtaatctataaatatagtcattaaataataaaataacaaggcagattcttattacctcagaagtttatggaactagctactccaagcaccgatgaactaggcatgaagaaggaacctgcataatgctttgcgatattgtagttgtgcacagaataaatgtgagatttaataatgttactttatatatttaactgtttatattttgcctctgagctactaaactcagagatagcattctgtgtgaaataatactattcagattaaaggcaccctgactgacatcagcaagttggtggattagtaggttccagccctcaaacccctgcagaaataccaaataccattttgggagcctgggagacctgctaagaggttccagcaccccagtagaatgaaaaactcaagaatagacacattgaagagggtaagaaaaacagtttcactttacctacatccttctcctccaaggcagcagagttcagtgccaagagaggcccttttggcccatgagttctcccaggaaggaaagtaagagtcaagtgagtgcccagcttccctagccttgcgtgttgccgcccaaaaggctcacttctgtttttccctatccagaatactgagggactcttcacagatgaatagtctaggaatatctaggagaagggaaaagaagcagaggcttatagcaaccaacacatgattcttcagagctagatgtggagtctcctaactggcttgcagactccaccataggctcacccatgagccctacaggacacttcacctgcagaacccctcaactgacaagcacacccagcactccatgcacccacccactagccagcagcccaacctcccctgcagatagtgtatgcaggccccagcagatagcacacagatatcagcaactggctcctgctggattggaagaaagcacacaaccttgaacactctgaggcactgcactagagaaaataaaaggaggttctcagcacatagtctagctttgtgagattgaaagaaagcacacaatcctaagacttcccctcccaagacagaacaagaggaatggaatgggcatatcatagaaaaggtctgagagaccttcagaatctctagtcaggctgactggtgaacgtctttcccttctgaagctagtcagtaaagactggaggaagtgactctttcttcagatgcaaagttagaagacaaggcttaaaagaacacacacacayacacayacacacacacacacacaccaggaaaacatgacaaccaaaggaataaattaaagttctagcagttgaacacacacacacacacaccaagaaaacatgacaaccaaaggaacaaattaaagttctagcagttgaccccaaagaaacagagacctataaattacctgataaagaattcagaacactcaccttgaatctcagtgagctaaacgaaatcaggaaaacaatacatgaacaaatgagaatttcaacaaagaaaccactaaacaatcaaattctggctgggcgcggtggctcacgcctgtaatcccagtgctttgggaggccgaggcgtgtggatcatgaggttaggagatcgagaccatcctggctaacatggtgaaacgccgtctctactaaaattacaaaaaaaattagccaggartggtggtgggtgcctgtagtcccagctactcaggaggctgaggcaggagaatggtgtgaacccgggaggcagagcttgcagtgagctgagatcrcgccactgcactccagcctgggtgacagagcgagactccatatcaaaaaaaaaaaacaaatcaaattctgaaactaaagaacacaataactgaactgaaaaattcaaaagtgagcttcagtggcagattgaatcaagcagaargaagaatcaatgaacttgaagacagatcatttgatattatccagtcaaaggaacaaagaggaaaaataataaagtaagcctacaggactctaaaccaatatgcgcattatagaagtggtagagcaagcagagaaagagaaaggaggcagattgcttatttaaagaaataatagcagaaaactgcccaaatctggggaggaaaatgaacatccagatccacaattcccaaagaattccatgtaggttgaacataaagatgtcttcattgatctttytgtggttcataagcatgatgattgggttttcataccattgtgtaagatgtgcctttctcagaccttgccaaaacactggcacattacctgtctgatatgaaaattttttcactgagacacattrtgatcaaattttcaaaagttaatgacraagaatttgaaagcagcagaggaaagcaacttgtcatgtacaagggagctcctataagactttcagcaggtttttcagcaaaccttgcaagccagaagagaatgggatgatatactcaaaatactgaaagaaaagaaaagcctcccaactaagaataatttacccacaaagctgtcattcagaaaaggaaagatgaagacttttccacaaaaacaaaagctgagggagttcatcaccactagacctgcctcacaagaaatgctaaaactgaaactaaagttgaagtacttcaagtggaaactaaaggatgctaattagcaacatgaaaacgtgaaagtatgaaactccctggtaaagggaagtatagagttacattcagaatactgtaatgtaatggtgatacataaaatcatttttaactctgagttaaaagtattaaaaataactatagctacagtaatttgttaattgatgcacaatataaaaatgtaaattttgacatcgataacaatgtgggagaggayagatgagttaaagtgtcgagtttttgtatgagatctaagttgttattatcataaatgattagaatgtatccccaaactaattgtattatatacaatatatacagctttacatgtcaatcatacctaaagtagttatttttttaaattaacatgctctttccagaaccattactttatagtaacttggaagcttttactacattattaatggatatcaatagaatattttttaaagtcgaaaatgactttaaactttaaacgacaccttgtgtcgtttctgaacatcttcatttgatactcctagagatgccaaacctatttcttgtgaaaactgagcaaggaaataccaggatccccaagtagtggaacatgtcccaagagttcatcacacgtgtctctgacaagaaaaacatcacaaagaaccgttatacaagaagccttaaactaccactggtggtagaacaaaacttaaaatcccaaatataaccttgttactataataaaaatacttttaagtctgaatttcagattcatcttatcagcattttgagctgtatgataacacactattttaataaaatagccactactattttcaagtgcttactatatgccaaatcatggtgttttatttgtacattatgtgttttaattctcaagacaaccttaaagaattaaagtaacttattagtgcaagatcctatagagcagaccactgcctgtttttataaataaatttttattggaatatggatacactaacaaaagagattaaaggcatccaataataacttggtaatggctgatcttttaagaaaatacaggccgggcacggtggctcatgcctgtaaccccagcactttgggaggccaaggcaggtggatcacgaggtcaggagttcgagatcagcctggccaacatggtgaaaccctgtctctactaaatacaaaaaaattagccaggcrtggtggtgcatgcctgtaatcctagctactcaggaggctgaggcagaagaattgcttgaacccgggaggcagaggttgtaataagctgagatcgcagcactgcactccagcctaggcgagggagtgatactccatcacacacacacacaaaataaaattgaatttaaaaatatatatacatgttacagaaatctggaaataaacaatttaagaacataaataaaactaaatgcagtagacgcatttcctggttcctctgtgtcatgttaactttaaaaagaaacaacatattcaacatgttatggctattagcatcttttcagccacatttccttttgttctcataatttttatgcatattgttttttcctatttttgattaacactatgtttgacacatgatttctttatattagaaactttaaattccactcaatttctaatgtgaaattttcttaggtattagcaaacctattcaaagtaattttatttgctaccatagtatagtcctttattattttatgtttgggccatagcaacagtctaccagatatgtgacctctagcctccaaytttaaaatattctatacaaagctttaagaatagtttttctaaatgaagttttttcaaagactttttaaagaatagctttaaatttacagaagaacagggcagaaaatacagattcccatatgtcaccctctaacccaacacacaccatttctcctatwaatatcctgcattagtgtggtacatttgtcacaactgatgaaccagtactgctacattattaactaaaatccatagttaacattaggggtcactctgtgctgtatagttctatcaattttgacaactgcatagtgtcatgtgtccaccataatagtagcatacataatcattttattaccctataagtgccctatgctccacctatttacccctacctamcttatacccctgggtaaccaattatcttttgtctctgtagttttgccttctaaataaaattcttcctgatatttaaaacctcaatctctggagtagggccatatgtgtgaatgaaaaaagcaaattgtagaaagtatgtatagtatcctatttataaattttaaaaattacatgtatttgattatacatagaacatttctagaaggatacctagaaaaatgataacttctgaggaaaggaggagagacagtagatgaggccttttactttctagtatcttattttgtttgaatttctttccatatacgaatattatgattttaaatattttaattatcaacctaaaaatatctctggataaaaaggttttttcaaagcatgaaagcactagaaagcacaaaggaaaagttctagagattttaactgcacaaaaatattaaaattctgtatctcaaaagcatcataagatccaatccacctgctatttatctatgatgttctttattttttaattttttattcattattatttttgagaccgtcttgctctgttgcccagacgggagtgcagtggcgcaatctcagctcactgcagcctctgcctcccagttgcaagaaatttttggtgcctcagccttccgagtagctgggatcacaggcttgygccaccatgcctggctaatttttgtatttttagtagagacagagttttgccatgttagcgaggctggtcttgaactcctggccttaagtgatttgcctgcctaggcctttcacaatgctgggagtacaggcatgagccaccatgcccagctatgatccttattttagctcatatttttccacacctaataatctcatatggctttatggtttcttgttcactcttcacatattaccagcctcaccgcaaccctgcatctttgtggctcctattttaggatgggtttcattttaaaatggcaaccctttcatcagtcccaatctacctactctgcattgttttggtagtaaatattaccttccaaaattgtttattatttagttaatttgtatctttttgtctctgtcccccttgccatgtcccacatgaacaaaattatttacctatcttgttgactgatgaatccttagtacctgacacttggtaggtgttcagtaaaaaactgctgaatgaactgggcacaayggctcatgcttgtaatcacagcacttcaggaggccaaggcaggatgattgcttgaggccaggtgtttgaagcagcctgggaaacgttgcaagacctcgtctctataaacaatattctaaaaattaggtgggtgtggtggcacacacctgtaatcccagctagcaagaaggctgaggcaggaggattgcttgagcccaagagttcaaggctgcatgaagtgaactatgattgctccagcttgggcaacagagtgagaccctgtatctttacaaattgtgttgaatgaataattgagttattaaaagtattggtatatcctattattctacttctgttggtacatgttgtagaatttgttgtgtttgatagtgatcatactcctcaggtgtctagatattttggttcacaagccatgttctcctagtgttatctactaccccttctaataatggatagaaaggtagagcaaaatggcagaccctcgtttttatcccttcccacaagtttaaggagcagaaagcaagagctgtaggcaaccacagaactgatgctctctctttgctactgtttctctagtaaggatctgtgttgaaatccacaatccagcagcagaaggctgttataatttatcaaaattctggcagcagggaaggagtggaggggtgaatgccccaatattctatagtatctggtcagccccactttttcattggcaactcacttcaacagaccctttatctaatcctacaggaagcctgatctgttgctggtgatttctgtagcaatcagtagtttggcactgattgtcccaaagcaaagtggggcatggcaaaacagtatttcagaacttactcctaacactaactatggtttcctcttaagtttttgatcttattcctcaagcttttgcttccttcttgtttctgttgttactcagggttgatttggagggaggaagacaacagcctttactagtttttcattttttcaggaaccatatgtaagaaactcactttaaatataaagacatagataggtgaaaagtaaataaagaaagatctgccatgctaaaactaataaaaagaaagctggagttgctatattgtcagacaaagcagatttcagaaaaaggaaaactgtcagggatagagagaagcattacrtaagtatagaggtaaattctccaaaaagataaaacaatctttaacatatatgcacctaacagcattaaaatgtgtaaggcaaaaactgatagaaccacgaagagaaatagacaaatccagtatcacagagacttcaatatctctctttcaataattcatccagcaggcagaaaatcagtaaaaattgaactgtagtatcattaatctactggatctagttgacatttatagaatacttcatgtaagaacagcagaatatacattatccttaaaaaatatacacatttgtcaatataaaaataacatttgtttgcaaaaaaaatctaaacgaaattaatagatacacaacaaatttagaaaaatatttgcaaggaggtttaatcagggaactcagaaattcacatcaagggaacaagcaattcaacagaagaatggatgggcaaataatatgaattcagagaataataaatccaaatatgaaaagaggctcagaatcaggagaaatcaggaaaatgaaaattaaaataataagatgccagttagtctaacagactgacaatttttttttaattcaactaacatttactgagtgcctaatatggacagacactgagctaagcacacctctaatttagtgttcagaaagtactttgaagtggatcttatcccttttattcagttgatgaaagtgaggatcataaaactcacagtaggcgaaattgaattcactctataggagctatttttctttcctttttgaatagatagttcattcagatactgtatgtgtagagagagacagatgttttgcgtttcagtctcccatgatctcctgttcaccaatttctcataacaccaccacctatcccattaatacttttattagttttttgcataccttcccagatattttacagaaaaatacaaatttatattattctccattttaaaaataaagataacaatatatacactgtcctacatatattagtttacaatatatcttagaattatttatgtaactccataatgagattccttatcttttaatggctgcttagtattccactacatgaatgccagaacttattttactagaccttatgatggacatggacattgttttcagtcttcagcttttaaaaacagtatcattgaataataatgtacataattttgtctcacatgttcaagatatctgctggataaattcacagaaaagagattgctaagttaaagatgtgtgtgtagtggcgggcgcctgtagtcccagctactcgggaggctgaggcaggagaatggcgtgaacccgggaggcggagcttgcartgagccgagatcccgccactgcactccagcctgggcgacagagcgaractccgtctcaaaaaaaaaaaaaaaaaaaaaaaaaaaaaaagatgtgtgtgtttgtgtgtaattttgacagatattgccaaatttctctccataggtgctgtataaacagatgagagtgcccccacagcattgttattagagtatgttattcaaactgttggatttgggactaataagcagaaatgtttaatctcagtaaaattttactatgcatttctcttgtcacaagtgaggtgaaacatcttttcagactgggaaaaatgttaaatgaccaatagcaactatggctggtgaggggtccaagtaaaagggtattgttatagatagctggcataaatgtgaaatttttcaacttattcgtaaaacagtctgacaacctgtattaaaattttttaagctacagatatcttttgtccttgctgtaccattcttgggaatctgttctatagaaatacataaggttctattcacaaaaatattcatagtggaaaaaagggtaacaaaatgaaagctaatcagtaggaaaacagcagaatgaattacaactcctgcatcctataaaatattatacagctatcaaaaggaatgaattcaagttgtatgagttgtcatttccagatattgctaaatgagaaaaagatggagaaaagtgcaggatctcaatctgtaaaacaaaatacaccaatacctatagagatgtttacatatttgtgtgtgcacatatggatatttatatttgtaaatgtatatatatacatgaacatatatatacgagggaatgtgaaaaacacatattacttgggattataggtttgcttgctctcaggtcaaaayagtaatgacataagatgtaaatttctttttctctcatagtccaaggataatcggttcaggactgatagagcagctctggatattaggtactcaagctacttttagctttttaatctgatctactcaatatgtgaatatgtggcttctatttcatggcctaaggtggtagttccagctcctgccatgatacatttgagaacaggaaatagtaaaagagtatacctcttctttctaagggcgtatcatagaagttggagccaccatttccacttacgacccatgggccaaaacctagttacatggccaaactttcaagagagttaggaaattatagtcactatccatgtagcaatgtacccagctaacatatgggggttctgccgggcacggtggctcacgcctgtaatcccagcactttgggaggctgaggtgggtggatcacctgagggtcaggagttcgagaccagcctgaccaatactgtgaaaccccgtctctactaaaaatacaaaaaaattagccaggtgtggtggcgtgcacctgtagtcccagctacttgggaggctgagacaggagaattgcttgaacccaggcagcagaggttgcagtgagctgagatcacaccattgcactccagcctgggagacagagcaagactccgtctcaaaaaaaaaaaacaaaaaacaaaacaaaacaaaaaaaaatgggggttctaatattaaaggaagaagaggagaaaggacattgggaaataattgtattctctgccacaacagagtaaataggtgagctaggtaatggaaaagggactctgtttcctacaaattatctacttctgcattacacatgcattccaaaacagtggcttaaaacaacatgatttattctctctcaccacactgtgatttggccagaaagttctgttagtctcccctgtgttcactcctgtggctgcctttacactgtctttcactcccagatttataacatagtggtctcagtgcagtgttccaaacggtgaaaaaagctgtgaagcttctctagacctagtctaagaagttgtacaaagtcacatctatttgcattctgtggtcaaagcaagtcacaaagatagctagattcaaggggtaaggaaataaagcctttgatgggaaaagtggcaaaagcacattgcaaagatgcatgaacaaagtaggcatgatttattgagggcaaatattgtaacaatctcacaaattacacattttatgtattyttaaatttttatttcaatagtttgtggggaacaggtgggttttggttacatggataagttctttagtgatgatttctgagattctggtgcacctgtcacctgagcaatgtacactgtagccaatgcgtagtcttttatccctcacccccctctcacccgcccccaacaaagttcccaagtccactgtatcattcttaagcctttgcatcttcatagcttagctcccacttataagtgagaacataatgatgtttggttttccattcctgagttacttcacttagaataatggtctccaactccatccaagttgctgtgaatgccattatttcatttctttttatggctgagtagtattccgtggtataaaagctatatatttatatttaatatatgtgtataaattttcatatttgttcacagagaaatataagtaaaattggttaaatttgtggtaggtagatacaagtctgaccgagtcactcttctgctctttattgccacacagattaaagtccaagttccttagcctatactatttccactatattacactacctcccagagaacatggcataaaaaccaggaagaaagagaaattccttctggctgaaatggttgggaaaggcttcatgtaaggtgtgggatctgaactggaagaaatatttgaattgatggagaggggcaaggtggtaaaccctaaatcataatcttttaaggaccacccttttaaaaaattgaaatatagcatatatgcaaaaatgagtgatttatcacagagtgtccctgtatccagcacccaggaaatagaaaccttcttatgagagctcccagtaactatcctgtcactgttccccaaatgtaaccactcttctgatttctaaccatacatcatttttgcctagttttgagtcttacatgaatgaaattatgtaatgtatattttcaccattatatttctgaaaatgatctgtggtgtttatcgtttgttcatattcacttctatattctattaaatggataaaatatatttatccattttattgttgatatttcagtgggctgtttccactttaaagctattaaccaattatggtgcattcttctgtatgtctcttcacatgcaagtgaagacatttctgttgagtatatacttaggattaaagttgcttagtcattgatgtattttcaaattttgtaaagaatgacagttttccaagtttatggaaactttacccaatccctgtcccccgtcccctgtcactgctccacaacagtgtgacaaagtttcactttctccacactgtggtcaacacgtggtattgtcaatctttttaatttggtcattctgatgcgaatgtagtggtatctcattttgacattaaccttttacttgatgaccattgaagttgagcaccattttatggtacttaacatttggagatgtttttgtttttsacaaaaatggccttcagagacattttggagatcttttctgtagtgcctgttaaagtcacttgcccatatttctgttgggttgtcattctttttcttactgatttttaggaatcatttatatattctggatatgagttcttggtcaaatatatgtgtggccagtatcttttcttacattgtggttagtctttttgtaatggtgccttgataaacaraattattaatgtaatacattttaccagtatatttcctttttttttttttttttttttgagacaggggtctcactctgtcacccaagttgcagtgtagtggcacaaccagggctcactgcagcctcaacctcctgggctcaggcgatcctcctaccttagcctcccaagtacctgggactacaggtgtgtgccaccacacccagctagttttttttttgtagaagtggggttttgccatgttgtcccggctagtctcaaactcctgggctcaagccatcctcttgcctcagcttctcaaagtgctgggattacatgcatgagccaccatgccaagccttcttaaattatttttaatctgtcctctatttcttcttaagactctaaagatatggtgatttgcaacagaagttattacaggaaatggacccttaagtaagattttgagattgggttggacacacacacacacacacacacacacacacacacacacacacaggcacacataaaatcaatcagaggaataacctcgttcctataaggaaagagactacagactacaggtaatccatggcttacaatatttagtttacttttttttgagacaaggtctcactctattgcccagaatggagtgcagtggtgcgaccatagctcactgcagcctcaacctcctaggctcaarcaatcctcctgcctcagcctcctaaatagctgggactataggcgtgcactaccatacccagcctatttatttattttttattcatttatgagatggagtttcgctcttgtcacccaggcttgagtgcaatggtgtgatctcggctcactgcatcctccgcctcccaggttcatgcgattctcctgtctcagcctccccagtaactgggataacaggcacccaccaccacgcccagctaatttttgtatttttagtagagatagagtttcaccacgttggcgaggctggtcttgaactcctgacctcaggtgacccacccacctcggcctcccaaagtgctaggattacaggtgtgagccaccatgcccggcctatttttctttttttgtagagacagagtctcactatattgtccaggctggtcttgaactcctgagctccaatgatcctcctgcctttgcctcccaaagtgctgggattacaggaaggagtcactgtgcccagccagtttgcagttgtattaggattaccagtaacaacatgaaatcaagtgaagcaggtgaggagtgtatcaccatgataaccatrgtaattataaagattatagatccatctggcttttcttatggtccgaaacagaaagtacttaacccgtttrtgccagaggttgcaattttttgaatttttgcatgagtgaaaaatcagaccttggcgatgaccttgagcagtaggctataaataattcccacatgcttagcgttccaataatggaacgctaggcatacgtgggttaaggggcatggtggctaatacctgtagtcccctatttgggaggctacggtgggaggatctcttgaagccaggagtttgaggccagcctgggcaacactgcaagaccccatctctaaaaaaatttttttttaattagctgcgcatggtggcacacacctgttatcccagcaactcaggaggctgaggcaggagggttgtctaagcccaggagtttgaggctgccgtaagctatgatcatgccactgcactccagcctgggtgatagagtgggaccctatctctaacgaaaagaaaagaaaagaaaaatacataagaaaaagaaaaacataaaaactacaattaagactgtatgtggtgaccaggtgcggtggctcacacctgtaatcccagcactttgggaggctgaggtgggtagatcacttgaggccaggagttcaagaccagcctgactaacatggtaaaaccccatctctatgaaaaaatacaaaaattagctgggtgtggtggcgcacacctgtagtcctagctacttgggaggctgaggcatgagaatcgcttgaacctgggaggtggaggttgcagtgagccttgattgcacaactgcactccagcctgggcgacggagtgagacactatcataaacaacaacaaaaagaaaatgactgtatgtggagcatgagaactctattacaggtctgaaggagttgattatcttctgtaatcactgggcagatatggtagatttgtagtatcaattacatgcttaattcttcccctttcctattctaatgctggaacattggtggggagaggagtcctaagacatacgatagggacatttgagcagagaaaaatgaagctgaaaactctgaacatcaatcttcccctaaatctctttctgaggaaaccaggctcctatgcatagaggctttcagtgattgcacttgggcaagctccttcacaagctgatacatgctctcctcagaatttaccggctggggctaggcatggtagctcatgcctgtaatcccagccctttgggaggctgaggtgggaggactgcttgagcccaggagttcaagactagcctaggcaacacagcaaggctctgtctctaaaaaaaaaaaaaaatttaattagccatgcatggtggtttgcgcctgtagtcccagctactcagaaggttgaggtgggaggatcacttgagcccaggagttcaaagttgcaatgagccatgatcacaccactgcactccagtctgaacaaagcaagaccctccctgtctccaaaaataataaaataaagaatttaccctactacctattagtgcctccagttatatcccaacatagcctagtcagagaattgaggccttctctggagagagaaaacctatgtaggagaactaaaggccttgccattttaatcagcagaaacttggacagcatatatgagaatacatttaaggttagatcatggcaaatttattggcatgggtgcactcacctaagaatcaagagttaatattttggcattaataatttggtaggatgaggcttaaattcagtaatagcctataaataagatggccaaaatgccagaaattcctgggcatattgtagaggagaaaacacaaaggctccttagccattgttaattttcaccatgtcattaaggaatgcaatgatgatgggagcaccactatttcctaggagctctgaagtggctgtctttgtttgcgagagatgatggtggtaaacmctgtagtggaactgagttagctgatcttagtgggaacattagaatcctaaggcagtagaggccacataatggcatataaatatcagagacaagacagacacagtggctcacgtctgtaatcacagcactttgggaggccaacgcaggcagatcacttgaggccaggagtccgagaccagcctggccaacagggtgaaaccccatctctagtaaaaatacaaaaattagctgggtgtgatggtgcatgcctgtggtctcagctactcaggagactgaggcaagagaatggcttgagcctgggaagtggaggttgcagtgagccgagatcacaccactgcactcagcctgggcaacagagcaagactctgtctcaaaaaacataaaaatataaataaataaatatcagagacaaagtaggcacaattaccaaaataagtcaaaggagagaacgttaaccagagtagtttgacccacagggaaaagtgataatggctaaatgatcatgaggtccctggaaatataataaagtaacctaccaaggtgctgcttgacatatataggtggaaaaattcttgtggttttgtagtaaaatttgaagcatctcatctagctcccagacttggtactccttcactgatggaaagagactggatcctttgacgaaaggggcaatgcaatcacagctgtatacaacgaattgttccctaatccagtggggttctcaaacttgtctgtacattagaacaccttaggattctaaagcccaggccacaacccaaactaattaaatagtaatctcagggaagacccaggcatcagtattttttcaagttccccagatacttccagtgagcagatatgttgggggaatcattgccctaagccttttccatagggaccagtgaccattcactagagaaaggaaaatatccaaaattctttgttttgttttgttttgtttttgagacaaggtcttgctctgttgtcacccaggctggagtgcagtggcataatctcagctcactgcaacctctacctcccaaatagctgggactgcaggcatgcaccatcactcccagctagtttctgtgtttttggtagagatggggtttcgtcatattggccaggctgggtagaattctttttttttttttttttttgagatggartcttgctctgtcgcccaggctggagtgcagtggcgcgatctcggctcactgcaagccccgcctcccaggttcacgccattctcctgcctcagcctcccaagtagctgggactacaggcgcccaccaccatgcctaggtaaatttttttgtatttttagtagagacagggtttcaccatgttatccaggatggtctcgatctgctgacctcgtgatccacccacctcggcctcccaaagtgctgagattacaggygtgacccaccgcccggcccaggctggctagaattcttaaggcactgtctcttaacttgtactaatactagaaacccaaaactctaccctggacaactggtcagaatagggaacctaaggaagtcaagtgatggaatcttggcctggctgtggctaacagtagatccagaaggacccatactgtggctatttctccagtcccagatgtgtagtggtaatatgtatcttttaacaacaatctttattttggtttcctgatcaatggagggattgctattatggtagaaagtgctacacagcagcttaggtctgctttctaccactcctcattaagatagtaaaggaaaagcagggctatatccctgaggaaattgcagagattggccaggcacagtggctcatgcctgtaaccccagcacttagggggaccaaggcaggaggattgcttgacaccaggagtttgagaccagcctatataacatggcaagactgcatttctacaaaacataaaaaagcaaaatagaaaaaccaaaagaattgcagagattagtgccaccatgctgccatggtgattcataccacattcccatttaaatttcctgtggccaccagatgcatcatagagaatgacaatataaaaaccagatggctagtgaagaatgacagtggactgcaaactttaattaggtagggatgccaattatggttgctgttctaggtgtggtatcttcttcggaagaaattaatacccatgttgacaygatactgatctgatattgatctggaaatgtccccccacccccattctaaggagaatcagaaacagactacgtttaaataggagggataacagtaagtccttactgtcttgtctcaggctacatcaactctcctgttctctatatggtatgaagggaccttgayggtcttttgttattccatagaacatcacactgatttatcagagtaatgaaattatattaaatgaaactgaagagcagaagtaggcagcattctacatgctttggtacgacatatgcatgctagaaggtgcaagatgaaccttgaaaaacttccaggayttgccacaggtttctaggggtccaatggccagaaatatgttaggatatccataacatccatacttttttctcttccattaactggtcagagggaactcattatgatgacagtttatgtgggttgagggagaagtgctgaaggagtagaggcaggtactataggagtctgagtcacctgctcattcatggttccagtcccatatgtagtgcactgctcctgtgttcatccagttgtacagtttgatgagtcaaataacaacaattcatgatgggcagtttgattcacacagtcacttgatgtcccatggtcaggtgttacatctcttccaggtaccagtagcaagtcaagaggtacttttcaaataaaaaaaaaaaaatgaaacaaaatcatggctaaggaagatatggccttactcctaaaccttaagggtctatgttgtaattcttgcactgaaacttgccagaggcttcatataacatctctcctacattaacttctaatatcattgggtctacaggatcataaagcctaagtctgggccctaccccactcaaaactggtaattttgagacggagtcttattctgttgcccacgctggagtgcagtggcaagatctcggctcattgcaacctctgcctcccaggttcaagcgattctcctgcctcagcctcctgagtagctgggattacaagcatgcaccaccacttccagctaatttttgtatttttagtagagacggggtttcaccacgttggccaggctggtcttgaactcctgacctcaggtgatccacccacctcagcctcccgaagtgctgggattacaggcgtgagccaccacgcctggccaaaactggtagtcttacagttacagttaagcctctaagaacagcttacccaattgtactatgttttgttgtctccaaatctaaagacgcctgccacatattttgcctttttctttgttgtgatagtggaaaatacaacttgtcactaacaagtgcctttaaacaggggtgtttgtttggttttggtctagcttttttaattgttcacagcagaagtatgatcaaaaccactgagttcttaattatcagaagtgaaactcgaggtttttttttttttaagacaggctttctgtcactcaggctagagtgcactggcctcatcatagctcactgcaactttgaactcctggcctcaattgattctcctacctcagcctccttgagtagctgagattacaggcatgcaccaccatgcccagcgtttgtttgttttttgttttggtagaaacaggttcccactatgttgcccaggctggtctcaaactcctggtctcaagtgattctcctgctttggcatcccaaagcaatgggattacaggcatgaggcacctcacccagcaaagaggactcttttttttttttttttagtatcaaaactttactccctcagtcaaaatacacaaggtagttgtgcatatatgtagtctatagataatgcttggtacataaatatctagatctacggtaataactattacttagggacttgaaactcaaagaaggttaaactgctaaaagcaaaggcatactcttagaaaagtaaaagtatgttcaaaagaatatgaggatcacagtttaatagagatatcctgtaaaaagtagagataaagtttttctcctctatacaataggaaaccattgaaaagttctttattgtgctacattataatgaaagctgtgtttaatttaatggtgatgtgcaagatagtctggagaaggaaaagtagaggcagagaagcccactatgaatttatagtaatggaccaaatatgagttgagaggcatcatagtgtaatgaaaagaatgctgatattagaatcataagactggtaataatcactgatcctgtcaccttgggcaagtcatttgacctgcctgattctgcatccttatttatatgtcactcaccttgtagtgaccttgtaggccctcaataaatacttgagtgatgaaatgttaatcacttctgcttaactcagagggattacataatgatgaaaatcttttaaaatgtataaactgttatacaatttaaggtgtaatatgcattgaaggcctaaataagtagaaatggacactcataaggaaagggaagggtgaaagacaaagatgactccattatactgaatcttagtcttgatgactggaaaaatatattcacttaagtagactggttaggagagtaactgagttttagaaatctggacaaggttagggaaaaaatagtgatttatttaaatagtcaagatgttcagcagtaactaaaaactgaacaactaagttaccattaatatatgtaatagcttcctattacatatattagtttcatatattcttaggtatttttcatatgagaatgttctgtctcctacataaaactttatgttcttagagaaagaggttatctcctggggaatttgtattccctcctcatttaaaaataaaccacctgtatccactaaagttccatctgttctgtccaatttattggtaaacaagttacatagggcattgactggtttaaagattatttgttaggtcctttggtccttccagtttaataccaaattgctatacttttttttttttttaaaagagtcttgttctgtcacccagactggagtgcagtggcatgatctcagctcactgcagcaacctctgcctcctgggttcaagcgattctcctgcctcagcctcctgagtagctgggactacaggcgcctgccaccgtgcccagctaatttttgtaacaaactgctatacttttaaaaaaatcgatatataatagtttacatatttatgaggtatatgggctattttgttaccttgactggggtatccatcacctcgaatatttctcatttctaagtgctgggaacatttcaagtcttctctcctagctaytttaaaatacaaaaagcattcactgttactagctatagttaccctactctgctattaaacattcctttgttccatatctcactgtatgtttgtacccattcaccaacgtctcttcatcccccctcccacccagacacctttcccagcttctggtaaccatcattctactctctgcctccatgagatcaacatgtttagcttccacatgaatgagagaacatgtgatatttgtcattctgtgcctggcttatttmacttaacacaataatctccagtaccttccatgtttctgcagaggaaatgatttcattcttttttgtggccaatagtattcattgtgcataggtaacacattttctttatccattcatctgttgacggacacgtaagttgattctgttctttgccactgtgaatagtgctgcattgaactgatttcttttcctttgaataaatacccattagtgggattgacagatcatatggcagttcttttagttttttgagaaatactgtgtttccatagaggctgtattaatttacaatcccactgacagtataaaagaatttcttctgcatccttaccagcatctgttattttcgtaataaccactctgtcataggtgataccttactgtggttttcatttgcatctttctgatgattagtgatattacacatttttcatatacttattgggcatttgtgtcttcttctgagaaatgtctattcacatcgcttgaccacttttaatggggttatttttgttttacttttaagttccttgtatactctcaacattagtcccttgttggattaatagtttgtaaatattttcttccatacaacaggttatctcttcactctgctgtttcctttgctgagctttttagtttaatatagtccaatttggctatttttgtctttgctgtttgtgcttttgaggtcttagccataaaatctttgcctagacccaatgtcctgaagtggtttacctgttttcttctagtagttttatagcttcaggtcttacatttgtgtctgaactgttctttatgtacatcactctaaacagtttttactactagtaccttgtaaagcataaagcaaatgccttattcaaaatcatatgaggccgggtgcagtagctcacactgtaatcatggcactttgggaagccgaggcgggcaggttgcttgatcccaggagttcaagacaagcctgggcaatatggtgaaaccctgtttctacaaaagataaaaaaaattagctgggtgtggcggcaagcggctgtagtcctagctctttggtggtggtggctgaggtgggaggatcacttgagcctgtgaggttgaggctgtagtgagccatgatggcgccattgcattccagcctaggtgacagagtgagaccctgtctcaaaaaagtaagaaagaagaagaaagtcatatgatatatttctttcttttacattttaaatgtatatgcctttcatttagaccctaaagtgtaagacagtttctattccatttgaaatccttagtcagtttctcctagttttaaaaaaatttaattgtaacagccattcaaccttagctgtagatttatcttktatacttagaatttcccttccctccctctccctgcaagtttatttggttttctctggactgctatagtattttactgaatctgtctgggaacttaaattcctaacaacatccagaagcttcagtaactctggacaaaaagagcttcatccattaaaaagctgatttgggggtcagaagaaactctcctcttgtatcatcttttgctccctcacatgaatagaattttggttagatagagctatttgcctttccttttcctcttttttttttttttttttttttttgcccagcacagttttgtttagcatcctttctagttctacttcaaatgtaatattttacgcttttacttgagaccacagaactactgtattagtatccccccttatccagtagtcagactttacctttctctaccttagagaatttggaagtaaggaaaacattgaacaccaagaaaactaggtgttacaagctttattctgtaacaaaaatatttctttttgagagttaagtgtttcacaaaggtaaactctccatctaactgatgcctcgattattcattactgacagaagtcagtcaacttgaagggtcatgtcatcacaagtgtgctggtaaagtttaacaactagcctgaagtagggagcagcaggcagagatctgatctgtggtgttttcaaatttccctggggaaagtactcctatgtggtactgtgtcatgttccaaagaacatcactgaacacagagctgggaagaggtgcacactatcaaactgtaatacttccaccatgcagatacaatagacataaccacaaaaacacggaacacagtaaaaggtatagcatacctcagagatactgtgggtttagttcgcgtgaatttttccatttcctagtgcatatgaaagttatgtttacactatttaaatgtgcaatagcattatgtctaaaacaagtgtacacagttttttttgagacagagtcttgctctgtcaccaggtaggagtgcagcagcaagaccatggctcacagcagcctcaacctcccaggtttcagcartcctcccacctcagcctcccaaatagctgagactacagctattttagaaaattttagaaaaatatgtatatattttttgagacagagtctcactctgycacccaggcttgagtgcagtggcgcaatctcggctcactgcaagctccgcctcccgggttcacaccattcttctgcctcagcctctccsgagtagctgggactacaggtgcctgccaccacgcctggctaatttttttgtatttttagtagagatgggttttcaccatgttagccaggatggtctcgatctcctgacctcgtgatccgcccgccttggcctcccaaagtgctgggattacaggcgtgagccactgcgcccagccgaaaaattttttgtagagacaggatcactgtgttgcctaagcttgtctcaaactcctgggcccaagcgatcctcccacctcagcctcccaaaatgctgggattacaggcatgagccattgcacctggcctgtgtacatactttaattaaaaaatactttattgctaaaacatactaacaaagtaggcacatgctgttggaaaaatggcaccacaaacttgcacaatatgggctgccacaaacttacaacttgtaaaatataccatatccatgaagttcaataaaattaggtatgtctatagtaaaataactaggaagtgagttttgagtatttattattgagctttatttaacagattttaatataattgtcagtttctataatttttaataatggctgtgtttaacaatcagcctgcaaaattcctacaatttttaaattgacccttgtaagctgttacaagccagttctatcacactactgcctatactcttaattgtggaagtgacttagggactagtcaatrtgagttgaggtggttctgctagctaataatttaaaaaatagacatagtgtgactgctcttttagaatctgtctagcaggtttcacccaaaaacccacaaaaaaaattgacctagtactcagatttatatagtgaaatcttaaattttgctatctcgcaaagtaaagtttgtcatgctttttcatattcctccaggtatatgttaccttgttatgactttattagttaaaaaacatttaaggccactcccatatgtgtcacctataaataaatactgacaaaaggaatacaatgaacaatggggaaaaatacagacaggcatttcagcaaagaagatatgtggatgacaaagaagcacatgaaaaaatgccaatatcattggtcactaggaaaatgcaaattaaaatgacaatgaaataccactacacacctattacaatggctaaaattgaaaagactaatcctaaccagtcaggagaaattggaacactcatacatagcttgtgggaccataaagtggtaaaaaacacttgggaaagtttggcagtttcttaaaaagttaaacacatatctaccatataatctagctattccactcctaagctacttactcaagagaaatgaaaacatatgtccatataaacactgtaaagaatgttcrtagtagccctatttgtaataagacaaaaattggaagaggctaggcggagtgcctcactcttataatcccagcactttgggaggctgagctgagtggatcacctgaggtcaggagttcgagaccagcctggccaacatggtgaaaccccgtctctactaaaaaataaaaaaattagccggcgtggtggcgagtgcctatagtcccagctactcaggaggctgagacaggagaatcatttgaacccaggaggcagaggttacagtaagccaagattgcgccactgcactccagcctgggtgacagagtgagactcagtcwcaaaaaaaaaaaaaaaaaaaaaaatggaaacaaaccaaatgtccactgactggtgaatggataaattgtggcaaatacatacaatggaatattatttagcaataaaagataatgaactactgagagacaacaatataggtaagtctcaaaataattatgctaagtgaaaaaaggcagacaagaagttgtattgtgattcaacttcaatacagctctagaaaatgcaaactaatttaccgtgacagaaaatagatcagaggtgtcctgtgggttaagaagacagaggggtgggggaagaacaagagaaaggatttataaaagagcataaggaaacttgtggtgaagttcattatcttgattttggtgagcttcatgggtatatatatawgttagcttatcaaactgtttatttaggtatgtataatttattgtatgtcaattatatttcaataaagctgttaaaaacataacaatgtagctgtggtctaactggtagagatgaggaagaggtaactgctttatgctagacaacatagttcctttctttcagggttaaactgaaatagtttctttgggcagccaaaaagcacatatctctggcttacagagatgtcaggcaactgaaattctcatgtttttattacatgtctgctggtaagccactcctctgagtgcctgtctttatatgtttatctctaatatacttcatattatagtcatcctccagtatccatgagggattgtttccagaaccactctcagataccaaaatccaaggatgcttaaatccatgatataaaatgccataatatttgcatataacttatacacatcctccttagattgcttataatacttagtacaatgtaaacactgtaaatatactgtattgtctagggaacagtaacaagaaaaaagtatgtatgttcagaaaatatgcaattaaaaatgtgtattttggatccgtggttggttgaatccatggatgtggaactcacagatctggagggctgattgtatttgcttcacatgttactattactcataatgaggcttcttcattataatttaaaatattttatattcattagactggtggttctgtagactgtgataagtgaacactaaggatacccacagagccatcagggtatcctgagagagtggggattggagatggatggaaaaggggaaagaatctgtgtgggcaagttcaaaaattagctgggcctagtggcatatgcctrtagtcccagctactcaggaggctgaggtgggaggactccttgagccctggaggcagaggcttcagtgagccaagatggtgccactgcactccaacttgggtaacagagagaccctgtctcaaaacaaacaaaagacaaaaaaaaaaaaagttgaatcttttttttttttccagacagggtctcactctgtcatccaggctggagggcagtggcctgatcacagctcactgcagccttgacctcctgggcccaagtaatcctcccacctcagcctccctagtatgtgggactactggtgcataccaccacgccatgctgattttttattttctgtacagacagggttttgccatgttgcccaagatggtctctaactcctgggtttaagcaatccaccctgccttgacctcccaaagtgctgggattacagctatgtaccaccacacccggccctcaatcttgtgactttttctattgggtctaatttgttaggcagggattgggggctgaagtggtggtaggagggaaaccaggatcaaatgagagttttttaatcctttacccatggtttccctgctagctgcctgcttataatcatatataaacactaaagtcatacttgcagaaataaaaacccttatgaaaacttaacagagtgtgtatctgttttaggaacaaaagtrtaagaaaagttgaatcttgtgaaactgctcttctctgtagaaaagggggaaaaagaaagcttactggtttctgttaggaagcaattgataatggcagtggagaggaatgtaaattaatggatctggcactaaaaaagaaaagtatcccagcactaacccaaaacatacagtgacattcaagaagtctgaatgtacagatttcttaaccaccattctccaacttttcaaagctttcaaccaaccactcaacatgatttaccctcagtcaattcttcctattcggcttcagtacttgccctgagccacgggaattctggcgggcagaggggtaggtcggtcctcctgttatcaatttggaattctatggagcattttctcataggtgtaatatatacagggagggtgggttttaaagccttttgtggattgatctgcaggcacaactacttttctataagaaattatgtcctgagatccagaatgagaatgaatcttaaaatgcttctaacatctttaaagcccttttacttccatttcagaatcaggtttattaatttatctgttctacctgcctagcatttcttgactcaaaagtcacaaggtcaaactcaacaaattccactttaggtatgtgacaaaaggattgttataatctctatctacatcaaactaaattctttgaattctctacatgaacttttttccattttgtgattttagtaatctataattactgtaagcacagtcycagtcaccttgatacccacttatactaagtactgccatgtgattttagaacctstgttttatttaggtttatgatcttgttggcaacacataatagtattttgtctgaggcagatggaacagaaatagataatgaattctttttyctggccacttgaaagccaaatgatatcagtcaaagaatgaacaaaagtctcccaaaggttctagtaaagtggtaagagaactgagacatggatcacagcagttagtacagacatggccaaatttaaaagaaatgaaattgtggcagttagtcctacatttgagtttcaagaggagatttgatttgcaaaaaaaaaaaacatgtagcacatgtttccaatgttatgtaaactttagtttcgtagttctttaagagctaaaaacataggaagttcatactattgtttcaagttattttattagaatatcatattttgtttttctataaacwtttttttttttttttgagagacagggtctcactctgtcacctaggctagagtgcactgctgcaacatggctcactgcaaccttgaccttctgggctcaagggatcctcccacctcagcttccagagcagctgggaccacaggcacatgccactatgcctaatttttttgtagagacacagtttcatcatgttgcacaggctgatctcaaactcttggactcaagcaatcctcctgctttggcctcccaaagtgctggaattacaggcataagccactgtgcctggcttgattttattgtaacattctaataaaggtaactggagggagaattccccccgcccccaaatattttttaggcaagcttgacccagtaaataaactaagtttacttcctgtactctctcttattagtgcaactatttcagatctttctcmcatttcttcaggattatttcattaacatcctgtttttcttgcctctagtctccatcccaatacatactttgggcacatgcttcaacattgctatcacagttacctttttgccatcaaatctgatcaggccatttttgttaaaaattcaatttctccattctatcccatccccttcaaaataaaaggccctcaagatctccagtcatgtctttcaaatctatcttgtctcctcatcttttctgtcttctcattctctccttgccgctccccccgccacctcaacctcgcaatactgcagccaaagtttttctagttttaaaaacttatcaagtcatctctgagactttgcatgctgtttcctctkcctaggagcctccctcacaatttttttccaactttgccttgctccctttttttcatttgttttaatacaactctcttcctcagagaaactttccctgaccaccgccagctgagttcagtacattaatagtgctctgtgcacacatttatgtcactgaacccactctatgatgttgtctgatgcttactggtctcctcaagagactttcttatagatgacatctgtgtcttttatgtatcttcagtgtctagcacctaatagtaattcgatgttttttaaataaatagaaaactaggagtgactctatcaacagatctctactacattaacattctttgtcctaaacctgaaagactcccacttgcctattcagacctaagtatcactgattgacaaaccgaatgaaagtctctttatcgtgcctcaccctacaccaaaagcagtattacaaatatatatttttttaacctgtgtttgtaagtaaaccagctttttggaagacagaatgcactattgtggtcatttcacataaacagaatcaaacagtatgtggccttttgtgtctggctctttcacttgacagaatgttttaaggcttcaagatacattttgtaacatgtattagtactttgttccttataataataataatattccattatacacatatatcacatcttctttatccattcatcagctgatggacatttgagttgtttctactaaaaagtagaatagccctactctgaacatttgtgtatatatatgtttttgtgtggaaaaatgctctatttttatctcaaagatttgtgcatgcttcattacatgccaaaagccttattaaggccaaaatgacatcttagcatgaaataaagtacactttcttaaaccatattaatttgacttaatgagattctgaattgttaagtatagaaatcaatttgatttttgtgcaaacaatgtaaaataacatttggttgacctgggctccaaattacttggtccaggcagaatatgtaaatgagcattctgaatataaaatctggaccgtagcatttacaatttaatwaaactaataaaatggtatacactgtactagagccagtgtctttggcaagttataatattctgtaacaaaattaaagatacatgaaaacatagatacaatattaagtacatatatataaaatctgttaattatgtttattcatcaatacattctaattaaccccttactctcaagttattataataacgtggcctcactgaaaaattcatgtaataagaccctggcacaccaccattattcagattggtagattaattgcccatttactagtaattttctctgagacagggtcttgctccatcacaggcttgagtatagtggcacaatcacagctcactgcagcctcaacctcccaggctgaggcaatcctcccacctcagcctcccaagtagctgggaccataggcgtgtaccaccatgctcagctaattgttttattatttttgtagagactgggtcaccctatgttatccaggctggtctcaaactcctgggctcaagtgatcgttccaccttggcctcacaaagtgctgggattacaggcgtaagccaccagcccagctttaattttcttgatcctttctattttctcatgttttatgtcaattcatgcaagataatctgatctactatatttacaaagtttttaggacttcaaaatagtatttattaaggaagggattatttttagttaattaaattttcaacatttttgtacctttattaatttctaaatgtaaatttttctttcagtatttacagccataatttttttcttgttagcattatttccgactgcaatataaaaaacatgattattttcctttcttgtttcaaatgaggacatctctaccattgtaattcaagtaagttaaatgaatgaaaatgttttaactttatttgcaactgtaaagtgggctctctgtaacaacaggtacatgaataatgttttaaaatttaacttaatcttagcctgctttatcctaaggcatcaaaatgcttctaggctatgtttcttttgattttaaccatggcaaaatataagcagaaaygtaagtccacttatgcaaatacaaacttgtaaacagaaagcccaatcaaccaatgaatttacttcactgcctaacaataatgagtttgtgattacacaatcacttgcctttataagcwtggataatctagaactccatatatattagttttgttttttgttcttgtttttttttgagacagggtctcactctgtcgcagtgatcttggcccaccgcaacctccgccttccaggctcaagcgattctccggcctcagcctcccaagcagctgggattacaggcgcccgccactacgcccagctaattttttgtatttttagtagagatggggtttcactgttttggccaggctggtctcgaactcctgatctcatatgatccacccgtctcagcctcccaaagtgctgggattacaggcgtggccactattactactatacatttgtttcacactatggccagttaatgtctgactggttactttaataactgacatttatacagcactgtagagtctccagtgtcctttcacatatattatgacactttaaccacacaatcaccctgtgagaaaggacagtcattattacttactttagcggtgaagaaacggggttagaagataactaaccaggccaatatcaagcaaatgggaagcaataactaatctgggttcctccctccatcttcatgcctagtcctgtgcttttagtatatctggctagctatgagagagaacacagattattcagggaggagggaggggccagaggtgttactgaggtgagcctcatgagcagttaggccatgaggtaagcacttcagtgctttgctactcacggggtggttcagacgagaaaaatctgtatcacctgggagctagttagaaatgtaggctctcaggctccaccactgccctaccaaatcaaagtcgyattttcaacaaaaccccaggtggttcctatggacactagtttgagaarcactgcttcactagtgacactacatggtcacttgaacagtatacattagactacttatattcatcattgttgacgtgttaagtttttattaggtaaaactttctgcaacagttttcaaattaagtgtatttttaaaacaagtttatttttccaagtaattgaagatctccacttcggtaactggggtcattaaggaatgttaaaaaaccttaagctggtcagtgcttacccacttttaaattcctcataaaaattaaggtctttcttttgcctgaaggatacactagagagcataactgccgtctccatactttaaacccttgactaaaacaggccaatcctactgaggtaaatcccacctcccaacttggatatttcaggaagtattgtattgtttttctgactctaaactctacctaattaactaattagtctcaacactttctggctcaagaactgaaacacagcaacagaagctaaagtttgagaatttaagcttgttcccacatctacaccttggsggacggcagcgactgattacggagaccagtgaaaaccctgcccctaactctctctgtcctagccccatccactcaattgagcttgactcagcctgctccctgctgttctcagtattgctcccttagggtcagacgtgcactagacttcagcacgtgggagcgctgatgagcggccaacctgggtctatttaaaactactattcccatctcgaggggcgcctcctcccacascataaccagcccaggagggcaggcgagtaaatactgctcacctgctccaccggaaacctcaaaatcccggcycgagctagactaaaggtatctggtaattaatccttggcacctcccaccacacgctcctgattgggcgcgtgagacaaggctgtgtctgcgcgcgctcttaccagtctggggaattccatttcctctaccaaccaccggcataagcattcaggggcgttgctttcctggcagtggcccgccccagttcgagccggtgccttactgcgtctcgcgagaacttatgcattttggaggcggaaccccgtcaggaaaagcgcacaaaactgctcttaagtcattgcagagctaccgcttcggttagccagccacgaagttctcgcgagagtcgtctcctcgataccaagtgaggaaactgggggacgctgtggggagrggcgtggggctggatcgcgcagcggctgcttcctttaccttcctcccatggtctccttccggttctcgatgcttctctgagcctaagggtttccgccactcgttcaccctccccccagctcatgatcytcctccctcccccgccctcctggtccaatctccgatctgtttagtaagaaggtgctgttccgagaaraaggaaaagggcttgacacgtattcactcggccccggacgtgggaagcaagccgtctggcttcggcctcacatcggtcytgtgctcgggacggcggcgttggcggactgatccgcggcggtgaagaggcaggaggagggggaggggcggagcgtggcagctggcagtagttccgtcagagcggacatcttgtggctgtgtcgtgcgcgtgagccccgtagggccggggaggcaccagctgccgcgcggggaggaggccgaggccgcagcttgagggaggccccggcccctctgtacgcgtgggtgtggacggctagggcagggaagggaggccggcccagtggccggccgggtaagaggggcagtgcgggacctgggcggcttgagcggccagcctattgggtgcggtgggttagggtgggaaggttggggaagccgcggcctctcctgctggaggaggagggggaatgggcgcgtcctcgcgcctaagccggagcctcagggacagcgcgggcgcgtggtggaggtggctgggcgggcgcgcgcgggagcgcgctggaaggcggagtgagtgtacggtggcgtcaggggtgacacagaatagctcgctgcgaggatagcaatacacatcaagtctcccttcctttatttcyttccttttcccggccgcacctttggacagaaaccgaaagcagcccggcgtccgtccggagtcttatgcttccccctccccccttgcctttctttgccctagtgacgccggtatagcgccgactaggccccggctcctcctctgctgggctccggaccctgccccgcacccacccctttctcctacgcctcttcctctcccacccgggtctcttcctttctagaggccgggaagttaaacttgtagccaccacctccgctcttcccgtcaccctcgcccccacttcgggccgaaagcacggtacagaggctgttggtggctttgccacgccaccccacccaccccggatcgcggctgtcttaagggacctggattcatcaggggctcttcggggcctgtgcgagtgctgatctgctccgtttttgcaaaaggcgcctgtgtctggcagagctggtgtgagacgagacaatcctgccccgccgccgggataatcaagagttttggccggacctttgagcatacaccgagagagtgaggagccagacgacaagcacacactatggcgctgaaacggattaataaggtaacccgcggggacaagggcatggggtggtaggagaaaaggaaggctcgggccaagaggaaagcgtgggggtgggaaggaagcataattctgaaaatacytcttggatcacttcttccatggggggatggagaacgcagatatacttcttgaagaaatgaagtttaaagctaggaaacggagaacacttgtggcaagtgaggtgttatcctgagtgcttcagtggaatcggtgcaaattaggggtggaggagagtgacttaaggcgcctttattattttatttttttgctgcttaagaaggagtttttttgggggtccgaattgcggagagacgctccagcagatgtcatggcgcttcctattcttggtgcttgaaaacttagtttagttgtgagatcaaggttatctaggccttctaggggtaagaaagaaaactcggaggagagaaaaaaaatctggcgagtcccgaacttgactgagggtcgggtagaagaagtcttgcgtattgaaggtcagtcagtgagtctagtagaaactcttagtcgactctgggcaggttacaccgaataagtgggtttgggaggagatggaatgacacagtgttgccacttcctgtattttgtagttgcagcttttcacccgaagctatttatccgagggacaccgggaactgatgtaaaaggcattctggaagctcccttttccttttggctggagagtgggggtggataaggggtgcgatggcagtaagggaaagctaatgtacctatttttgcctcattctatttaataacacccttgtttcgttacttgaaatgtggtttgatagtatattatcgatttaagttgaaaaaaaactaggatttttcggagctctgggagtgagcggaacctccacctccggtggtttagtctcattttcttgctctaacttctatcccgcattttaagatggcggctgctttaactggttcaggctctttccggcatctcctttcgtaataatgtgaattaatatgatttgttaaatgttaacttttatatcgcgttgtgcactgctctaagatcctctgctcaaaacttacctaaattcaaactcttaaactgtatttcccttttttgtgacttgtatttgtgtgatgtgtttggttgttgcacaatcgaagagggtggagtgtttacagctaacttgaaaaaaatgtcatggaataaattcagccttactagaaaaattgtggagtgtcggtgagtgttagaaactttggttttaatagattacttttttaaaaagagttctgagaggaatggcaagaatttgcctttactaaaatagacctgatactacatttgcctgtatttaattatgactggagtttatttggcaagattggtgtttcatgaaagaggaaggtttaaatcttcactcttagtatgtattgatatgaaatcgtgaattttgttttgggccttcataacatcgtcattttgggttatgcgaaatacaaatttaaatctttgtgaaatgaaagaaaagaggaagaaacgctttttaggagttaaggattaaagtaaaaattattttgaaataattacctctttttgtgaccactttaaaggccaggaacatattggagaagcctagttgtatgttacagtgtggtttacacaaagagcataacattcagtacaaataaaaatcttttctgttggaattagttcaggccactaaaatgtggaatagtaccagatccatagctttttgtgcatgtggaacagaacacgttaaaggaaggcctctgattttttttctcttacaggtcatacccagctgctgtgacaccacttaaatgatttaaaagctttagagagacaatataacagtggytaagagtgtaaacattggagcagaaatgctccagttagaattctagctctgggcaagtttatgtgcctctataagaagggtatctgttgtaatatgaacaataaatgactgtgtgcctaatatgtaccaggcactgttttagacattggggtggcagcagtgaacaaaacaaattttaagttcctagatttgttttgacgattaaatggattaatgtgcaaatttgaacaggctcttggcacatgacactcctagttattactgctattttaatatcacaatttataatttttaaaaaycgtttttgtttaagaactttgatttctagtttagtactcttagttaaccaggttgtctccttttgtaaatattttgaagatttatgtaatatagacacaacataaaaacttggcatattggaaaaaccagtgtttatgtgaacattattgattcaacttacagaaactttgacgtgtgcatgtggtttggtttttcagctgttaatgttaraatcacatgaggcaactttcaaacattccacatccaacaattttagtgagtggacagctctgaactggaatgctcttcggtttaggcacctcttctagaaatatggggtcaagtagccattgatgtcagtatggtatgcttgtgttacgtacctatttcgaatttattcttgtctgaaggtcccacatttcaagtattatgatatatctgtattcctcgttaatattttactgaaatgattattggaatagttttaacctttagtccatttgatcgagcttttgaatktatactttgcttcagctgtgttcttggagtaagttttttgactgttagaccaatcaacttttttcctgtattctttatttgaacgagctgtaatatggtcttaaatagggctattaaacaacaggagttaaaagtggcactccaagttgattggtattgagagctgtagacaattttaccactcccattaaacagggactacaatatatgtgttttagggacgtttgaagataaatatgtgaaccaagcctaaaagaatagctcatgttttcattgtatacaccctgttaagttttcgtaagggtttttatttctggaagtatgactttagtgtttatatatgattataagcaagcggctagcagggaaaccatgggtaaagggttaaaaaactctcatttgatcttcgtttccctcctaccaccacttccactgagataatttcaagattatctccatctcgaaattgaaaaacttaggcatagaggttaagaagatgacccaggttcatgttgtgacagttgggattagaacctaggcagcctggtccagagtatgtgctcttaacaactacagtttgatatcatcctttagtttttttttgtcattcagaacggtttacttttgcatatagtattatctattacagtagttaagacaatgcagtctcatctaaaccctaactcatttaatcctcaagacaaccatgtgggatagatgtgagaattttatagatgaagtaacaggctcagagaaatagtcgtctagtcacacaactagtaagtgactgggattcaaatcagataggcaccaaaagctcaagctcttttttgaaccatttcaattcctttttttgttgttgttggagacggagtctcactgtgttrcccaggctggagtgcagtggcgcgatctcagctcactgcaagctctgccttctgggttcacgccattctcctgcctcagcctcctgagtagctgggactacaggcgcccaccaccacccccggctaatttttttgtttttttagtagaggcagggtttcaccgtgttaaccaggatggtcttgatctcctgacctcgtgatccacccgcctcagcctcccaaagtgctgggattacaggcgtgagccaccacgtggcctggcccttcaattcctgttttataatgtatgtgattttagtttgttacctgaaataagctgctttgctctcccacttatacatctaagtaattgggagttagctttactcttaggttatagctaatttgtgagttaagattttggctaataatattttgaaagtagaagtggatttaattcttttggggtagtctcttcaagcactgaaaactaacatgtgccagttaactgcttaggatgtcttagagtgaacaaaatatatttattgtccccamctagtatataggctgggtaaactgtcttgcatgtgtttcatatatggtcctcaaagcttgttgatagccagctcactttctgtgtaggatagttgtgactgaaggatgctgataataataggacctcagtatttgtttaatttgaaaaaggatgcattactgacactgcatacttttctttcatcatgctcatctgcagtgttgattctagtttttgttatttatacaaataaaaagttgaatgctccatcactgggatgaactactgtgtcactagattgctctgtcaaactttgcccctgagtttaggtgaccctttttatccaagacaggcaatctttgaggattctccacagcatgttgctataatctatctattaaaaaagaaactaggttcgtaacactgagataaaaaaatgtttcagattaaaatctcaaacctaggttggtttttgcattctttttttaaatagcagttttcttgtatctgttagcgtatagaagagcttactgaatattatatattgttgggtgtgacatgaattacatttatattccagaacatttggagtttttaaaaaaattttgtgggtacatagttggtgtatatatttatgggttgcatgaaatattttgatacaggtatgcaatgcataatcacatcagggtaaatggggtatatacctcgagcatttatcctttgtgttacaatccagttatacttgtttacttatttttaaatgtcagattgtttagaatttaaaaaaaaaaatacagctgcatgggggtcttagacttactaaatcattttccctggaaacacataattttgaaaattttctaggtgattctgaagctcctctctgattaagaaccacagatacargggagtaaaggtcctaatctgcattagacgtagtattctagtcccagggaataaatgaggaagatggtccttatctatggtaatctctgcgttcagtggtgaaaataagcatgtaaacacatgaatagttgtttgtcactttgtaatttacctttcaagaatattagatctagtaggggaggtatttaaaataaattttctatactgtattttttgtactagtattattacaatgtgrtttgtcttttattataatgacttaattccccttgccaaaaccagtattttgaaattaatgaaataaaactctccattcttggaaatgttgtggtcttgagcttgctaccatagcagtgttatttcataattaaaaatgaatgcattcaccaaatatcttactgcccagtttctcttattagataagatttattcagaattgtatcctcaaccttgttatgtagggaagggaaaagtttagggaagtatttttatactttgttgaaacatctgatttttatctcctaatgatactttcaacataatctattgtaaaagagaccttcaacttttcatagctgaatttgtcgtatttaaatgtttgtcaattgtgaatcatgatttcttgtacctttttcagtatgaaatacttacattaatcctaaccttgctgtaatttcatggctaatgtgtaatygaatgttttctactactgggcagctgtttggctgttaatctttgttttttttgtttgtttgtttgttttgtttgttttaatgtccataaaacacccttcttgctttcatggagcagagcttcaaatctaaatttgggtttctttgcccatttttaaataatgcttacaaaagaatggctttgaataatgttaagtgactttaccttcagtggtgatcgaaagaaaattagtaatattcaatccattcttagtaccttgtgtaatgaacacgcrtgcttgtttcacctataattacgactaaacaggaagttaataccttgtcagtgatgcagtgagatactgtgcagtgcctactgttaawccttaagataaaaaaggatttctcagaagaaatttcaaattaaaatgtgttttaaagggactatttggagttttgtgaaattgttcatatctttttgccaagcatccttctcttgaaataaccatgtttctgaagtttgttgttccctgccttgatattcgcatctacatattttatacagacatttcataacattaaagttaataaaactttatagtaaaccagatctttatatgaacagttacagtagttactgtctgcctgatggacagctaattgcactgcacttcgacctctattgttggttcgcacctttgtatttttctaggttggttgtaaagtcttcttgaggatgattcttaaaatttcttaaggcacttactccctttgtttcccacctcattttatcatctcttccagtccccaaagcagtgttttgtgttgctcagtataggtttttgaggcaagggctgtttttataatgctgattcacagtcatacaaatcttgtcttttgagtcatgtaaatcttgtctttagttctgaaagaaatagactctcaaatagaatacaagaaattaacctttagtaatggcataagcttttagttttccggaaagtgctgagaggaaatgtatctatactactgcgttctgtcctctgtatgacctttgtgtgatgacgtgcaaaatagatggtagagattgggataacaaatgatttgtggaacatcgtggtgataattttactgtcttaaaggtagaatccatgaacttggccttgccactatataggcttttgaattttgacaagccttggggggatgaaacctagaataagttatttatggcgttacgctttaatagggttgacacttaaaaccttgttttcataaatgctaccttttggttatgttgatctgatgaacagatactggctgtcattgaaagaaagttaaccgaatgttcagatacttattgggctcctggaacatggctgctctgtagcttcatgaatattcataatattcataaatatttgtgaataaatatttttagtatttccaatttataagctctttgaaaggagggaatttttttttttttttttgaggcggagtcttggtcagctgcccaggctagagtgcagtggcgcaactgcggcttactgcaaccaccgtctcctgggttcaagcaattctcctgtctcagcctctcgagtagctgggattacaggcacccgccatcatgcccggctaatttttatattttagtagagatgggatttcacgatgttggccaggctggtcttgaattcctgacctcaggtgatccgcctgccttggcttcccaaagtgctaggattacaagcgtgagccaccacgcccagcaagggaggggacattcttatgtttctcctagcatcctttcaggtctttaatgttttcaataccttggcctactgttctttgtagcctgtggttggtcaccactgctagtaccacttatcattgaatgaggaagatagagaatagagaagcagaaagcatagtttaacatctccaacaatcaactgttaaatcccatatcccatagtgactacagtaaaggtcttcctcaagataaaccatttgcaggctttgtattaaaaatctcatgtaaggaatgtttcagaataaaaaaaaaaatagtgaccaaacccattactgcttaaatcatgtacttccagatgagaacactcaccagtggcttaagctgtacctgttggttgccttttagagagatttttttggtgaaaaaaatcctgccctattttctaccatggtgcccaccaggtcttcaggaaataggcaaacaactcagttgtgtaaagtctgttgctgtctcaaatttctttgtagtgttttaactaatgaggcgaactagaccatgtgagagctttgagagggtctcatttacctagcttagaaagaaggcagaggggtctccttgacttcttttcctataggttttttaaggcttttaaatacaagtattttttccagtgagaaggtctggattctcacactagccaagtgtgcagaaagtttgaggagaagcagctcagaggaagatgacactaaaaggagaaagtttcctaaaagagcactctgtggaaaagaaatgtccaaccttttgttctttttatagctagtacagtttcttagtgttgtaccctgattgtatgtgcttgatcttagtgtcccttcaacgtgagtggaaccttgagcaattcctaaagtaagtcagtgtccccaaccaaacattttcctgtttcagtggccttaatagttgagtaatgctgttccccttaggtgaggggtagtcagcacagtataaaaaaattttacaggtgccgtgtgagagctgttccttctggttcttggcactgttcctcttcctctagactgctaggaaggaataagctgaaaatttcaattgtgtaattttttagtgtttttgtccctgaagcctgtgaaactttaggctctaaaaacattttgttaggtgactatcgtagacaaaattacttttaaaaatgctgagtatgggtgtcgttggaaattgatttccagtccagtaaatrgtcttgctgtgggatagaatcattttctcaggccatgtaacttgaaaaatagtactggattcacactacgtacgaataatgagatacagactaacggtggatggttatgcggaaataaatactaaggaaaacattagttttccatatcgtgttcattctggagcattgagtaatagtttggtgcagttgagaatttttttccctcagtttgccaaacattaaattatctttgcaaggacaccctgttgagaaaggaacctttttgaaacttacccctagtccaaatttttaagttgttagtaggtacacttagttcacctatcctaaagctgaacatgttctatgcttgaatgtaatcatttctttcccctctcttaagggactcaactgtaaaacagagaagatgagctctatttccgtaaagtggttataagagtacagttaaacacttgtggtgtacgactgctagtatatttaaaaatcaaaactcatttgtcttctatttcgaaaccatcagtgatttcccattgcctttggaatagtctgactaaattcaagggctcttttaaaagatcaagtcataacctgcctttttagctaaatctgccactctcctrgtgtactctgtctggtataccaaactctgcagtatttgttctggcaaatttttatgccctgtgttctttgacactcctgactttgagtttctctacctagaatgcttctctyactccttgttsttggtaaatgcctgcttatttttccatcaagagccagctcaaatggcactcctctaaacccaggaaaagttagtggttggtttttcaggattctcagagcatttgagtccctttattttaagcrtgtaggttgttaaagtataatttttgttttgtcttgcacctgctttctgttagctgagtctgaggaggcatttctatcttaattatcttggtgtttttatacctaacatgcatggcaccaaaaaggcaatgttcctatgaatgaatgaatgttttgatggtgaaattaacattacattttcattttagaaatggatttaaattaacctccagtgtgaaagttaaccttgttactcctaattcaattttaagacttagcttcatttagatttcttacatgtttttcagcaaaactcaaaaactaaattgtgtttgaagtggcataaaatctacataattggtattcagatttggtctctcactactgctgtatatattttttaactccttaatataatccagattaaataagggatttattagaaggaaactgggatagttaacaatgaatggaataggtgtaggaaccagagcaagctacaacctcaggaaccaaaattgcacatctgtatggaaagtcagctctttgttattgctgctgttgaatatggwctctttagcttttgactttaccatgtaagtccatgacacgtgcctgtcaacagctatgggtcacattcttatagctcttgattatagaaggaagaatgtccctttgatttggaaactcttaggttgggatggacaatggactaatagttgggtcccagctgagggaacaaaattctgtggttagtcatgtccaaataattggttaatgatggctgacccaggactacagtcacatgatttggagtaagggaaaaggaattcatgagtaagatggtttattgagtagacaaaatgtctgctagctacaaagagcatctgctatgacttactcttttctcacttttttttcctacgatactgtcttgctcattctgtgggcatataatgttacaaaaattatttggtagctcaaaggtaagtgcttgtgcatggttttgttactattgggtactaagtggtactttaaatagtaatattagatactatttaaatggcaagaaagaaartggtgaaataagaacagcatttktatctttaaaaaagacctttgttttgattgttaaaatacttaggtcatttttctatattgaatttaaagtaggtaagtgtattgggctgattttatctctttgattattactaaagagatgtcttggtgatggagaacttcgaaagtaaggcatttagaaatgttaggagagtaacaagaacctgaaattacaggagtgaagagctgaaacccagtgttaactagctgaaattataccttcactctaaaaggatgataatgctagcatttaaaggcttagtgatggataaatatcagtgtgccgaaaactcatttattctataagaaatactttcttactttctttgtaattgaaatgtgtaatgttgaagtagtatggtgtttatattctaggtcaacttcatagttttctgacctttagttttatttataatgaagtattccaacattattgggtattgtgtttagaacaaccatgattacattgatttttattttaaaattaaaatattttatcttaatatttattctggccaggcacggtggctcacgcctgtaatcccagcactttgggaggccaaggtgatcacctgaggtcaggagttygagaccagtgtggccaacatggtgaaaccccgtctctactaaaaatacaaaaaattagccgggtgtggtggcgcacwtctctagttccagttactcggaaggctgaggcaggagaatcacttgaacccaggaggcagaggttgcagtgagccaagattgtgccattgtactccaccatgggcgacaagagtgaaactccatctccaaaaaaaagaaaattacgctaaatatttttgttcagmcattttaacatatattaaatgtaaaatctagtatgtttattgagttaattatgagtaaataaatgtaaaacttggattgtgttgtcagctttttaaactcttatttcagtattaggtatattcagatgcttacaaagacatttttagacaactgagcatcaggatttatcacataggtcaaaaatttaaataaacaagtggctatattatgtggcccatgtgtggagcagttttgcttttgttcagtaacagatgaattaagagccttgcccaggaatcttggttcaggatgggtggtctacacatggtctgcttgttaagtaccagtccattatgtgccaggtagtgattcctatttcagagatgagaagagaaccatgagaaaaagtaggcctgtgtaagattaaaagtaagactgcaggcctggtgcagtggttcacacctgtattcctagcactttgggaggccgaggcaggcggatcacttgaggtcaggatttcgagatcagcctggccatggtgaaaccccatctctagtaaaactacaaaaaaaaaaaaaaaaaagaatagccaggtgtggtggcatgtgcctgtaattccagctactcaggaggctgaggcaggagagtcacttgaacctgggaggaggaggttgcagtgaaccaagatcacaccactgcactccagcctggatgacagagggagactccatctcaaaaaaaaaagtcattttcttaatagtggataatttaagttgcaaaaaaaaaaaagcttctgaaatactgatttggttcagttaatattttctgttacaattttttgaaggccaaaagccatgtagtttcttttacagattgttgaactgcgatatgaatttctgtaattcccactgatcagaatcaatagtatttggaatgaattttcttccatttctgaatatgtggaagacatgagggtatatctatacagacaagcatataaagggtgtgtgatatacagtcttaaaattgtgaatcttgggatctctggcaaccttgtaagtagttgtgatgagtttccaaagtgaattggcacagcatatcaggacaattctccttgtctactctatttttgttgtttgttttatggcattaatctagactgaccattcccgaacaactggccattttctgaagtgtattttgaatataagaggcaaatatttgcctcttaattttcctgcagtgttgtttattgtgacaaagcctttcttcacattctttatttctttttaacttttcaggttactggccaaggttccctttcttagcgttaaattagtccagtgttaactcctaggaccttctgttccaggagtgctctcaccaagttgaatggctataaacatcatttgtttattaatgatactttgtatttgttcccagcctgttctcaacttgtatatatacttttcraattgagtctttacttacattatcctattttacttactttatctctacatctgcccacaagcttcacctgtaagttgaccattttacttaatgccaatctcatgctttgctcaggccaaaaatcttagcgtcaccttttcttcccacatggagtcaatcaacaaaattcattgtttaattttacaattaaaaatgtacatttattgttcaacaaattgctgtacatagtgatgcgtacctgcaactccagctgcttaagaggctgasgcaagaggatcccttgagcccaggagttctgggctatagtgccttatgattgtgattccgcctgtgaatagccactgtagtccggcttgggcaacatagtgagattcccatcacttttttaaaaggggagaggattggtggacttttaactaaacaactttaatcaaaacttcattttttaaaaaagatactattagagcagttaaaactttgtgttgatcatcttaacatttttaaaggtagtacaattattcttagtccgtatttgtgtactctagtttcctagccctgtttctcagtgctgttttgctaatatctctaatagtcttacttaatcttgttgaaagtagcacttttgaggttaataaggtttaaattaataacccccattgactgtagtctataatactataattttttaaatggcaaaatgccctctgggagctaaggtgtcttaaaagcttagagcaaatcctgttaaatgggacaaagtctcaattcttttttaataagacaaaaacactttatgtagtctcttttctttttcagtgtttctcgaaatttcaattttattccatgctgctacagaatacaaacttacccaataaaaatagcagctccattgaaagagctttcccacaaattgaaatatttaaagcacagttacaggcttgtgtactgttggtgcatacattgtttgatttgttcagttcctcagttttgcagggaaagatgtcaacattatctgatttttcaagctatctattcaatgattctaattttctaaaagacttggaagctgggttgttttttgttctggcccctcagtttgttgagagcctattttaaagatttccrgtggatttaacaaaatgaacaaaatttagaggactcatttatttcccccaaccaagtcagtgccatagtgggacccttacataaatttgtcactgtgtttaaatttgatgtagtgaatgaaaataatcatctgaagccagtataaaataggcattaaacattgttgtccaagctagagtgcagtggctctccaccagcatgatcatttaacacacaaaaacctgaaacacctgggcttaatcctgcctcagccttccgagtagctgggactacaggcacatgccactatgccttgttaaattaagatttgtagctcttcttcccattccctgcacccttctgagagagcttatactgaaagttctgcattttgtgtccttgattttgcacaggaaggcaaaagatcacagttgaggaaaaaaagtgcatgtacccactttgaaaatctgtttccatttttaaattcctgtagttatagggaataagttgttctagtagaccaaaagaagattaatgtttttagttatacacggatgcattgatattgtggtagacagttgatactggctttatcgtaatttttttttctttttatggagaatggggtctcactatgttatccaagctggtctcgaactcctgcgctcaagctgtcctctcgcctctgcttctctgttgtatcttttttatttaggcatcctttcttttgctttctagtacttggtcttttgtatatgartacgttcagcttttctggggktttttttttgttgtttttgagacagtctcactcttttccccaggctggagtgcagtggcgcgatctgcagcctctccctcccaggttcaagtgattctcctgtatcatcctcccgagtagctgggattacaggcgtgtgccactatgygtggctaatttttgtgatgttagtagagatggggttttaccatgttagcagcactggtcttgaactcctgaccttaggtgatccacccttctcagcctcccaaagtgctgggattacgggcgtgagccamtgtgcccagtctagcttttttggtcttgtttttttgtttctgagacaggattttgtgttttttttctgtctcagacagctctgttgcccagactggagtgcagtggcatgatcacagctcactgcagccttgacttgttgggctcaagtgatcctcccacctcagtcttctgagtagctaggaccccakgcatgcaccaccatgcctagctaacattttcgaagagacgggggtctccctttgttgttcaggctggtctcagtcaaactcctgggctcaagcgatccctgtctttgcctcccagggtgttaggattacaggcatgagccacgtacctagtggtcttctgctgttcaaatggaatcccaaaccttacccttctgtgttatttccrtgtttatatgagaaaggggatatagaagatatagtagtccctagacttaatgggtgtactgacttatgccatagactaaacttaagagaaactgttagtttgaaaatgttgaaggcagtaatgtattaacattggttctatttattgtcttttttttttaacttgtgattattagacattggttatatcattggtaagatggagctgtaccatcttaaaaatattctaataaactatattttcatagtagataattcatattgttatgcacaagtcatggaacagtgaactacatacttgttggaaataaaacgttcatattgaattgtgcagactatatgttaagagcaaacgtctttctacttacagaagtacgctcttcagggtcagaatttcaatcacgaggtcaggagatcgagacccatcctggttaacrcagtgaaatccygtctctactaaaaaatacaaaaaattagcctggcatggtggcgggcacctgaggcaggagaatggcgtgaacctgggaggtggagcttgcagtgaccccagattgcgccactgcactgcagcctggagactccgtctcaaaaaaaaaaaaaatttcaatagttaaaaatggatgctgagtttaaaaaaaaaaaaaaaggttgagttgagagaataaggagattagaaaacaaaaaaggtacttagccccatgagagtttttttggtttgttttcaggtagaaaatagagttagtggattggggaggaaggatggttcaggaagaacaaagaatttaagacagttgagggcctctgaaagtggtcttggaagttcaacaaataacgtgaatgttgagctctctctggtctaagctcttaaactatgagaatatctaattatagctatttcggtttgtaagagattggcttttatgtaaataaaaaattttgtatcaatgtgtttgcatatatatttttacgaactctagctaagatgattgtctcagcatatgttcaggcatgttctctctcctaatggaatatattatttatgtgaattgtgatggagtgtgcctttaaaaatagggtgaaagtaactgaaagcagtggactcatttgcttgttttcttaaattaagcttatgtgactcacccattttctgtcttggtgtaggaacttagtgatttggcccgtgaccctccagcacaatgttctgcaggtccagttggggatgatagtaagtaacttgcaagttgatttttatgcctaatttttttttaagcttgtgcatttttagataaccagagttttttttctttttctagtgtttcattggcaagccacaattatgggacctgtaagtattaagaatttttaaatttagttttaagtgaaaatccagcattgatttggttgtaatttttaacttggtctgtaggtttattttatcatatagttaattctattttggatattccatagttgtactgcatttgaaagaaaaaacataatgagttagtcatttgttacgtgtactttgtgtctatccctgtgttcacgttctagagtatagccatctctatgacctaccaaacatctctgtatctcagttcagtttttctacatagcactgtgtaaagcattgtcatggaacttcctgttatttatagagacaaagttactggctctgatmtgccatgcgttgtgttactcagagatcttattctgttactgcagctgccaataatctagcttaattgtattttgatatttgattctttatagaacttcagtttatgcaaaatttgaatatatttaggcagaaagtgatattttgaatatagcaaaattcctttctatcctgggtagataagcaactatatgctggataattgaatattcagaattatggataccatctaagaatttcagagaattagagcgcactaaaacatcctggggtaagactgtatcttacacaaatatttaacttttttttttttttttaacttgctaaggcgcttaaggatttgttttctaagttacatgtgtatcttcctgaaaactgtcttccctttttggtggttttataagcaacataaagagcaataatgtactaggtgagataatggtcagtaagtaatatttagaattctaaaggaaaaaatgctcttagagttagtagatgagtcgaatcaacaagtatttatttagtaattctgattctaactttagtcatttttctgtctcaaatgtgagtacatactgtgtgccaggtaataaggatacaaattgaacataataaacatccctgtcgatcttatagggaacttacactgtattagaggagacagatacctaaaacaagtgctgaagtgtgacaagatggaaaataagtgattggtgaatgaagtgctgagtaggataaattaatgggaaattgwagcagggaggattaatttagagtaattaaaatgttagtgccctaaaggtagaaaaactaaatcaaagtaagacatggcaggggtgcaaatattaagtttaatactttgaaacgtcctggatcattttaaaacaaagtaacatttaaaacagtaaaaatagtcctgtaataacgaaatgcacaatcctggctttgtagttattaaaagtacttacttttatctaatttggtagcaatattgtttaattttaatacacgcagttaaatgtygagttacccagtttggcccacacgatatttttgaaagttggcagtcttcaaataaaagccttctgagtaggcccacattccataagcagtaatggcttgggatggaatgacagctgcctcccttttttagatgggatatgtgtttaccacagtgcctactaggtcaattccatattatctgcctagtgttttgtaaagcagttgcttttgcaacctctagaattttcccattttggattaccagttttcaaagaatgctataaaatgccttaaaataaagctcatctttgattcagagggtagttgatagtttcattataaaaattgtcaatactaagaaagcacagaagcgttggtaattaaaacttctaattggatggtgtgcagaataaactaactctttaaaactagttggtttttctgcttgacagtttagactttgttattttgaacaacacactagtttttcccaaaaggcaaggaacatacctatagacaatcaaaaggaaacatgaatgatgagtgtatggtagtaatttttttagagaatggtgttgcttattctgacagattttttagcagtttacttaatttgctgttattttgagaaaacatttaccttttttcattttttaaatatatatttcaggtgatggctattccttgctgaactttttcagcaaccttttaatataatgactagcagttttctgcttttacaaacagaagcatgtgattttcagaaccatttaaatattaacctgattaaccacaactgctgggttttgctttggtagcagtactcactgaaatatgttttcagttaaaaaggttagttctcactgttggttgggtaaatttcaagaaggagtcaaagattataaaaatccacccaaagtacgggtattgtcttgtacataagtaagcacataatttagatgccagctttaaatagttaactatatgcttactgtggagtgcaccaatgaaacaactcattttgttcttttggcttctcaatacttctttgtgacaaagcatcactgtataagataaatagtagcttattttgtgagtatggttgctctatgtagcaagcagttgtgacctaaagcaacccataaattacagatttagtgggagaactggacagttaacaacgtcacttttgctttggactactacttaggtcccttaaagtggtgccagtgccacagaactgaagattcctgactgtagggaatataccatctaattttgagtttcartagagtaactttgattttagtgagttgttgggaaatcctttagatcattagttatgcagcaaaattgcttggctttaataatcatatgtactggcttattctttctgaaggtaagctacttcggaagcacaactattgactaaaaactaaaccttcgaaagaaatgacagcattgctagttttttgtgtgcgtggktttttttggggaggggggcgtggggtactgtattaaggttagtttccaacaagaattgatgtaattagaagaaattgacttccttacctattgcctctgatatttacttgcttaaatttttttttattggaaatccagaaaaagtggatttagagaacaacactaactcccacctaatctatgacagagatgtagaagagagtacctgtgaaaaatgtgaaagtatctgaaaaatgtaacctttggcagcctgagcatagtcaaccagaaaaactatctgaattaaaataattggtccataggtactattttatttggtccataaggattattttttcaacttttttttcaagtgtattattatgtcatttcccacgtaggttactgatacctgaagactttttccacctttaaccttactcgttgaggagctttgtagtctaataaaagagaaatataagtaaatgttagatatatgggtggataatggtaactatgtgcttaaagaggtataaaagaagggtagggagcagataagacaaaggaagggctatattataaggaagaatattccaagtagggaagagaaaaagatatgttatccatataatattttatgtgcagtagagaacatgttctatagaagagacagaagatgaaactagatgggcacccagatcataaagcaccgtatgtacttaggagttggaattatcttaaaaactatcatagatttcaagmaggggagtaacatttttaaaagaccactttatcattaggatggagggataatcattagtaagctattgmcataatctaggctgaagataacatcatgaactaagatggtagtgacagtgggcataaaggagaagctaattcaagaaattttaaagatcttacttgataactatcttgattctgagataagagaggaagaagttgrtgatgagatcctggtttatggctttcagttatggcttgctattaawaaacaggaaaaaagggattgagacaagtttcagttttggacgcatgacatgagatatccaagtrgaratatccaagtagaaatatcagtaggcatttgaatatatgccctggaatgaataactgaccagagatatattttgcaactcaaatttttatgggtcagcagttaagagtagaaaatcaacctataagaataccagcatttttagctgggtgtagtggcacatgcctgtaattccagctkctttggaggctgaggcccgagaatttacttgaacctgggaggtggaggttgcagtgagccgagatcacaccactgcactccagcctgggcgacagcaccactttaaaaaaaaaaaaaaaagaataccaacgttttattgccacagaagagctgaggcactgtgagggagcaactttgcactgatgagagcaaaagaagtagaagrtttctgaaaaaatctaacataaattctggacttgtacgatttgagtcgatttgctgatcacagtgttccttattctttggggattttgtttctttttggtgtagtttgctgctgattcataatagaatttaaatatcatagggtctcaattttttatattgcctagtttcattatctctgaacctcgtagttcttcctcttttggcatggcagaactttagtgttaaattgtaacattgaaatattttgccttctttataaagttcttttttcgaacaaacgaaacgaaatttggctttgcctaaatcccatcagcagattgcctttattcagaagcagtcatagacagcatttgattttatgaaaattgaaatgaaagcttacaaagaacttctggaattaggttattaaaacttcaatgtttggggccgggcatggtggctcacgactgtaatcccaacactttgggaggccaaggtgggtggatcactggaactcagcagtttgagaccagcctctcaactaaaaagacaacaaaaactccgtctctactaaaaagacaaaaaaaattagccaactgtggtggttcactcctgtagttccagctactcgggagggtgaggtgggagaatcacttgatcccaggaggcagagggttgcagtgagccaagatygtgccactgcactccagtctgggcgacagagcaagaccctgtctcaaaaaaaacaaaaacaactttagtgtttgggattacctttaaattgttaattttacacagaaaaaacatatcttgtatagtattggatcaggtgaaagtatatgctatttgaagcatctattcaaaattaatataactatttaataaagacatgttaatctaataaactcaggtcacattctaagtgacctgagtgtttttctagttccatattttgtagaaaatatgaaaaaggactgggcacggtggctgatacctgtaatcccagcactttgggaggctgaggcaggcggatcacctggggtcaggagttaagagttcagccaacatggtgaagccccatctctactaaaaataaaaaattagctgggcacgttggtgcacacctgtaatccaagctactgaggcagctgaagcaggagaatctcttgaacctggggaggcggcgcttgcagtgagctgaggttgcaccattttactcgagcttgggcaacaaacagcaagatgatattctrcgtcttgtttgtcccccttcccgttcccattccccccgccctccacccctacaaaaaaaaagggggaagacttgggagatggagaaggactcactttaaataagctctggctgggtacagtagctcacacctataatcagcacattttgggaggccgagatgggtggatcacaaggtcaggaggccgcaagactagcctggccaacatggtgaaactcagtctctactaaaaatacaaaaattagctgggtgtggtggtgcatatgtgtaatcccagctacttgggaggctgaggcaggagagttgcttgaacccaggaggcagaggtcgcagtgagctgagatcgtgccactgcgcttaagcctgagcgacagagtgagactccgtctcaaataaataaaagctcttccatttactagttgtatatttctttgaacctgattcttcattaataaattgacctttcttctttgaactcgtgtcccttgttcatatttcatgatacctataacatttcattgcagttactttacatgtctatcagtgtaagctcatcaagataaaaaaaattgttctttggatcccttaacacacatacagtatatagcaaggggttagattaattgaattaatgtttatttattttacagaagggtaggaattagatgagctgtgttagtgtcaggcctgttttttatgtgcctgacatccagaatgggcatagtgaaaggctcatatatagctgtatatacaaagcctttctaatagaggggagtcagtgttggtaaaaacccagttcatgtaagttgtaaaacatgtcttcggattggttctttgcatacccagaagcagttaggcattccacattttaactttaaattcctgagtaggtcagtatctttgatcattaagtggtcttcaaaagacttgtgtttgaatcttggttctatcatttaccatttgtacactagactaagttctttaagcctcatttttctcatgcataaaataggggcaatgcatgtattttctggtattgattaaaatgagaagcttaggcttttctctgttctcctcttgaaggtggtgtgtgtgtgttacctggaatagctaacatttggtttgccagtgggcagaatggactgttgtgaagccatttgtacacatctggctattggaagaaataatctacatgtgtaaaattttgtttacagattattctgaaacatgattatgtaggctttattgctgtgttgtacttttgagaattgagatctagaatacttgcgtttctggataactttttaaaaaaacattttggtgacgtgtaaaatgactagrtaaattagggtttattactgtataagttttaagtttttttctattactatagactgaattttcatggaatagattatttattgcagtgtaaataggtgatttgggttcattattagagaaatgcttggaaacaaatgttacggaatatttagcaataatattttaaatttgagktaarcatacttttctttttacagaatgacagcccatatcaaggcggtgtattctttttgacaattcattttcctacagactaccccttcaaaccacctaaggcaagtattttccctcaaaatctgttagtatagatttatgctttatttcaaargaatagagcattcttggaagatagggttctgtgtaggctgtatatatatgttgaattgcactcatgtatagatgctgactcttaacctttggtttaaagagctagacctcagtttgagctttgyaaataggaataaggtttgccttttctttaatgttgcaagattcagaccatgtggaagcttccgccctcatctgtattattgttacacagattctgatttttgggcttttgttgtcttgtaagcatcaaatgtccaacttcaatttatatttgcacgtattgttacagcatatgcttattatgcttatagttttgtatacgtaagtgtaaatttgtgaaaacttagagttgcttagtgcactggtttataggtattaaaagcatattatccttcacttttcagtcattaacataaattcaacctgtatgaataactagaaaaggtaatatacaaaggtcataaacatgtcactataacaatctctagtaatgttataggtgcaatgtgatggtttccatttttgtgattcaagtttatgttttatgtacggtggaaatgcagactcaggtgtacctgtgtaacttaatgaaactttaaatgagatggtctacaaattttggttacatccaaaagttagggcttttataaatgaatgtgttaaatacctttaaattgccctttgattcatgatatggtagggccacagtaacctttagaactttacatcatatgagtaatgaaatttttatccaaaagtttaggtttctgttgtaaaaagaggaggcagggggttgtggtcagattgtaaaaatcagtttctataatatttagaacttctatgctaatagatgacatttttaacattgtggcttgattattttaagttttgctttaaaagatgtttgtttttatttgaataaaatacttaaaagtttttgttttaggttgcatttacaacaagaatttatcatccaaatattaacagtaatggcagcatttgtctcgatattctaagatcacagtggtcgcctgctttaacaatttctaaaggtaaatatttctagtgaaataagctgttctcattgtctaataaagcttcattcttagatctacttatctgagtatttttattatggcagctttttggtaagagatggggaagcaataaagttayttttataatttttgttcttttagtggtgttgattaaagatacttwgtgagaagttgttaaaattcaaattgtggtgagtaggcattatttgcctaatgagttaccttcatctcatcttataatagcaaaatttattttaatagacttctgtatttttcaatcccaaaccacttggacatctcacactaacttgcggcctttttaccaagaatggtatgatatacctaaacttaatagagcttttgaatyctgaggtttccactctaggaaaattctgattttgctttcctgggttaatttttagacaaatcttcagtcatgttttatgtaaccatgataggttgtttctacctaatgacagtctaaaattatataatcttcgaaagatctgtagatcaattctggtctcttaataggyatctgttacgttatatgtaacaagttttccggtctccgcatgaatatcccaggtgaagttgtaataattaacactatttcaccattaattgttttttgattttatgagttcagtaagtacaaaaaagctttttcaaaaggcaaggcattgtataaaagtttcatatgtgtatatactgcacttgaatctcatggagagagactgtagcagtagcatttcccaaactttattgagtagaatcacttaagggagaaaaagaaacaacttaggcagatgctgccataattcgagtgtttttaaaattttacacctgtttttcaccttcttggatgctttctaatttcttttcaaatcatgctacatacctaaatatcagtttccaagtttttctactactgctgggagtgtacagtaacactgaaaactgtttttgtaagggcagattgaattggtattgttttgtcgttaaagcaacttacttttttggcagccatactttgctaacttattaaactagcagtcacaactgaagctaccttttttctgtgagttattgtatagccaagtctcctatattaggtaattttatattctgctgtatttggggtttgaaattaaatttgctgtagtcaataaatatgtgacagtgttgtcttttttatactattgctttttttaaaaaaaaaycggtcagaaccatttcaagcatttatatcttaacattttawwacagcaccaccatatatggtgactggcacatagcaggcactcaaagtgaatgcgatctatgttcyttaatgcttgacatcttatrcatcagtatgttgarctggttaaggtaaraactagagctgatgactcacttagtactaaagagattttggcattgtatttaactagtactcttgggaatatggtttcttgcttacaagttcaaggagacatttagtggagcacttgagggtttttctcagaaattgccaagacarcggctaagaatggatttttcrtcatgcctaatggctatgaatatggcatgagtgttacctgcatattcttgctaaagtcccccccccccagccacwgagtaccaagaaactcaagttctaatatcatttatgcctatttaaaatatatatattaatatggcatcagttgcctatcttagaaactatttttatggctagtctgcagtgaatttsatgccacaaaaccctgtttttagcacttcttacttaccaggagcttgtcttctgtgaaacaaaatctctgtaaaactgtgtctcattgagataaagatacaaactaataaaagtcttttgaggattgagttttgtaatacacggtttagaaaaatttatttatccaaactcctgaaactgggtaacagatgtttttgttttcttgcagttcttttatccatttgttcactgctatgtgatccaaacccagatgaccccctagtgccagagattgcacggatctataaaacagacagagataagtaagtatgttaaaaagttattataaaagtggttttacttaatgagttaggcttatactttgcttgtgacagtgccaagaagacttgatatttagtaagataatagttaaaatatggagaaagctattgaaatgtggttatttaaaaaaacttaactaggctttagcttatgtgacagtgaatgctcccctctaaaatgttttattgttgttttttttttcctagcgtgttaaacagtatcactttattctcaacttttggggaagaaagcaaatttttctttaccccaagcatgtttttccaaaaatgttagtactattgtaaaaatttggtctaaatttctcaaatatttgaattatatttatgttcaacttaaccattataactttcatatgttataattaatgctaagtgtacttgttcaattaggtacaataggttagcaagagagtggacagagaaatacgctatgttgtagggtaagaggatctgcactctatggtgcgcttattatggtactgccagcacttgagtgctgcatgcgttaaggcactgtattaactaacaaaaggtaacaaatatggcagtcttctgaaaactgtacatttaactgcttggtctctgtttaacgtgaaagtaaatatctggtagccgttaytgcttgaaagtaytgcatggcaaagcagttacaatagcactagtaagaaatgggaatttatgtagtatcttttttttttttcaaactatcatggtgtttaaattttagcttgagactttgtaccaatcctatacagaatgtggtggtttagttcaaattttgccrggagatagtaatgtaagggaaaaacacttttaagcctaagcatctaaactaaatgttcattactgacaagcatgcattagcgtcagctgtactttgtggctccctgtatgctaaataaagcctttgttttaaagtgctggctttttgagagagtatccttaggagatgacaatgaattggtagaaagaactttttaaaaagtttagyaaagttgttggaccatatttggttcttggtttgaaataaagctagttaatatttaaacaatataaaaattctcctgtgcatatatatatatatatattcmtttcttaaggttatcactgttttttgttgttgtaagtagtctatggcatgagtataatccagggggaagctgatagtatttatcaatgttagtagtcttcctgagtaataaccttgcttgtgtgtgaattacctgttgatctttttaaacgaagatgcccttgttgtactcaacaggtctcagtggtgcttattagcctcagttaccacacttattaaaagtaacacgtgattctgatgaacacaaccactcacacacacaccccttttgaaaattactgccctttgtcattctgcccagtgtcatcttccccttctgcctctacctaagtcccaaagccattttttcttgtaatatccaggaccaagtaatttcccaaactctaggattcagataaaattgttctagtaaaagcctagttctggccttggtggaaatttctgtggatagatagaatgtgtatactattttaacatttgtccataatgaactgtaaaaatttcttcacgttaaaattagagcatgagctcggtggtagagaaagaaagggtcttttgatttttgttagcctcccaattttcagtgctgctttcttagttgtttttaaaatactactttcagagcatcaggctctcatttcccacattgctttgagtaccagtgctatttctcccttgttggcttttattctaatcatagtcattagagatgacttcatgatgagtctggagatgataaaatggaaatctttcccttccatttaaagtattaggaattctttattttaacttttaaaaataacatctttatttacaggtacaacagaatatctcgggaatggactcagaagtatgccatgtgatgctaccttaaagtcagaataacctgcattatagctggaataaactttaaattactgttccttttttgattttcttatccggctgctcccctatcagacctcatcttttttaattttattttttgtttacctccctccattcattcacatgctcatctgagaagacttaagttcttccagctttggacaataactgcttttagaaactgtaaagtagttacaagagaacagttgcccaagactcagaattttwaaaaaaaaaaatggagcatgtgtattatgtggccaatgtcttcactctaacttggttatgagactaaaaccattcctcactgctctaacatgctgaagaaatcatctgagggggagggagatggatgctcagttgtcacatcaaaggatacagcattattctagcagcatccattcttgtttaagccttccactgttagagatttgaggttacatgatatgctttatgctcataactgatgtggctggagaattggtattgaatttatagcatcagcagaacagaaaatgtgatgtattttatgcatgtcaataaaggaatgacctgttcttgttctacagagaatggaaattggaagtcaaacaccctttgtattccaaaatagggtctcaaacattttgtaattttcatttaaattgttaggaggcttggagctattagttaatctatcttccaatacactgtttaatatagcactgaataaatgatgcaagttgtcaatggatgagtgatcaactaatagctctgctagtaattgatttatttttcttcaataaagttgcataaaccaatgagttagctgcctggattaatcagtatgggaaacaatcttttgtaaatgcaaagctgttttttgtatatactgttgggatttgcttcattgtttgacatcaaatgatgatgtaaagttcgaaagagtgaayattttgccatgttcagttaaagtgcacagtctgttacaggttgacacattgcttgacctgatttatgcagaattaataagctatttggatagtgtagctttaatgtgctgcacatgatactggcagccctagagttcatagatggacttttgggacccagcagttttgaaatgtgtttatggagtttaagaaatttattttccaggtgcagcccctgtctaactgaaatttctcttcmccttgtacacttgacagctgaaaaaaaacaacatgggagtaataatgggtcaaaatttgcaaaataaagtactgttttggtgtgggagttgtcatgaggctgtgttgaagtgacttatctatgtgggatattgagtatccattgaaatggatttgttcagccatttacattaatgagcatttaaatgcaacagatatcatttcaggtgacttaacatgaatgaataaaagtcaatgctattggattgttttttgtttgacaagtgctatctgtgccactgatttaacttctgtagtaacaagggcattaccattcttcacctttcctaattctgatcccatagttttacatttttcctgtttattttgattttgttcactgctttatttcttaaagttctagcacatctgtgactcctccacttccacatttttgcactgcttacacttacgtgcaatcttattccttgtctgcacacacatgtggaaagctagaaataaatgttaaaacttactttttataaacattttaatatgtagtttggacatgatttattgacttaaggttcttctctaaactggaagtgaaatgcatgccttctgaagatgttctggctttgttaattctgtaatcatttcattggggaaaaaaccagctacgcagtttttccaatgagtgaattttttcattttgtgttttgcttaaaacggctccttcagggtagatgtcatactgcataacttttttggattcaaattatgaatgagaaattagttaacattctgctccacaaggtaagaaaaactgctctttggctctattttcaaaattacttctgagatgcatatagtctcaaaataacagctttagtaggcatatcacttcttgaaagccaaacatgagtgtaagacacttttatgaaacacggtggatccctaactggctttcaaattgacctttatagccttagacaacccttaggtatttacggagatgacttctttgattgtcataacaattagtggatgtgtccagttctctgtatctttgacttgatgctttatacatcatttcatttgttgcttctaagggaataagccatagaggcttctccaggtttaaaagaacagtaaagtacctggaaaaccaacatttttgaatgtatggacactggacatgagatatgtacaatgaaatcttaaaagaatctaagaatttgccctctttgccccactccacccagtaatttgacattactagtgccatgtataggacccaactgagtattagaatcagttttgactatgtctttgtatttcctaaatcttttaatgcataaaccgaattagggtccagttggcctgttaatggtaaatttacattttaaatgactcagtttgtttttcctgggcgagtttgcaatgtgataatcagattttttaaaactgattaatttgctttcttgtgtgggtgtactcacattttaaagtatgaaccacagttaactagtggtctcaggggtagtgaaacactcacttttttttttgtttgtttttttttgtttgtttgttgaaatggcttagttgaagtatacttaaggtactgatcatgctgtgttagtaatttgggcggggaggggggtaactcagccatgttttgtgttggcataacaaaactgttaatgattgttgattacacttttaagtgaatttgtcttttatgaggaacccagtgcaagtcactaaatattgtctaatagtgacatctgcataagacttgtaatagctgaagttaattgagcttaaaggaattgttaccattaaagtctgtgtttaaagacactttggtcttactcggtaattccagctaacatgaaatccacacttgagcttaatgtgtgtgagctcgatttttaattttatacagtttatgaataaggtggttctcaaaatgtttcttgagataacaatctcagcatcatttaggaaattctttataatataagttgtcaggccccatcccagtcctgagtcaaactggcatggagcccagtcacctatattaaaacaccctccaagtgattctgatgaatagtgaagattgagaaccgttttcagaagtctgttcgtagcattcccttgtaacagactacaaccagtaatcctttgactctacagctatttttttatagctgtttttggctttagagaatgtgtttaagtattacgtttctgatacctgacaatttcctagtactttgaattgtaatacagtacattgatttccacatttacacttggaatattaaaatacattaacgtcctacagttggctaatttgaataaccatactggcatggaattcaaccaatcgtcaagtatttaaaagtaatcaggtgcaaagatctacctaagtattgtgttggctagctgaacaaatttgaacccagatcccattctgtggcctgacactaggcaatttttccaagtggaaatgatgctatgttaagggtgtttgcagtgtttgacagatattaaaggtaccctaaggtgactattaagatttctcgtgctgtcccattgtaatggaaaaatcaacggttaaaggtatttggaaatggcttcaaaacatgacagtgccaccccctgccaaaaaaacttgaggaaccattttaacaaaaagacttaaatatattgaagttggccgaatgtcttaagtccctagaaattattactgtgttgcattatttgttgctaccttataactacttgctcatttctggcctcaggtttgaaaaattttatatgattcaggtatacaagatgtttctgacaattgttcttttacttgggatgcttccattaaagtcccattatcagtatctagctcttcccaaactgtatgctatttatgaatgagattttttaagagccctcttttctgtattgtaaaaaatattatgaaatttacatttttacgtactactgtctgatcctctatagaacttgatttctcatttaccgtatcaaatttgtagtcaaggctaaacaatgaactttcatgtcatactatcttaggagcccagttaaccaccgtcatttactaaccttcaagctatttctcctgagctcccatatagcttctattcattatccacatgacaagctaaagggcgtcttttaaaatgtctaaaactggacatatgtctataaagacatacacatatacatatactattaccccatgctcagtaaatgtcaacattaaattgcaatggcctaaaacctaggcaccatctttgacttttcacactccaccttcaatcagacttaacagcagcctttagaatctgcccatttatcatgttgactgttagcactatgatctaaagctatatcatttcttatttggattattggagtagcctcctgagtgatctccccacgttgcagcaatctgtctgtcccacacacaacccctttaaaccttatcagatggcatggctttcctccaaacctaatggtttcccatctcattcggagtaaaaacacaaggtattaaaagtaatctacaaggctgtagataactttcttccctacctttgcctcagcttaatccccaattccttgcttgtctcaccaccattccaactctctcagctcagtcacatgggactgctgagacttgcaaagatgtgtgaagatgtttactcttgttcttacctttgcctaggatgatcttaccccacataccatacagcttccttttccctaactaggtctctattcaaataccttatcagagtggtttttcttgactattctataaatacaccaacacagcatcacctctatagagtacatcatggcatattcagtattatctatcttataggtaataattgtctcaccctcagcgccaccccagttctatgaggacagattttttttctcttatttatcaatgacgagatgactacttgcaacattttaggtgatcaaatatttaacacaaatgactgagccaaatggtagcctgtcaaaggtacatgtacttactcgtcatttgtatatcttcttagggaaaatgtttaatcttttgcttgcttcatttctaactccaaaagaacaaagaaaactaatatactattaaaaatttgttaatcagaccttctttattgtaagtaaaataatgcagttcagattctgtcagcctggatgattaccctgataaatcctttgaaaaagcaaccacttgctgggggaaaactttttttttttttttcgatgtgtcaatgttctatcaagaaaggaaggagtactctcaccaaaaccaaactgaaaccaagaacccagaagaaaacagaacatacccagaaccagcttgcattgcattttgaaaacacttgaagtacctaccccaagtgaacttttttcattttttctacaagacagggtcttgctgtatcacccaggctggagtgcagtgatacacccctcgacctcctggactcaagcaatcctcccacctcagcctcctgagtagttggggctactcgccatgttgcccagactgttcttgaactcctgggctcaagaccattcgccacggcctcccaaagtgctggggttacaggcgtgaaccatcatgcccagctgacctttaattttcatgactctggcaaagcccaggatgcacccaaaagtggtgtcaaatacgagaaacccattcctagtacaactaggactctacctatcttgaaacttggtgctctgtgacaggagaatattgtgagaatttgtaataacagtttgggctttgtgaagatttgcaggcttaggtggtcccaggaaattcaagcagaggatttaatttttagagtgattccaaattagtaaaacaaccagctactggcagaagcaaacactgtaggaattgcataatagctcacattttaaaaccagcaagaaaaagtacaaggtaatgtagcaccatgagttgccaaccaatttgcaagaatcaaaacattaaatatcaatatttaaaaaatattagtcaaattgtaaaggaagactaaataagtgacatcttgtatatggaaaatcctaaatcataaaaaccacttagcgctcatagaattaggcaaatttgcaggatacaagattggcacacagaaatcagttgtatttctttaaataattattctaagcaatccataaatgatgttaagaaagttccatatacaatagcatcaaaaagaataggggcccagtgcagtggctcacacctataatcccagcactttcggaggtcgaggcgtgcagatcacgaggtcagcagtttgagaccagcctggccaacttggtgaaaccccatctccactaaaaatacaaaaaaaataaaatagctgggtgtggtgacgtgcacctgtagtcccagctactcgggaggctgagccaggagaattgcttaaacctgggaggcagaggttgcagtcagccgacatcatgccactgcactccagcctgggtgacagagtgagactctatttcaaaaaaagaaaaaattaataagggaaatgcaaaaacatgtacactgaaaactatcaaacttctgaaagagaagtcctgaataaatgaaaagacatcctgtgttcatggatttgaagatttaatatgctgaaatgacagtgattctcaaagcaatctacacattcaatgcaacccctatcaaaatcccaatgactgttttgcagaaatgataaagtgtaaaaattcatacggaattgcaaaggactgcaaggagctaaacaatctttaaaaagaatgaaagtaaggaactcatacttccctatttcaaaagttaatacaaagctacagtaatcaaaatagcatacacaggaacacatagactcatggaatagaattgagaggccagaaattgtcatacatttacggtcagttgatgtttgacaaagatgacaagaccattcaatgggaaacaatagtctctttaacaatatggtgtagagacaaccagatatctacatgcaaaagaatgaatttggacccctacctcacatcttatgcaaaaattaaaatggatcaaagtcacaaatgtaagagctactaaaaccataaaactcttagaagaaaatgagagtgtatctttgtgttcttagatttggcaatacttagagatgacaccaaaagcacaaacaaccaaaggaaaaagataaattggacttcattaagattataaacgtgtgtcaaaagacattataaaaatgaaaggataacctacagaatggacacaaattttcaaatcatctatgattaggctctagtattcagaataaagaatttttaaaactcaacaagaagatgaccctatttaaaaacaggcaaaagatttaaacattttcccaaataagataaacagatggcyagtaagtaaatgaaaagatgttcaacatactagttattagagaaatgcaagtccaaaccacaatgatgtatcactttttaccccatagaatagctgtaaaattttaaaatagaaaatgtgctggtgaggattttgtgaaactggaaacctggtacaatgctggtgggaatgtaagatggtgcagcttctgtggaaagcagtttggcagttccccaaaaagttgaacatagaattattgtatgactcagcaatttcattcctggttacgtacccaaaacaactgaaaacaggtattcaaacaaatacttgtaaatgaatgttcatagcagcactcactattcacaatagccaaaagatggaaacaatgaaacaaattgtggtatttccgtacgatggtatattattcagccacatgaaagattgtagtattgatgcatgctataatgtggatgggccttaaaaacattttgctaaaagaaaggagcaaaacataaaaggtcacatattgtataatttcatttatatgaatatccagaatagttctatagagacagaaagcagattcagctactaggaagatagggaaatggggaatgactgcttgatgggtatgtagtctcttgtgggtggtgaaaatgtcttggaactagaagttattatggctatacaacattgtgaacacatgaaattacactgaattgtgcattttacaatagttaatatgtgaatttcaccttaaaatatcagtgacaaaagatagtaataaccaacatttatgtaatacttttaagtgtcaagcacttttctaaattcttcagacacgcacgygcgcgcgcacacacacacacacacacacagatattttatttattttttgagacggagtttcgctgctgttgcccaggctggagtgcaatggtatgatctcggctcactgcaacctctgcctcccaggttcaagcgattctcctgcctcagcctcccaagtagctgggattacaggtgcttgccaccacgcctggctaattttttgtatttttagtagaaatggggtttcaccatgttagccaggctggtctcaaactcctgacctcaggtgacccgcccccctcggcctcccaaagtgctgggattacaggcaggagccactgcacccggccaattctttacataatattaactcttaattctgataacaaacttgtgtacttatttaaatgcttatattatttctattttatagatgaagcaactgaggaaaagaggttaytatttgcccaaagttactcatctaatggtagaggttgggatttaaatctagataatcagattccagaatcttacctctctatcattatgggagaaataaaataagtttaaaatatgaataaag

SEQ ID NO: 94741 - DNA, 140914 bp, Homo sapiens
tatattgagtcagtaggagaagtagaaatactaagtgcagattcacagttcagtttagcccagaactatggatgctttccttatggttattacctggaaggctttacaatcactgatgtaccctccctgctgtctcctctcacttacacatatgcagtcttgattattttgataatttttctacatttatacacacttcacacataatttttgtttttttaaacctcagtttatagccttaagttatactcaggaatgtacattgtactcttaagcagaaagaccttaatattagttacagctgaagagtgagcttaatttctaagtacattttggtttttccctttttgtatgccttttataggtgttcacctttagcagccagtctcttgactttgcctaatactataaagaatagcaaacattgtattgacataattggttgttatggaagtcatttttaatagaatgaccataccttatttattaaaaaataataaactttatttttcagagcagtgttaggttcacagtaaaactgataggaaggtatagagatcccccgtatattcccttcccctatgcatgcatagcctatccaattatcagtatcccctattagagtgatatgtttgtcacaatagatgaacctatatgattatcactcaagaccctagttaatattagggttcacttttggtgtcatacatttcatggatttggacaagtgtataatgacagtacatccaccactgtagtatcatataccataatttctactacacggaaaatcctctacagtcctgttttacattttcagaagtgtcatatacctggaatcatacagtatgaagtcttctcaggttttcttctttcacttaatagtatgcatttaaattctccatgtcttttcatgcatcgatagctcatttatttttagtactaaataatctcttgtctgaaggtaccacagtttatttattcatttacctactgaaagacatcttgattgctttccagttttgctaagtataaataaagctgctgtaccatccatgtgcaaatttttgtatgcacgtaagtcttcaactcctttggataaataccaaggaacatgtttggtggattgtatggtaacagcatgtttagttttgtgagaaattgccaaactgtctttcatggtggttgtatctttttgcatttccactaacaatgaaatgagggttcttgttgctccttatcctcaccatcatttggtggtgtcagtgttctagattttggccattttagtaagtgtgtagtagtttctcatttttgttttaatttggatttctctactgacatacggtgtggagcatctttttatatatttatttggcatctgtgtaacttctttgatgaggtttctgtttaggtttttggctcacttttaagctgtgttttcttattgttgagttttaagagttcttcatatattttggataacattcctttatatcagacatgtgatttgcagatattctctcccagtcatctttagcttgtctttttattctcttaacagtgtcttccccagtatagattttttgtttttaatttaatgaagtccagcttgtcacttctttcttttatggactgtagctttgatattgtatctaaaaagtctgtttgttcaaaatagtaatgatttggatctgttagatcaattaagaatgaaacaaagttattttaccattatgtattctttccctaatgctccctctttatgtagatctgagtttctgacctgtctcctttaacatcttttaaagaactttaaaaaacatttcttgtgaggcaggtccactagcctaaaattttcttgatttttatttgcctgagaagatatttatttctccttcagttttaaaataaacagggtctcgctatgttgcccaggttggtcttcaactcctgggctcaagcaatcctccagagtatctgggattacaggtatgtagcaccatgcctggctttcttcttcacttttaaagggtgatttcaaagggcacagaattttaggttgttgggttttttcctcaacactaaatattttactctactctttttgtattttcaatttttgtggatacatactaggtgtatatattaatggggtacttgtgatgttttgatacaggcatacaatgtgtaataatcacatcatgaagaatggggtatccatcccctcaagcatttatcccttgtgttacaaataatcaaattatattattttagttattttaaaatgcacaattaaattattattaactgtggtctccttgtgccatcaaacagtaggtcttattcgttttttctactatatatatttttttgtacccatcactccaccctttttgcttgtactgtttctgaggaaaaattggatgtaattatctttgctcctctgtaagtaaggtgtttttttcaccactttggcatctttcaggatttgtctttatcttcgattttctgtaatttgaagatggtatccttaagtgtagtttctttggcatttatctcttttggtgctctgtgagcttcctggatctatggtttcgtatctgacattaatctgaggacatttttagtcactattgctttacatttttttcctgttcttttctctttcttcttctacaatttttatcacacatacgttataccttttgtagttgtgccacatttcctcctgggttttttgttttgttttgttttgtttttgtctttgcttttcagttttgaagttttctgttgagatattttcaagctcagaggttctttcctgagttttgtccattcaacggcattcttgatttctgttacagtggtttttttggtctctagcatttcttttggttatttcttagatctctcttcttgtacttcccatctgttattgctgtcttcttatcccttagagcccttagcatattaatcacagttgttttaaattcctgatcttatgattccaacatccctgccatagctgtgtttggttctgatgcttgttctgtcctcttcaaactctgtgtttttatgttgggagaagagaagtgttctgttgtcctatgattaggtatcacttttttagtaagcctgtgcctcttgactgtgaatttcacaagtgcttctcagtttttttatccttctccagttggacagatggctagagtgagctggagttgggtattttctttctcccacctggaaggctagtgccaactggagttggatattttccttcctgtaagtcagttaggctctgatagaactccaacaggttaagctctgtttaaatagtttcctctatgggcagaccttggtaagaagcacagagtgatccggcatattttaaaaatggcgtgtcctttcctttgctggaagcatgagtggatttttctccagtattcactgtgagaaccagatcaagtttctggaggttaaactcaacagaagtgaggagcctccttatggctgggtgcccctgcatttttcagtttttacagttgtccacactgactccagcaattaattgctgtttaagttttcttacactggcactagctcccatggaggtttctacttctgggtttctactccaataagttacaattctctgtatttacatctgtctctccaatctggggggcaatggtttaccctatgacttgacttctcttatggatccgagaagaatcgttgatttttcagtttgttgagatttgtatttgttgttaggatgaaatggtgacttccaagcttcttacatgccagaccagaaaccagaaatcccagcttaatgtcacagactgacatggactgcactgcagcattaaagagaataagaagttgtcgttgggttttaagtctgtgaaacaaagtaaggtttttaatttatccaaagttacacaccctgcaagtgacacaggtgggaatagaatctaaatatttggactcccaattaaattatctttctttttattttattttattattattatactttaagttttagggtacatgtgcacaatgtgcaggttagttacatatgtatacatgtgccatgctggtgtgctgcacccattaactcgtcatctagcattaggtatatctcctaatgctatctctccccctccccccaccccacaacagtccccagagtgtgatgttccccttcctgtgtccatgtgttctcattgttcaattcccacctatgaatgagaacatgcagtgtttgtttttttgtcctcgcgatagtttactgagaatgatgatttccaatttcatccatgtccctacaaaggacatgaactcatcatttttatggctgcatagtattccatggtgtatatgtgccacattttcttaatccagtctatcattgttggacatttgggttggttccaagtctttgctattgtgaatagtgccacaataaacatacgtgtgcatgtgtctttatagcagcatgatttatagtcctttgggtatatacccagtaatggaatggctgggtcaaatggtatttctagttctagatccctgaggaatcgccacacagacttccacaatggttgaactagtttacagtcccaccaacagtgtaaaagtgttcctatttctccacatcctctccagcacctgttgtttcctgactttttaatgattgccattctaagtggtgtgagatggtatctcattgtggttttgatttgcatttgtctgatggccagtgatgatgagcattttttcatgtgtcttttggctgcatcaatgtcttcttttgagaagtgtctgttcatatcctttgcccactttttgatggggttgtttgtttttttcttgtaaatttgtttgagttcattgtagattctggatattagccctttgtcagatgagtaggttgcgaaaattttctcccattctgtaggtttcctgttcactccgatggtagtttcttttgctgtgcagaagctctttggtttaattaaatcccatttgtcaattttggcttttgttgccattgcttttggtgttttagacatgaaggccttgcccatgcctatgtcctgaatggtattgcctaggttttcttctagggtttttatggttttaggtctaacatttaagtcttgaatccatcttgaattgatttttgtataaggtgtaaggaagggatccagtttcagctttctacatatggctagccagttttcccagcaccatttattaaatagggaatcctttccctatgaatgaaatgaagcgagaaggaaagtttagagaaaaaagaataaaaagaaacgcagaaaacctccaagaaatatgggactatgtgaaaagaccaaatctacgtctgattagtgtacctgaaagtgacagggagaatggaaccaagttggaaaacactctgcaggatattgtccaggagaacttccccaatctagcaaggcaggccaacattcagattcaggaaatacagagaacgccacaaagatactccttgagaagagcaactccgagacacataattgtcagatacaccaaagttgcaatgaaggaaaaaatgttaagggcagccagagagaaaggtcgggttacccacaaagggaagcccatcagactaacagcggatctctcggcagaaactctacaagccagaagagagtgggggccaatattcaacattcttaaagaaaagaattttcaacccagaatttcatatccaaccaaactaagcttcatgagtgaaggagaaataaaatactttacagacaagcaaatgctgagagattttgtcaccaccaggcctgccctaaaagagctcctgaaggaagcactaaacatggaaaggcacaactggtaccagccacagcaaaatcatgccaaaatgtaaagaccatcgagactaggaagaaactgcatcaactaaggagcacaataaccagctaacatcataatgacaggatcaaattcacacataacaatattaactttaaatgtaaatggactaaatgctccaattaaaagacacaggctggcaaattggataaagagtcaagacccatcagtgtgctgtattcaggaaacccatctcacgtgcagagacacacataggctcaaaataaaaggatggaggaagatctcccaagcaaatggaaaacaaaaaaaggcaggggttgcatcctagtctctgataaaacagactttaaaccaacaaagatcaaaagagacaaagaaggccattacatcatggtaaagggatcaattcaacaagaagagctatctatcctaaatatatatgcacccaatacaggagcacccggattcataaagcaagtcctaagtgacctacaaggagacttagactcccacacaataataatggaagactttaaattatctttctatttcactaaattccacttttctgaaaggtgatatgaatggttcatatagggaaatattacagtgaggcttgttattgtttgtaataccatattcatttagatgttttctccatcctcctttttttttctttttttaccttctttataattttccttttagttctggttcctgatggtactgaatattaagaagattatctgccatttttgaggaggaaatatctaatagtataatctttttcctctatgttacaggcagaagtataactgcagcagcaatctgcctttcccctttatttgaatttacagaatatgttaaaatcaataataagatgcaaataaaaaatcactcattgacacttaatatgctgaatacaaattcagcaccataattaaattgcaaagtttaacattatactccattttgatattaatatttgatcttgcaatgaatgtctgcttgtcaaccttttatttactgtggaggtcgtggtatacggtattaaagaagayattcaactagagctcaatttttctgatgagctcccaggttcccatcgcaattttagacaacacatgctgttttactggaagagtatctaaaggatatagtctgatcactctctacctcccatggtaaaccttctgtttgttttttgaatttggtagttaaaggtgcatgataaaacttgccatctctgttagatgctgctaaatgagactagtaaaatgactgccaagctccagccgctctttattttattgctttaaacatagatttcctagatggtcatgatctggtttgtccaaatccaccttaactctkaaagcaataataaatataaattttaaattctaaatgaaagagaggaaggggtctcttcataagtgaaaacattccttaaacaaatgaaagcaaacagaatttttttcatggacctgtattttcatttttctgaccattatacgattttcctagcaatataaaagaattctgcagtccctccctatttagttgttggaagagaaaaatacattaaatcttaattagtatactacctatagtagcatctggtgttactgaatttttaccatcttctgaaagcagtaatcattctttacctggaggaaaagattccagtaatctgttttattaggaaacttttctagccttcctttcagttacgggatttattgaaaactacctcatatacatatgcacatatacccatatatgcatatgtatatatacatgtgtgaatacrtrtatggctatagatctgtgtgtatgtacacatatagacacgtgtgtatgtttttgtgtgtatatgtttttatgtgtatctgtatgttcctttctaaatagcattctatttcataccttggaaaaatataaaattaaaaaatgaggtcaagatggcgccttttaagaaataagttgttataacagttcctttcagcttcacatcataagtgttaagaacacttgagtatttttaatgtaaacatattttagcatctatttgatttttactttattttcttgatactttcagatatatatttgctttacattattctcagggtttcttatttcccgaaaacactttgaatcatttccactgattctttttcctcccttgttagtttacatgtatcatttgtatgatagtgtctggaagtaaaagggcacttgagaaacaaagttgaataaaatttcatcatacttaattctgaaaattgttttctgaaattattagctcactgctgaaatatcttcagatcaaacgttcagaacatcagctcccarggagcttcatatttagtttatggtggggtatgattgtgtatttcacaaaattcatgaaggaaatttgtacaaatttattatggattttaggccagcggaactgtttaaacttcctactctatttgttccrttgagtagccttagagttgaaacagcagtttccatttttctcatgggtagatcaacccatatgcacatttatcattgatttctagcactggaaaagcatagacattggagacggtggtcgggcacggtggctcatgcttgtaatcccagcactttgggaggccaaggtgggcagatcacctgaggtcaggagttcaagaccagcctggctaacatggtgaaacccagtttccactaaaaatacaaaaaattaactgggtgtggtggtgcacgcctgtaatcccagctacttgggaggctgaggcaggagaattgcttgaatccgggaggcagagattgcagagagccaagatagtgccattgtactccagcttgggcaacaagagtgaaactccatctcaaaaaaagaaaaaaagaaaagaaaaaaattggagacagctgttcacgtatttaaaggagggagaatattcttggagaatataattggtgaaataaaaatacaattcatatgtactctatggaagataaactgcaataagcaaacctctttggcagattttaaaatcagaaatatattccagccagtgtgggatattcaatctaatttcctttgagaacctgattctgttggattggtaggcattaggaagcaacagctcttctctctccatctcctcaaaaaattgtaaacggaaatgttgtatgaaaaaaacttcaaagatacattctaatttttttcttttgctattttaataggcttttttattttttaagaactgaggttagtgaacatgtgagagaatctgaagtacttttcatatgtttttgtccttgaactgagttatttgaatctggcaaatttctctattaataattacaattattatatcactatgtcagtatgtgtgttatattcaatctagaatatttgctctttttactcccatggttttgaaataagcatataggcatttaatttttaggagttataaatgtccaatagctatgttttatatcaatatgaactgcattgtgttttattactaatagtttagataaatctgtatatccaaattgtgaaccactgaaatgaataattccctttcttagagaaggacatgaatatagtgagagatctgttactttctggattcttctttttggtccttcaagaagttgtacaaagataatatcgatgttctcttttattcatcagtttctctcaactggtttcagaacattgcagtatcagagaggggaaaaaaataagtatttcagattttttttttcttgagacaaagtctcactctgtcacccaagctggagtgcagtggcatgatctgggctcactgcagcctccgcctcctgggttcaagcgattcttatgcctcagcctcccaagtagctgggaccccaggcatgcatcaccacacccagctaatttctgtgtttttagtagagatgaggtttcaccacgttggccaggctagtctctaactcccagtgatccacctgcctcagccccacaaagtgctgggattacaggtgtgagccaccatgccctgccaaaaatcagtattttctctgtatcacactcccaacctttaacattgcctcccattctttcttttggctgttatttaatgagagactactatgggtaggacattgtgttaatctctgggaataagagaccttcatattcctgctattatggagttgcggtttagtagagatggtaggtaagaacatgggctcctgaattgcaatgcctgggttctgttcttggttgtggttgtactgcttactagaaaagttgaagaaatcacttcattatttgtttgagtttccttcttgctgaaataaatataactctatcttaaataagataatgtatgggttaaacaatgcatgtaaaacatttggcactgatgttagaaaagggaacatacaggttagtatctctaaccatgttgtaaaagtgatttgaccagctgtattcagttataaacattttattgcacttttggagccttttccaagtcctgtgtaacctttggaataccctctgttcacctccccccaccaaaaaggctcctgtaagtccatcacttcttggaagcttcctcatttaacatcccctgtctagccattcctatacatgaagcagacacgactccttggtatgcactgtgcagtaatgaacagttattccctccttgtacatgttgctaatgtggattatttatttgaattctgactctttgggatccctttgtttataattttaagttcttagaaggatagggaccacagtaatctaccttggtctatgtgacacttgcacctttagtattcaataattgaaacacataaaagtgatttcagtggaggtgagcacaagcttccttttttcactgtgtgaatagacatagaggtgaccacacgttttttcttgtcttgctttttcactaagctttctctgtgattgagaacaaacagggaagtctgaacggttccctgttattttatcttttggatgtagaggcatacatacaaatttctgttgaatgctttgtaagggttacctcatttattcttaaacttttacacagttactgctgtgtatttatgggatgcaggtactgtttatccattgtaattatagttcgtttgttagaccaaacattgggaaaatcttttcttgtgaatggtgattttctaaatttttacttttgttttttatttgccagattctgtctctcttttctttgttcttggtgtactaatctgattcctcttccatggctattccactttttccaagtcttaccctaaagccttttaaagcgatacgtttagatcaactttttttttctttttgtttgtagtttgcacattatatgctgtactttgactaatttaataattttttcttataattccatgtggaaattttaattttagttttgttttcccctgacctttataaaaacaagagattaagtgtaatattttctacttactgcttcaggctttgtaaatttggcacttaatggtttcattgttttagaacagaaaagattatcttaactgaccactaacaacatagttgccagtttggcgcaccaaatctgtagttaatactgatttcaaaatagtgtttcttggcaaatcacaaccaaaagcttagaatattctgtatgacttttagttctaaagtaccttgcaagtattactgttaatctcattttgtagcagaaataatagaccaggagcattaaaaggacgtatttgtttattcatatggctagtatgtgtggtactactgaactgaacccatgcttctgcctagttaaatggtctcaaaacactaagaaaaaaagccaacgtataaaattcaatagcggttagtagcaaggaatgagtgttatctgaagtcatagcgtgcttgttaaagtattttcaattaactttctccasgcgtctcttaaatatatgtttttgtatatatttacagtttttttggacagatctatttggcagtcttctttaagatattgtcagctactcattcacaagaatggtgacatcttaattttaaaaaacattttatatagttactctctttattctggtgcaataataatactacacactgggtaaattgtaaagaatagagatttatttgacccatagttctgaaggctgagaaatctgagagcaggatgctggcatctggtaagggccttcttgctgcatcattatgtggcagaaggcatcacatgaagaggagttgtgcttagaagacagagaaaaaatcggggccaaacttattctttttataactacctacttccttgataactaactcactcctgcaataacagtcttaatccattcacaagggtggtatccacctgacctaatcacctcctaaaggtctgacctctcaatacatttgcaatggcaattaaatttcaatgtgagtttttgaggagacaaaccatagcagttatgtattttgttaaacttaagcattttattctgttaaattatgtatgtatttatatatatatatacatatatatacacgcaagcacacatatacaggcatacttatgtgtttatatgtgtgtttatagatctttttcytaggaagataattatattttaaaagtcattgatggtagggatgatagcagaggaagttgtgaaatacaatctaagtaatattatagagcatacgttcagtattttgaaaactgctcaataagggtatatttgttgacaagtaatagatcacattacaaacttactattagacattgtttatctagtcagcatttatgaatagtctgtggtgatctgtgtgtttatattccacatacagtctatcaacaaatcctgtcatttctactttcagaatatatgctaaatgcaaccacttcttactacctttatcactgccaccttatttcaaaaccaggttttacttatttactatacgatcttgtccaagtgtttatagtgttaggatttttcttttcacaatcattcgtcataggtaaagaacttatttttctctcacatggtacattaaaaatagaagcaagcaagtaattgtctttaaaaattttttgctttgcctattattattcctctagaaaagataataataatacatagttacaagaacatttacattgaagaaggtgacttaatatttgaaattattgtgtttaatattatttcggtttttattaatgcttggtatattttgttaataatttaaatattgctaaattttggaaaaaattacaatggaatcattatattagagttcttcagagaaattcaaccaataagggatggttatatctctatataattatgtttatgtgtgtgtttatgtatatgtatgtatatttgtatgtatatgcagtcatgcatcacttaatgacagggatacattctaagaaatgtgttgttaggcaatctgatccctgtgcaaacatcatagagtatacttacacaaacctagatggtatagcctactacacagctatgctatatcatatagcctgttactctaagactgtaaacctatacagcatgttactgtgctgaatactataggcaattgtaaaacagtggtaagtatttgtatatttaaacatagaaaaggtaatgggttgcactaccacattatgatggctacagcatcactaggccataggaaattttggttctattttaatcttatggggccaccattgtatgtgcagttcatcattgaccaaaacatcatyattcagtgcatgactatatatatatttgtcacttattagcacattaatatggatttgtataaataaatttctagtaacgctcaaataacatacatggatgcattttcaattgcttctcaaatatatggagtattttaaataagtagattccaaaragcaaaacaagtttaataaatgtctatttgcagctacattacacactcatacacacacatgcacacgcacactctctcacagaggcagtcaactgttcatgaaatattaagattatattttacaatgatatttaaaacttgaaacatacatacaraacaatgaagtgtgatagctaasagcacagacttggatcagatagaatgacatttgacttccagctctgactttctgagccttggttttcttatgtgtcaagtaatgataatacctgyttctttgtgttgattaaatgagaatatatgtaaactacttgccatggtgccctgtacacatcatacacagtaaactattaccatctgtattttaattcttaattycttcccctgaacacaacttgataaatattctttaggtttctgttcctcctttcaaaagttgatttaattcataatgtaacttagcgtaatataaataataccatagaaayaaccatctgtagcagtggtttgatgggaaaatacagtcacagctacaatttgataagccaggaactgtatttttccctcctgaagttataaaagtagaagtagtaatcctctctccaggcatccttttatcttttgaagaatagaagtaaatatatctacatatccaagccagtggtagtccttctgtattggggctttttgcagaggattggggctttttgcagagcaggcctgcaaggggaatgaatatcagaaatgaggttccagtgacagaaggtactgaaatgctgtgtgtgtgtgtgtgtgtgtgtgtgtgtgtgtgtgtgtgtgtgtgtgtgtgtgtatagaatgtgaggggggttggataggttcatgtgggtgtaaagtgaagagataggccagggtgatagatgtatagaacttctgattttaaaataagcatgtaagctgtatactatttaatgaaattactwttgacattttattgaagttaaataatgaattcatcacattttatgagaccaactttaagaaaactagctggatttttaatggtttgcttcaacttaatagtggtatataacttagtacaaacatcgaaggctatcagaaaatgtatgttagaattttaatgattatagaaactgtggaatattctgtatatatctgacacttaaaattacttgttctggggtatccataataaaatttatgtcatgtggttttttgggtcagtattttcaggtataagcctggtgtgtaacagtgaatgctcttagaagattgggtctgtatcttttgtctctgtaaattacacaatgataggaagttaatatgttagggatttaataagtatgttaatgattatctataaagataatatgctttattttttgattggtttgtcatattttattggcctgctttctgctagaataccattatgatataacttgccaaggagccctagggtatgaaaaaacagtcttccctttttaattatgagaagttcagagaccttctgaatatattaatgattactactaaagcaattcttaataatttttccactaatatgagttgtaaagatgccagactcaaacagatgtgaatactaggctcccttgctagttgagttcttgttacttcacatcagtcttacagctttctgttagtgtgagtcacatgtgggtctcagcaaaatgataaattagcatagaccctggacctctgggtcatggtaaaaataatcactgaatattaaggatctgtgtaaagattcttaacctgtatagggtctgtgttcagaagatctgtgaaactcctgaaattgtctgccacattttgtgtatacgtgcatacacattttttctgtgaaggatatatgagtattttcaagtctgtaacccatgaaaggttaaggaccaacggatttataacctgttcagaagtcttttacattgagttaccatttgccatctcatttcctcactaattgcatattagtgaggaaaaacttagataccatatatttttttattagtcttattttaattttccagaaaatttgtgaccttttcataatacagtgttatttcttctttatgtgattcgtattttagtacaaataccatgttaaggtgcttgataaaatgtgaatgatttatgaaattttacttatatacccaaatttgttgttaaaagggacaaaaaggaatttttttgtattttacattcagtccttttcatggaatagaatattttaaaacaactttggcttgaatttttaattatcatatttagaaatcctgcttttatgaaaatacagaaccctcactctgtggcttacagacaatagtagtatattatgtagggtagcctaaacaatggttgattattgtgtttgtgtatatttcattctctctgaattggacttgagaggcaaactttgtctttaaacctttagctgttgctttctggacctttgtattgcctaagggatgcaaacttcttggaaagtagaaccataaagttgtaaatgaacaagggaagaaatagaaaatataatttttgtcttcattaatgtttctaaagtagacagtaatttcacaattacagtatccactctcatgaaatttactaactacattaatgagcaaatgtgaagctgttttgctaatgtggaaattaaattttttaaaacaaaacttttttattctgtcaccaaagaaagaagcacattggttatgttaataaaaataatagaataaacagtcattcattggatgtttaattgttacaggcacttttacatattaccttactggatcttaaccactgtaagcattaaatggtattgccattttgatgaggaaactaaaacatgtagaagtttcttcaaggtgttctatgtgaccttcaaaaccaggcaattaatgggtgcttaatatttgttaaattgaattgcattgaaatctctttttactctgatcttttcattagtattatcattttttcatttatctgcggttaaattatggcctcaattttgggactccaggcctcagtatacattaacataggaaatatacccatttaaatgtctgctacattgtttcctgcagtgattcttctttttataatcaaagcagtgtgtagcaagcttttatcataatattttggaaaaatacgatctcttttataatcctaactgttagctaagtgaagcagattttctatactttcattcccacttattagtcacaaattatggggctggagatgagttgagatattggaggtcttttctccccagccttctatgcaaatagaggattttcattttttcttaatagtttgtggtgtttttcctaaaaagtaatccttaatatagtttttacccatattggtttagtttcttttgagagaaaatatattttattgatatataataattatacttttggtatctctcattttaaggtattagcctcatttttaaatagtgtttgaatcggcaaatgggtaaaaaatttgggtgttatggaatataagaaaaagaaatgaatagttgtatagtcaacattttatacagatgtaagtatataaagtttatatcaaagaaaatacttcaaaatattttaagtattatagctagtattgatgcagtatggtcaaattcatttagtgagggagtcattactgctacatctagcttttataaaatttgaaaaattcatgaatattatattaaatattttaccactttgggaggccaaggctggtggatcatgaggccaggagatcaagaccatcctcgccaacaaggtgaaaccctgtctctactaaaaatacaaaaatgagccaggcgtggtggcgtgtgcctgtagttccagctactcaggaggctgaggcaagagaatcgcttgatcccgggaggcggaggttgcagtgagctgagatcaggccactgcactccagcctgggcgacagagtgggagtccagctaaaaaaagaaatatatatatatatatatatatatatatatatatgtatatataattcatataaatatagtactttatttaaaaataaatagcattttctcctcttctcatttgtttatacttttaatatgttctgtttacttgtaatcaatgtggagtcttcttttaaaaaaaaaataacattgctgttgtgaagaaaatttgcagatgaatattggaaaatatactgaatacctagaaggaaaataatgttttttgtccttcttaatatagaggtcaaaatagaaaagctatttctaaagttgccattcgtgggaaaggaaaggccttatcatttatagaatttgatatcagggaacagttgttctgaagtaaaacaatccagaccattaccacattgataattttctccaattagacagattagaggtttaatcctaaaagaaccccagtatccaatatttttgcctacatctttaacattaaggaaatcctgtttttaaatttatatttttaaccattacacaagatctttattattggaaaaaggacagacgcaaattaatcagaaaatttctcattgaggaagattgagtttttaaatgtatgttaacaaaaggtagaaaaactcatcacacttagcatgtatacagtacttatatggactagaaagtttgttcttgtgctttcagtagaagcataaaacaaatctgatgttgtcatagagatagtttcataataggttatgtttttgtacaagtcccatattttcactagaactattacaaacattacagtcatcagcagatgttacacatgtctagcatagaaatttctttttttgtttttgttgtttgtttgtttgagacggagtcttgctctgtcaccaggctggagttcagtggcgcgatctcggctcactgcaacctgtgcctcccggaggttcaagcagttcccctgcctcagcctcccgagtagctgggactacaggtgtgcgccaccacgcccagcttatttttgcatttttagtagagatggggaatttcaccatgttggccaggatggtctctatctcttgacctcatgatctgcctgccttaggctcccaaagtgctgggattacaggcgtgagccactgcaccgggccctagcatagaaatttctaaagtggatataaattaatcatatcaattctaaattacagtttagttaacattttttaacctgttcttcagttattacactgtatttttagtccaaaaaaagatgaaaggatttatcaggatrttttgaggggatagatttttaaataggtcattttgaagatacttttgagtagacatagtcattacatagtcattaaaaaaccagagctttacatatttttataaaataatttttaaattctaaaagtaataaatgaycttagggaagatttggaaaatacaaacaagtatgaagaagaaaaaaaraagtccccscaatcccactgtgcaaatcaaccactcttttttttttttccaagccaaactgtatccagctttattaaagatactttccakaaacagtcgtggtatttcaggcagaacatgggcagacagtcattaacagtacacaacaactttcaaacttaactaccttcttcaatggactaccgaaaatcagaaagccactataaaacccaatgaagtctkcatctgatgctctgaacaggcaaagtttagagtgagggttgacatgtcacatttagcatgttgtttaacaacttttcacaagctgaccctgactatcaggaagtgaaatgaaaacggcagaatttatctgaagatccacaatctagaaacggaaccactgctcttttgacaggtgccatctcagtggcatcccggaaaagtccagattgcctgacacrctggtaaccaatgactggaggtcaggtcccaacagatgtctgggcttaagggagttaagtctgtgctgatagatgggaagggagaagagagataaaaatgattttgtttttccataccacaaggcttttgtgycaaggtggccatatgtgtcaaagtcgcggaatccctcctgggagccaagagtaagtctctcaaaactagaagggaaaagtgttttccccacatcaatccagcttcgaagacaccctattagtgacatatgccccttccccacaaaacaacaatgaagtgttctgtgtgctaacagcatagctcaaaaaaaaaaagtaaaacaaaattttgcatttttataaaacttggtaaaaatagtatttcaaactgtttagtcaccagaagtacacagttatcaaaaatgcacacacttctcttggcacctccagcaccttcagctttctgtgcctgatctgttttgacatctccattttctgcagggttattcccctccttgccagcatcagcttttccctttctccctttgggtaccttctctcccttctttgcaggggcctttttaggcctgggctctggctttggagaagcaggtttagcggacaaccttgcagatcttctctgtggttcgtcctttaccttggctttatctcctttagcatccccttcagcctttctcttgggcatggtggtggcagtgatggtggtgggacataggcactgggcgtaggatgcagaggcatgtgggctttggtgagtccaggggtcgttcttgcctcttgttcatactgctccaaatcaaccactcttaatagtaaattctttataaatattgactattgtgtacatttaagttgtttattacttttcactgttaaaaatagtttttcctcacacaatttctaaggatgcttcctaatgacagcaaaatgcaattttctaaagaaatttatccaacttgataaaaccaagagtcctttacttaggacaggtatatggggtagtggtaagagcttccctaatccctgtttgacacaaattttcttggaagcaaggaaagtagaaccatattcccaagaagcattctcttggtgaggcagaatagaagaaagaataaatactatgagaacattttagggacagtcctgaatagtagtcgagtagtaagggctccaaaagaacttacattccttcctttgtcactggaaaatcccagttagctttgaatagggcgttgactctacccccatattaatatttttagacagtgttatagattgaattgtgcttcctcaaaatttgtatgttgaagctgtcactcccaatgtgtctgtatttggagatagggcctttaatgatgtaattaaggttaaatgagatcataaggatagggctattatccagtatgactggtgtctttgtaagaaaaagactagctaccaggtgtctgctttaatagagaaaacctatgagacaagaccatctaaaagccaaggagggaagccacaggagaaaccagccctgcggacaacttgatcttggactttcagcttccagaactgaaagtctggaggctgttgttgaaaatctggaggctattgttggtggctgttgtttaagccacccagtctggcatttcgttaatggcagycctagcaaaccgatacatacagttttctccctttcccttccccttccccttcccattttagtagtagtgcagtaggcagaataacagctcctcacagatagaaactgctactctgtggactgtgtaagcattaccttaaaaggaaaaaagattgggagactatcccgggttatctaggtaggccataagcacaataataaatgtccttataagagagaggcagagggagatttgacacagacatacataagagaaggtggtacgatcactaaggtagagactgggataatggccacaagtcaagaaatgctggcagctagaaggaggaagaggcaaaaagcagatttccaagagggaatatagccctgctgactccttgttttctgcccagtgaaactattttggactttgtgagggaatgtatttctttttgtttaagctattgagtttgtagtaatttgttttcagcagccataggtaactaatgcaaatagctgctgaaaataccaaatacttttctgtgtctaatgatgtaatcttatggttttgaatcatatgatgtttgctttctaatttgtgaaaaaatcatatcgattactttgctatttttttgtaaactgcctctttctggtatttttttcaaacactgatggatttgataatattttgatagagttttttattaaggaattaaatagtctctactttttcttttttatactgtctttgtcaggtttgggtcataaggttatatgttaaattgttttggatacatagtcggagcccaggttattctwatcttgaaagtcagttatcaaagctgaagctttctatgatagacaattgggagataattttggttcttaagtagaagaaaccatattaaagtgtgttttttaagataataagacataacagtacatccaaaaattgtttgtaggtacctagggagcaaaatcaggcataaagtctcagataacaatctaggtactgagtttctcaaacacattctgtctcattcatgttcttcaggagtgaagactacgtgaattgagttttgggggatttaatcaggaagtaaaggaattctaagcccctagagaatgtcacagtagatgactgagaggtgatcatgtttatcttttccctgtaattcttttcattccattttttttttctttggaagaggtgaacatcgtagataataaactttgggagtgttaggggatggaagggaacatgtctgtataggtcagagtttctgaggttggtagccttggactttttgtgagagaaagaagagtagagttataaggatccagggatacatatgcaacccaagcattgtataaacactggaaaaataatataactcacacgtctgttattccacattttcaaatgtacttaattactttgtaaatctaaatcatcaactgaaaaattatgtttctaaatttgtggcacctgtagttaatgctttcaaacaacaaataataacagcttatacctattaccctatgggaatctgtagagtgggtttaaaaaattattttaaagggaccatcttttaaatgaaaccctccctataaacttataaaattaatcagggaagaagggatggggagaaacaaaaaccaagcttgcagcacattcagcgttaatcactaggtcaggcttgctctctggtctgcttcttcatagttgtttggtgcctattgtcctacgatcacaaagaccttagattataattctccttaactgctccatagaaaacaacttgaacattatgaaacattaagttttccctttgagatactcttttttttttttttttaactgttccaaaggcacattggcacctttgagatacactttcaggtcctgcataccagtgaaactacaggcaccagctggtctgacggtgagctgtctcagcaaatgcactcggtatcttcatgatttcatctcccttattccaaccaatcaatgaccccaaatttccagccccttgccctctactatctccttaaaatccccagcccagaactcctctgggagatggatttgagggtctcctcccatctcctttctcagccaccctgtggttattaaattctttctgtgttacaaaccctgctatctcagtatattggtccgttactgtagatcaggcgtacaaatttgttggtcttgaatctaaacaccagtcccttaatcttattactgaggatactcttggctatgtagttactcatggttacattgctagttagttacagaaccctggtgagagcctgtgttttcaagatctcttagaaatgctgtgaagaaaaggtcttaggtttaggtcttagtagtaattatttggtttgactttggaaaagtgtagatacctgcatctcctcactgtgggctatgcacagatgaaatgtagcattattacgttttgaaaggtgcaggatagcttctgtttttcaacattatgctttagttgttctagccaccattctttatttaaatgagtaggaagccaagagcaaagtaaagatggatttttggagtcctttgcttattttcccacattttttcttaccagagaacacataacatagacaggtagataggaagggagggaggtagataggcaggcagttcaaccagaaaaaaatcaagcctgttttagcaggttgtgaaaagatgaactgaatctgtcaatgtccgcatcttctttagttaccaggagtggatgtgggtaagccttggtgcagcagataatactgataagtgtatatgttccaaatagagatgtggtcataggaggaaaaagaatgttaatgccatctgggatgttaagaagttagggaaggacacagagcataaytgagatgaaattgtaacttcttactctcttcagtgatagtcaaatctaatttaagtctgttactctrttctcatgaaaacattctcaagagttgaagaaaataaatagtaaggcagtctgtatggaccttaacaaaacttagttttgactattggaattaaattttaatattttaatttggaaatctcatcctgaaatctcttttggtaaaaacatggaatctttttagtatgaattagaattattctggtcaacaattatagtttctgtacccattagggtatcaaagtcttatattcaaattatattaaattgactmaktgactcatctagttcagtgggaatatgattttagaagtagaataaagtctacttgtatttgtaaagttgacacwatgttttatgagggaatttaatgttcttttcaggaacatgaggctggacagaaagataatcttacaagaaattatctcagtttttcattttggccttttgttcacaaaagagctagaattcaaaagaaaacaacatttagcctatttatttatttgtttattattttttgagagggagtcttgctctgttgcccaggctggaatgcagtggtgccatctcggctcactgcaacctctgcctcccaggtttaagcgattctcctgcctcagcctcccaagtagctgggactacagttacatgccaccacgcctggctaattttttgtatttttggtagggacagggtttcaccatgttgatcaggcttgtcttgaacacctgaccttgtgatccacccacctcagcctccaaagtgctgggattacaagtgtgagccactgcgctcagccgccctttttaatactatggttattttagttgatatcttcagattgctcttgattggagtatataaaatatgtcatagattgtgttattttaattttacttgtctatgttcttatttctttgaagttgctatttttcactatattttgctgtcacctataaattataaatattagtcttaacagaagtcagatattttctatattggatttttttttgaaaaaaaggagataggataaaatgtaaggaaatcaaatctaggaactaatttagaaaagtcagaggatttttatttagtattgagaagtataagataagttaaatgtatacaccagagaaaaaaagttcttattacaatgtaatatgtggaacaaaaaaaaatagtaaggatatggctatctatattttattttaatgtttatttaacaaatatttactcagctccaaattaggtactagaaactgtctcagactctgggaatatatttccacacatcctggtcaatgaaacattaaatttctaattagaaattttagaagttctaagaaagcaaaaagctcatggtgcttttggaacatagtccagggakatttaacctaatccagagaagctcgggaaaaatttgtgccagactataagrtgagaccgtaaggttgagtcagagagggacagaaggggtttggagagaatgttattggagtgtaggaatagtatgttcaaaaactctgaagcgactataatgtattgtaagataccctgaaagaagttcatgatcgtaggagtggaggcagtgagaagaggtgaagccagactggaatggttcaaaggcaacacttgaaattacctgattaaaataaggcactcaacatagccttaagaatgaaggttattccatttggtattctttgctgaactgcttaacagtatttttatgtttccatgtgctgaattcattttataaatttttttaaaagtaatgcatgtgtttggagcagcattataagaccatggaaatggttttactgtttgtctcttttacgttttttaagaacaaagcttccattttccacttccatctcttggactattcatttaacggtgatctttctgtttcttaatccaggttctaaggattctggggttggtagtttaactcttaatccttttaaaaaattgaaccaatgtatcttttcaatgagaaatagttcataaatcttgctactcaaataaatcatgagtctatatgaggacttcagttgggaattcgtttattcctgttcactagaattaggaaactctatgtagataggagccatctctgtgtttacttactgtctctacagttcccagccattgcctagtatattaatccatttttgttggtataaaggaatatctgagactgggtaatttacaaaggaatgatatttattttggctcatgtttctgcagactgtacaggaagtgtagtgctctcatctgcttctggtaaggcctcaggaagcttacaatcatggtggaaggcaaaaggggagttggcatatcacatggtgagaggagggaacaagggtccggggccgcggtgccgcactcttttaaacaaccagatctcatatgaactcagagcgagaactcatttattgtgaggacagcaccaagccattcatgagggatcttcccccaagccccaaacacctccctctaggcccacctccagcattagacatcctatttcaacatgaggtttggaggggacaaaacattcaaaccgtatcacccgggatattgttgatgaagtatttgttgattgaattaatactaaattttgttggcattacattttattttgactttaaatgctgatgagtatttgatagttcatggttctgtgataacatttaggcttgtagtgaataaaacattacaatattgtttaaatcttttcttttacatttaaataaaagatggataagaatgttactttaacattttatataatatcctttaacaatctgtaggctaatctttagtttatggggcttctaacccataatgcagttgtactgattcttttgccatttccaatttgttgctgtgaccatttggtgaatattttatttcacttattatactttttagatctagagttttctgtttttgttgtttctwtttttctcttgagatttattctgtgttcactcactgatagcatatttttcttcagttctttgaatatatttataatagcttttttgaattactttacttgctaaattcaatgtctgagcccagttagagtcatttgtattgagtgtattttttcttaagtaatttcctgaagactttcctgtttgtttttttggggwtttttttttttttttttttgcatatgtagaaatttctggttgaaaactagacattgggaaacatatggtgaaatgactmtgggttctgtcatattcttttgaggaccttggttttttgttctagtaggcaattaacttccttgggttgaaaccacaaactgtctcctgtgaggtattcagcttacacctttcctctgctgctttgttagcctgaacacctataggtcccccttgtatatgcacagtgtggtagcccaaagattttggcagatgctcatcttctttgttgtttctttgtgtctcagaatttcctcctaattgacagtagccatgccagctttgggccctatactctgacacatcaagcctgtctagattcatctttctaccactcaagctgtaaatgattgaaaaatgttctcagttaataaaagaatcacagattctaaaatcttgtttttttttttctctcttcctgctttttcactaggcttcataggcctcccttgctcatgtgtaaattttgttgtcagctaggaatttgtgtagcttgtgctctgaatttgagtctcgtgccttctgtgattagcttggtgctaacatttttcctttaaattttcagctctttttccagctctccactccaagttctagcatctttagccagtgcgatgccatttttttcttctccttttttgtagctgtagctatggagtttggtcagtgccttgcagccagtatgaactctcaattcttaccccttctagttttcaaaataaaactctcttcagccttatgtctgcatttgaaagtttgaagtatcttcaagtagtttgtttgctttaatctagtatcttattattggtatctctggggttttgtatgaccacgtcagtttttcagcatgatcagaagttaaactacttcatccctattgatttcaaatagtacatttaaaacaagggcttctaaacattcaatgaaattcaaatgatgttttagacattaacttacacctcaactcttccaaatttgtaagttcatgtttacactttgtacttccctttttttttttttttttgagaacagcaaattatatttmagctgatggactttcctcagtttctgttaattacatgtgtgtctctatttagtagtgcatttagagtcactatttttcactgctgcagatatctagacatttgattggaaaatagttcggcattgaacttagtagcaatattgggggacttgggactaaaaagcaccaatcaacttagaaaaccaagccctgtagtaacacaagggaaaaaaaaaattcctgaagccaataccttgggaaataaagataatagaaatgaaatcatctaagtagatggccttaatatttctggacatgttccataaccctcacaggtaacagtggactggcatctgggagacaggacaaaacataaatgtggaatttcaaggatattcctattttctgttaaagttgcaggaagtatgaattactaaagactttacatatggtcagattgctgagtttcagtttcaaatattaaacactctttttcagacgttctcccatttsactctcatttcatatgagttcatattattttatgccccaggcccgaagtgtagataagtttactgctccattgtatactgtttatctgattcactctccccctcttttgccttctggtgttacagagtggtaagcaggaaagcagggtctgtatctatctgtgctataggttcactatccttgccataaattaagttgatcrcttaaaaagtatcactactttagcactagatttagctcgcttttaacagaaatttcatggtgatcttttctcatttcaaggcccttgaaataagggccttgttttctcgttaatggagcatctcattctccttcaacagggcttgatttcctttgaacaaacattattcttaccaataattctgataactttctggtaatttaattgtggttatccagcctctttattctccatcagttcattttagatattcttctgatttccttttgtctttcacaagatctttgaaatcccattttctctacatctttaatatgacctgaaaaaaatgtttgttcaatttatacatcctgccacaaaatagtactctgcttcaaattccacatttatgttttgtctcctctgccacaggtaataacccgtccactattacctgtgggggttatggaacatgtccagaaatactaaggctgcccacttaggtgattttattcttattatcttcattttccaaggtattggcttcaggatgttttttctccttgtgttttctgacttgattggtgatgccgagcattcacacagcttttcagtttctcagcttagaagcaaggaatgttaaaaagttactatcagtgcctttaatcatgaaaaagacaagtagaaggaattagttctctcacccagggacatcagtgtgtatgtataccagtgggaaccagacatcgtgtctaggtaaaatcacttatcacactgcagctaattttttcacctggtaattttagccaaactaggtcatgttataaatgtcagcaaggcaaaagagagaataaaatgtcatcagaataatgcacatacatttcaatggagcttaaaatcttttataggaaacaggattatgaggtaggagatttttttcattgcagcagtgaatgtgaatacagttactatgattcttaaggtattcactttggcctcattcctgctttctttaaattagaaaaaatatctcaagtttgcttacaggtaagagttttaagccaaataaataacagttattgtagtgatttggttgaaaaataaacttctaattcccctttaaaaactgagaagaaatgaaatatagtgcaacgtcagccacaaaatcattattttgatagctaacatcatttgtattctaggctagaattttaaaatttaaagttcaaaaaataaaattttattcacattgttgattttgcccaatgacacaagctatatgttaatattaaattaatatagacaaattaaagaaagtaccacatttatcactttcatatgtagtaatttttatttcaataaccagaattgtaggtttcaaaaaatgtttgaaaatttgctttaattaatagttttgacaaagaacctttaatagaccactgcttttcttttcaaagtttcagttaaacctgaagaaataatatggtcctgctgtgatttttgaatgaatgcttttgtggttgcataaattgtgttttttcatgaatattaggattgtaaatgaaaattaagtctggattctgatccttttcctttcaagcttattaaaataagatcttttaggatcactgtgactctctccttgttagttttatgtcataacttagccctgattataaacaaactttaactgtttcttaattcagttttttcttttgtcatgagcaaagaaaaattactgaaataaataagcattgagacatattcttgtagttgaaaacttagtgtgggaatcatatttttgactcccagctcaggatagtattaggtagggtagattattttatcttcttgtaaaatagtgtaaaataaatatttgcctatagacattacagtttagagtagagaagtttcacattagaaagatgctgattcgtctttacatttaggcataaaagagggagtacatagagagcatttataatttatctactttaaacataattattttttattatttccctttgcactatttttaatcctactcatagaatgaaagatgaggcattgaacttgtatctaagattgatgatttgttttgagtctggggcagacagacacagtaatggcttagtctgatacaggcattttgggttcagtctctagggacaggtattcatatgtaataaaaccacttgaactggcattgattgccattgttgataatcctagcaggatcaacattgattgagtaaataaaaagatcgaatttaccttcttctggcaaggcaggcagagaagcaggacaaagcataaagacttgacagcactgtagcattacctctattcaactgtgcttcagagaaaagaagtggcaatgattaagggtactgttcaattcagcaagcaattattgagcagttctgtagcacaacactgttagctgctaaaggactcaaaaggagaagacagtatgattttgcactaaagtagtttatcatctaaattggaagacaaacggttcatatgtgaaacagctagaaaacaaattatgacagtatataattgagtgtacagttgttcatgcaacagaatacaagcacaatttatttgtccagcaagtgaaaagatatatctttataatgtttataatgttaaattttgtgtggcaacataaagtaacatagcctgagttaattcaggtctttggttatttaagatgaaaaaacccccagcaatttaaatggtatttatttaaaatatcctttattttatttatcgtcctttatttagaccacctaaaaacactagatatatgattattcatacctgagccccccccaaaaaaaatcaagactagcttactccctgttaatgattcaatcaattgagtataaactttattaggttttgttcactattgattctttgcctcatatatcataaaggttcattctatctattttgcagtattttccaatgtctaggtattctgaattatgttcactaaaaagtaggtctcaaagagcatcgtaatctccttagctttgtataaggaagccatgtaacaaagcagccttactacgtttctgtttttgcttttgttttatttttatctccattacttgttaagtggtaatggtgtagtagcatcttaaaataccatactattaagattgagccggggaaccttctcctattctttgctcttcagatatttctctactgtaaccccatagctcttgaacatctcatgacatatatcattgtattttaatttaataaattcatttttctatgcactagactggcttctttgcattataaccaggacttcacatagatgctggtacctcatagatttctaataaatacctgctgaattaaggaaacacaaatttatgttctacatcacgatgttagtgaaaatttgttgctgtgtttatttctcacaataaataaacatggggtgcctcctgtagtagtgtcctatgggaatcaattattgatacccagtgatgtagacaagttgttttaaaaaagaaaagattgaaggaaagcagtctcctcttttaccagcccccacctcaactatataattttaagaaaattgatatcaaaagctgtgatatccgtttctctttaccatccaaagttcttgaagttgccttgacaagcagagattccttgaatcagtccaaatacatgatatatagataaataatacgtgtgtgtgtgtagacatctttagtagaaacagcttttcagatactgatttcatactgtcttcctcctggctttccattgacttattgatttcagatacagtttcaaattgcatcttaattgtggggagtggggatagtagctagcctctggctcctcttttttaaggttatttctgagactgccttggagtggttcaaaccagaataaatgcagtttactgcctatcactccatactcttaagatggttttgccagcttttagagcctctcagatgttctaaaataaggtcaagctgattctacatcctattggtggtaggtgttagtgatgtcaatttggcacaatgtttttgacttgagatagaatcattaatccagggatatcttgttaataaatttaccgactactcacttggaatttttgatgtagcagtttttaataatatagctttttcatgtcaacaagagtacattctgactgattctatttataaaagtatgcaatactaatgtttaatattagaacagttagcagtagttaactttggagaacaaaaatggtagaggtaaggggtcagtaagaggacttctgaggatgcaggtaatgtatttattcagcgagtcgtggttatatgggtgtgtttattttgtagtaactcattgagctgtatgattgctatacttcactaaaatctatggagatcaaaggctactttggcagctttagtctaatgacaaacttattattttcttaaacaatgggcaaaattttcttctgactttcagattcctacagtctaaagggaaagataaaactattttagtatgatagctaaaatgcttttgctcttttaaaattctcattataaagtgtattgtttattttaacttctatatgactgttattggctacttaaaagtctttaaagaaattaattgggaaataacagttgaacatgaatatgggagtacttacttcaagacaatccagaaaaaaaaacaacagaatataaaatgtaatgtttaacaaaaaacaaatgtcattttgtatttaaagaacagtttaaggtatgtttaaaacaactacttctgaactgaatgatactacttctcaccccctccatggcaaaggggtcatctaaattagttgtagtcagctgcaccaagctgaagagccactttacactgaactgaattttgtatggaagctggaaagaaccacagactttactaccacattctaattggcaggaaccctgcttctgatgctaaacagcatgtcaggattgcatactgtatcaatttcagaagtccaagttacatttgggtttattgtttatccagccacaagtaagctgccttctgtaacttacccattggcttactgggttatgattttctaattagaaatggaggactttgagatgttaaaagtgggggcccaataatgagtattgcactgcagatacacagactgaatatcactgtcctaaaaaaaaaaaggcttttaaattgaaatatcaaaatcatgattaaaatcaaaaggtaaacaagcaagataggataaattcaatccatggtgttggtaccagtactcttcacgtgaaaaggacctcggcataagtgttcagaaataacaaagatcaaccagcttggccaacatggagaaaccccatctctactaaaaatacaaaaattagctggacgtggtagcgggtgcctgtaatcccagctactctggaggctgagacaagagaattgcttaaaccccaggggggcagaggttgcagtgagccaggatcacaccactgcactccagcctgggcaacagagcaagactccgtctcaaaaaattagcaaaaataacaaaaatcaataagctgaaaaatgttataaaatttgacgttgaataattcattagacatgaaattacagagtgcttacatttgttgggtactcttttaattgctttacatatattaacttgttaaattctcaagcaacctatgagatacaggacaagacaaagagaagttaagtacatgtagaaggtcacacaaatgacatttaaatccaggcagtctgattgtaattctatgctcttacccttaaaaggattcgtcaattccggctaaatggtgtgcctgaataaaatgtggmgcacggtagcatttataatatttattcattcaacaaatatttatygaacgcttacgattgggccaggcactatgctaggtatttatggttataatattcccccacttatttttggggttttacttttcatagttacctttggttaactgtggtctgaaaataggtgagtacagtacaataagataatgtatgtgtgagagagaaagactacattctcatgactcttattacagtatatagttataattattctattttattattagttattgttaatcttttacagtgcttaatatacaaattaaattttatcataggtatgcataataggaaaaaacatagtatatataagggtcagtgctatcagcagtttcaggcatcctttggaggacttgaaatatatctcccacagataarggggaactatacataacagtttatgaaagtccttgacccttgtgaagtctgtattctagtagaggtctacagacaataaacaaaaaagtaaaacaactaggttgtctaataaaatatttayatagaagctatgaaggggactgtaatttcataaggtggtcaaggaagrcctcactgataagrtgacayttgagtaaagatttgaaagatgtgagaggataaaccacgagraatgttctggaagcagaacattccaggtaaagaaatcagcaaggacaaagtccytgagaagaaagtgagcttggtatcttcatgaacaaggagagagttttaatgaagcacagtaagcaagagggagattggaagaggagaggtgagaggggtgtggtaggacagatgatgtaaagccattgttaggattttagctctcgttttcagatgggaagctatttgaggaatttgcatagaaaatcaaacctcaaaatgttgagagaagggttctagaagaatccttgataactggaaaggtgaagtttttacattaacagaagaggtaaagagtaataatcaaaaataggaagatcttcagtcagtgatgctaatgtgtctgaagagtcagggtccccagtaggggaaggaagaggaagaaagtgaaaggaggctaaaattttcactggcattgtaggtagaaagactagggtttgagtggacatctgctatggaagtcaggtgacagtggaggccaaagtaacaaaagcaggcagggaaattctcagcagcatcagagtaatacaatgaaattcctcatagaaatactatcaaggaaagacagagaaagccattggacacctatgtcaatcaactagggcagctttgctaacgaacacactcttaaatctggcaatcgaaagctgcctgtttaaaaacaaaaaagtaatgaatagcaatgaaaagaaaaaaatttcaattttagaataattattagcacaaggtcacatggacaggaacarttacccattgtttacataaattctcatggtagcaataatgtaatgcatatggctttgaagatgggtaaaattattactttaatacagtaaaacaggtaaatcatgaatgatgtagactgcttgtgccagtatatttgaagtaaagtaaaattcagtgttcaaatggagaaaccattgaagtgtccagtaatgatgcatttaaataaggtgatttggctgcaactgcattcatctgtaaataatttacacacagatcgagttaggaacttccgaaaaaatagtactcgttctaaaaacatccaattggataatttcacttataagggtaaagagtactgattttaaaaggttctcagagtctgttttgtgaagagatcccttaaagtataatggtggcggagcacagggaagagctcacatgcagccgcaggagagctagggaaaaagggtgacagctctgctaagccgccacttagaaaagagttggataagagcagtctcttcagagtctgacacctttcattttacggaaaaccttcacctagtctgtctatctcttaccagtgaacttcttcaaatgtaaaggtgtttgtaaaaggacataaaaatcaatcatttgtataatataatttcagatctgtgcctttyatatatatacttttaccacttattttttccatctgtgaaatgtgctgacacctactttaacaaactgatacaattgagaagagasagtgtgggctgctaataagaagctctcagtcaaaacatagtcaaaaacagagaacagattgataatgaatacttaattctttttaggagtgtttttggtcctacaggattcagaattataaaagctgtaattccctttggctgcaaattgtaggmatgttgcttgcttgttacatttcgagttccaagttgaatcagttgctttcttgaacagttgaaaagstgtcatttaagcatttcaggtatttcattttcctgttacaatcctgggttagatttsctgttacttagctctcacctcttcatctattacagttttctccctcatttaattggagtatatcctcaaagatcttccacagaaaaggcatactggagatacaatttcagagttcttgaaggtctgaattatctgtttgctttcatatttaatagatagtttgggtatatagaattctgttttcaaaatcattctcctatagaaccttgaagacatttcctccattgtgtcctggaatttagggttgctgatgagaaatagaattccaatttgattcacattcttgtgttggtaacatctttttccctccttggaatctcttaagggttttcttctttatcttcgatggataaaacttcaagagaatatatttggattcaagtattttattcattcagttcgcttgatacttgctcagcccttccatcttaaaatcaatagttttcttcaagtctggtggtttttaaaaattacttgtctgattttctttctatagcatacatacattatttgtgcccacctgttatctttggttatctttgaacactcttytatatgttttatttgcggcattatgttacttagaaataagaacatcatatagtttgttagaaaaggatacatgttattgtaacagaagaagtagagcagaggaggaaatgtagataaccttgggtatggaagcatccaagatgtcttccagaggataagtaaacttggtacaaccagacaatggaatattattcagtgctaaaaagaaatgattcggctggacccagtggctcacacctgtaatcccagcactttgggaagctgaggtgggtggatcacctgagcacaggagttcaagaccaacctggccaacatggtgaaactctgtctctactaaaagtacaaaaattagctggtcatggtggcaggcacctgtaatcccagctactagggagactgaggcactagaatagcttgatcccaggaggcggaggttgcggtgtgccgagatcacactactgcactctagcctgggtgacaagagcaagactccgtctcaaaaaaaaaaaaaaaaaaaagaagtgatccgttgggccgtgaaaggacatggagaccccttaaatacacattactaactcaagccaatgtgaaaagactctatactgcatgattccaactatatgacattctagaagagacaaaactgtgaagagagtaaaaaagatcaggggttgggggtgggagatgagtakatggaacacagatgatttttagggctccagtaaataccatgtatgatactataatttattcaaactcacagaatttacaacaccaagagtgaaccctaatgtaaactatggacgttggttgattatgatctgtcagtataggttcattgactgtaacaaatgtactactctggtgggggatactgataatagtaggggttatatgggaaatttttatatcttcctctcaattttgctgcgaaactaaagccgatctaaaatagatttttttaaaaagtagagcagagtaaaggggttaatgtattggggtgggggtatgcaaattgcaattattgaatagaatgatcaaggtaggcctcattgagaagctgacctgagcactgagcaaagactgtggctatctgaatgaagaatgttacgggcagaggatataactagtacaaggatcctaaagcagaatgtctctgatatgtttgatgaacagcaagcaggttaatgtggctcaagtgaattgagtgagggagagagaatggtgggaaataagatcagagaggtaaattgaaatgggctgcgtcactagtctagactttgtaggctagtgtaaagatttcttagtgtgacagagatgggaagtgtttacagagtagaatagtaatggttatatttgagtatttttctctttggtagttttattaaaacagatgtaacattgcagttttacaaatcacatgattttcaatttagttctatcataagttcataaacttgaaaaaaaatactacatcaagcttttattttaaaatgtagataaacgttacagaaaaaaaattgccaagcgcaatggcacatgctatatagtccagctacttgggaggctgaggtgggaggatcactggagcgcaaaagtttgaggctagcctgggcaacgtattgagaccctgcttctagaaaaaaaagaggcaagatttttaagctgaagtactcttaggaaatatttcacatgagcaggtattatctttaatctgctttttattatcatggttaaattatgagcaaagctcataaaatgcaataaatgcattttgtatttcttgcaagttagcagtggtgttaaatcttaaatctctgatctgtactaatatcatcarctcctactgagaattagaataacagtagaaactttgggaaagattttaaatgacaacaaagctaaagggtcagaatgtcgtcgttgcaaagcaattttcttagttgtaataaaggtaaatttaataaaagtaaaagcaatctgctcccagaatgttacagtattttgttttgaataaatttatattatctggaaatcaatatggctcatgttgcacaaaaaacaaggtctgaaaatagtaatgccctagagttccagtaggaggccatcgccttgaactgtttagaccaatatgaaaggctacttcctggaagaaacaatgcttctcagcaagatatttcttaaaataccattttcagaattatttgtagccactataataaaactatcagtaaattgtcagattgttcttggcattggtgacagaaaaactgcacatatttactggactgcatgacaattaagaacagagtttttcatgattaatgggttaaaaggcaagagttttgaatgaacttaaattgggcaattctcaaatctttgatgattttattatatgtcatcctgaccacttttagctggtttaatgtaattttgaaatgtttccctaaatgttacatctgttaatagttagaaaccagcttaaattcccattaagttttattcaacaaacctaaagcttctgttctgagaacctcataagtaagtaccctctgtgccatagaaggactaacagtatacttcaacattttacaattggttttgaaaattaaaaaatatgtaggctccccaggagttcatattcaatttaacaacaccaattctacttaagacataaaaatctatttctactggcaacaagatgaaaatctccagctcatactccttatatggggtaaacacccagggaatgattccagcaaagcacagaaccaggtttgtgarggagagactgggctttgacatagtaccactggataatacatacatcagtaattgtttctgtcacttacaaatatgtatctgtttaatgtcttcagttgtttagacgaacgatttggatgatcctaaatttctttgaaacttttacatttagagttccaaaaatttgtttttctccaagattaaagcaattctagcatagtagcagcatgctgcatcaacaagttgatttttttttaaagtgtatgtcttctattgaagagctcgatgaagttcttaactgttgtctctttaattaaacagagaacagcaaagcttgtttttttgccaatcgcaaatttatactcaatttaaaccatggcttttaacaaaattcctatactaaaataactcttcacacaagaatcttagtggattttttataggttcttggttaaccagcaaaactcaacaaaatttgttggcattagtaacaaatactttttaaatatgcttctatttctcccatcagaactttgatttctcttcaaagaagcctcatcatagacttactcacacatttgtgagagttattagaattgccataatcaatggatactgaagaaaagggaagatttgagggttggtttttgtttttaatttttaaaaaactcgtatcatgattctggagctaaaagcagctcacatgggccttatatgagctttgcctctctttgagcagtacattttaaaagtcaggaagaaaataaaatctgactcttgtagcatttagctttgtattggagtggcctttgcaggtaatgccaacttccacgacatttagaagattcataaagtgctggtcaaaataatggaaaaaatagcagctgtcatttgatcagaatctgtgtgcaaaccaattaaaagccctgtcataactatttaagcatgtaaggtgatttatgattacctttcataaattaatgaattctaccaataagagcagggtgctacattgggtgctcctgttctcgcagagtttacagctayacattacatgaggactgctccaggtttgctgtgtttaaatgattgacaaggcagaaactttgtcttttcttcaactgattggcactatctacttataacttataacttagcttatttttcactcccccccaaggagagtagagtccagaatggccggtggtagtctcagagtagaagagttgaggtgtcataagataacgacacccttgaatttatttctcctatactttgcttcataaaagtgagcacaaggacagacaggcagaaaatagtagatcactatgtgaggctagagagagtcctctttcaggttcaacaaaggaaagacagaagaaaagtgaataaggtacataaatataagaacataagtgtagacaggtagatgatgaaaaatgggagaaatggaagacgtaacaaaaaagaaaaaagatgaagaaaaatatgggaagagaaaggtaaggtgagatgaggagggcaaaagaaacagaatggagaagagagaaaagaatggargcaaaggaaagaagggagaatacagcaatctcctcctgaaatctgcctgtcccaagcataaagattaattgtaatattttaattacaaattagcttttcctgagaaaacttcataagcacataattcttataaaattgtgttacctcaaatatttaaaatgctttctagtcaaatatttagggggtcatcattctccaaaactagctagccttatgcagctggtaggagttcttcacagctgttctttaagccatgttgcatgagaacttcatagagaacctgagaagttccattttaagagtttctcctgcttcggtatcctaggcaagaaatcaggagaaaggaatgagaaggaagaatcactagtgtcaagtgacacatgaaactccagtaaatctgggtattacttaggtcaactagagtaattcaacataaaggtagaatagttgttaagattttaaaagccaagtggtgatttcgaacttgtagctattgttctaatatgatgggtaatcacttcctgcaatggtgaactatttataaactgctggctcctcaaaatgtaaataaagaaaaattattccaggctacaagattaattttcctctatgtctttaatctgaggtagatccattttttgttaaaacacacttgttttatttatttagtcaaattcttcacattaagaaggaggaatctgagacccagtaagattaagtgactagtttatggtccttgggtagaacaggaatgaagcagaggtttccattcctaggtcacttcagaactactaattgaggttcatcagaaaaaagacataagccaaagaaattagaacatgaagttgagtatcatctttagtaaaaaggatctagtcattgcttccttataatattgaaaattagtttaaccgtaggtggacatttctttgaaatggtttctaccactaaaaataaaactgaaggtagaggattaggttagaccctggagcaaaatcaaaacagcttatttcagcctaagaacttttttaaagtaaatggcaagccmcaaatacctacatatctgtaattttctgagccaccataaaatctgcatactctgtaccaaagtaaaaaacttcacttactgacacaacctttactaaaaagtgccacagactgtacgtaagaatacttttatttagagaagaataaaatacaagctgtctagttcttaatatggtaaaactctctatcctcttacactctgctttcttatttatttatttatttatttatttatttatttatttatttatttattttgagatggagtctcgctctgtcgcccaggctggagtgcagtggcgcaatctcagctcactgaatgctccgcctcccgggttctcgccattcttctgccttagccttctgagtagctgggactacaggcgcccgccaccacgcccagctaattttttgtattttctttttagtagagacgggatttcaccatgttagccaggatggtctctatctcctgacctcgtgatccacccacctcggcctcccaaagtgctgggattacaggcgtgagccaccacgcccagccaatttgtcttttagttagcctgaataaatttaacctctcagaggatccctcaactcatgtgaaaaaatccttaatagtttctgtcttacattaaacaaaaaggcagacctatgtcacctggagtcataggaccctgagttatctcctaaggtaactctaatgtacattccttaactctgaagctaacagctatgaaggtgaatgccgatagctgctgtaggtttcacagagagactcaatgattatgaagattctgaccatatctaataacagacaacagataattgtacagtaagatttaggaaaaaaaagtcatttcagttttgaaagttttgttaaggtatataaatgcatatctgttgcctattagtatgatgatatggtagacaaattgcctttgtcaggttttagttttggctctgccattaattagctatgtggtttttgagaatttcagtcactttaacacatgtttatagatggttacataccaggcaccgtgcaagtcattttaacagttatcttaggaaatcctctcagcaaccctgagggtttgacattattattatcatcatcttacaggaaagagaactggggtttagattgagttttttctcaaggttcagtagctagtggcctgcttccaaagcttgtattattttgaaaagcagccagtttctggaactatgtccttaacaagtacttttgacccagtgggaatgaaaggggagtgcagaaagaggtatataggattccagccctcctacttctgcttcagccagagcaattgcctgttcattgttttaatatattgagcttttcaggtaagattttagaggggagagggttctgtagcattaaatgcctgatctcacagtattatgcttcactagaatgaaggggtaaaagtggtattaagctaatataagaaaagtaaataataatcgttggataggcttcaaaaaagaaatgcatttgagatggaccttgacaagcagataaaatcttgatttagttgaaggactccatctggggaaacattaatgaaagtgcttaaattttcaatgctaattaaaatgtttatttttaaaatgtttcctttgatcctgtttttctttattaaataataccctggacaggaattaagagcacagcctgaagtgattgtgatgtccaagaagtactactcatggaacaaatagacaacttgtcatatttcaaaattaaatgctgactgcactatgaatatagaaaagtacagttgtaaacactatattctgtaccatgtaacatcttatgtatgatttcagttctttttaagaccaccagactacagttacaagaaagccaagatcagactgactcaatttgcattacatacatgttcagggaaagcctaattagggaaaacagaaacttcaaatttcactcttttaaactgaataggagagtatcttacatccactgccagaaaatatcaccccagaagtgaaaatttacatgttttaatttctgaaataatgactttgaggaaaacagttagaaattataaaacatacaaattcctatttgtcacactatggagactttggagaatatgattctccaagtatcttggtgtttaaacaaataaaaatatagttcagccaaaaataaactagctcacatgaaaaagctgtagtattaaaaactgctacatcagaaagtcgaagtgagtattcagtaaatttattaacaagatatcactggattaatgattctatctcaagtcaaaaacattttgccaaagtgacagcactaacacctaccaccagtagtatgtagaatcagcttgaccttatttcagaacatctgagaggcactaaaagctggcaaaaccatcttaagagtatggagtgataggcagtaaactgcatttattctgggcttgaaccacatcaaggcagtttcagaaataaccttaaaaaagaggagccagagattaaatactatccccactccccataattaagatgcaatttgaaactttatctgaaatcattgagtcaatggaaagccgggaggaaaacaatgttaaatcaatatctgaaaagctgtttctactaaagatgtctatacacacacacatattatatatctatatatcatgtatttggactgattcaaggaatctgtgcttctcaaggcaacttcaagaactgttgatagtacagagaaatggatatcacagcttttttcttaaagaaaatatagcttgaggtagggactggtaaaagaagagactgctttctttcattttttttcttttttaaaacaacttgtctacatcaccaggtatcagtaattgattcccactggacacaactacaggatacactccatgtttattccttgtgagaaataaacacagtaacaaattttcactagcatcattatgtagaacataaattcatgtttccttaattcagtaggtatttattagaaatctatgaggtaccaacatctatgtgaagtcctggttataatgcaaagaagccagtytagtgaatagacaaatgaatttattaaattaaaatacaatgatatatgtcatgagatgttcaagagctatgggggtacagtagagaaatatctgaggaggggtaaagaataggagaagtttccccggctgaatcttaaaagtaaggtattttaagatgctactataccattaccacttaacaagtaaggaaaaaraaaattacaaaaaaaaaaaaaaaaaagaaaasagccatatgattacatgaaaattgaataccttctcctgaatgatttttaggtagacaatgaaattaaggcagaaatcaagaagttacttgaaactactgagaacagagatacaaaataccggaatctatgkaatccgactaaggcagtattaagagggaaatgtatagcactgaatgcccatatcacaagttagaaagatctcaagttaacttacaacttaacatcacaactaaaagaactaggaaaccaagagcaaacaaatcccaaagctagcagtagacaagaaataaccaaaatcagagctgaattgaaggagattgagataagaaaaatcattcaaaacataaatccaggagctggttttttgaaaaaaaaaaattaataaaatacatagatcactagctagactaataaagaagaaaagagaatattcatataaacacaaaatattcaaataaacacaatcagaaatgataaggggcgattgcaactgaccccacagaaatataaccatcggaggatattatgaatacttccgtgcacataaactagaacatctagaagcaatggataaattcctcaacacagctaccctcccaagagtgaaccaggaagaaactggatctctaaacagacaatatcaagcttggaaattgagacagtaataaatagcttaccaaccaataatgtccaggaccagacggattcacatctgaattctcccagatgtatgaagaagagctggtaccatttctactgaaactatttcaaaagttgatgagcaactcctccctaactcatcctgtgaggctagcatcaccctgataccaaaacctggcagagataaaacaaaaaaagaaaacctcaggtcactatgcttggtggacattgatacaaaagtcctcaacaaaatactggcaaaataaatccagcggcacatcaaaaagcttacccacccccatcaagtaggctttatccctgggctgcaaggtcggttcaacatatgcaaatcaataaatgtcattcatcacataagcagagctaaagacaaaaaccacatgattatctcaatagatgcagaaaaggcatttgataaaattcataccttcgtgtttaaaactcatagcaaactaggtattgaaggaacatacttcaaaatgagagtcttctatgacaaacccacagccaacatcatactgaatgagcaaaagctggaagcattccccttaaaaattggcacaaaacaaggatgccctctctcaccactcctattcaacatagtattggaagtactggccagggcaaataggccagagaaagaaataaagggcatccaaataggaagagaggaagtcagactatccctgtttgcagatgaaatgatccaatttctagaaaaccacatagtctcagccaaaagcttcttaagctgataaacaacttcagcagagtctcagaatacaacatgagtgtgcaaaaatcgctaggattcctatacatcaacagcagtcaatccaagagccaaatgaggaacatactcccattcacaatggccacaaaaagaataaaatacctaagaatacagctaactagggaagcaaaatatctctacaagaaaaactacaaaacactgcttaaagaaatcagaagtgacacaaatggaaaaacrtttcatgctcatgaacaagaagaatcaatgtcattaaaaatggccatacttcccaaagcaatttatagattcagtgctattcctattaaacctccattgagattctttgtagaactaggaaaaaaaaaaaactatcttaaagttcatctggaaccaaaaaagagactgaatagccaaagcaattttaagcaaaaagagcaaagctggaggtatcccattacttgacttcaaactatattacagggctacaataatcaaaacagcatggtattagtacaaaaaaagacacatagcctaatggaacagaatagagaacccagatataaggccayatacctacaactatctgatgttcaacaaacctgacaaaagcaagcaatggggaaaggattcctattaaataaatagtgttgggataattggctagccrtatgcagaaggttgaaactggaccgtttccttacaccataaacaaaaatggattaaagactgtaatgtaaagcacaaaagtataaaacccctggaagacaacctaggcaataccatgcaggacartggcacgggcaaagatttcatgatgaagacaccgaaagcgattgcaacaaaagcaaaaattgataaatgcgatctgattaaagagcttcagtacagcaaaagaagctatcaacagagtaaacagagaacctaaagaatgggagaaaatctttgcaaactttgcatccaacaaaggtctaatatctagtatctatacggaacttaaatttccaaagaaaaaaacaaaacaacctcattaaaaactgggcaaaggatataaacagatacttttcaaaagaagatatacatatggtcaacagtmatatgaaaaaaagctcaacatcactgattattagagaaatgcaaatcagaaccacaatgagatacccatctcagtcagaaaggttattattaaaaagtcaaaaaataacagatgttggtgaggttgtggagaaaagagaacacttatacactgttggtggcagtgtaaattgcttgaaccattgtggaagacagcgtggtgattccttgaagacctaacagcagaaataccattcaagccagcaatctcattgctgggtatatacccaaaggaatatattaataaaccattktattataaagacacatacgtatgttcattgcagcactattcacaacagcaaagacagggaatcaagctaaacgcctgtcactggataaagaaaatgtggtacatacacaccatggaatactatgcagccataaaaaagaacgagatcatatcctttgcagggamatggatggagctggaggccattatccttagcaaattaatgcaggaacagaaagcaacaaccacatgttctcccttayaagtgggagctaaatgatgagaacacatggatacatacaggggaacaacacaaactctggggtctattggagggtgaaggtgggaggaaggaaaggatcaggaaaaataactaatggatactaggcttaatatctggttgatgaaataatctgtacaacagatccccatgacacaagtttacctatgtagcaaatatgcacatgtacccctgaacttaaaagttaaaaagataacacaatatcaaaattttatgcaatacctacaaatttaataaaagttgtacaaagaattactgacagaaatttcaagacctaagcaaacaaaagaatcatattcactgaccaagaataccacttttactgctgtgagtagaaaatattgtgctaagccaaaaaaaaaaaaataactgagcatttttctttaagctctataccagcatgtgctcacatcagaatatttattaaacagtcatccttctatgaccttgaatttctcttaattacaatttaggagtgcataaattgacttaagtgtagcttttggacagcattgaaagtttcagatacagatggatacagatggaactacaaggcagccctgtgagggataattagaaaaagtataatattaagagagttaggcatttgtaaagcaggtaacctgtttgacagaaaaagaattaaggttatttacaacaaagactccggaaaggtaaaggaakataggagagagtaaagcccttagtgctgatctatgccaggtgtgcgagaccctagttaggtatcaaaatagcctgtacagttctgtttttgttgtaatttggttttgttttgttttaatacatttgtcctggtctaaagacttgcacaatttctgggagtggccttctgtatagcagttattcatacaggtctctgttggttctgttagagacaaagttgagttactgtggcctggctgtgcaaatactcttgttttccttttctaccaactttaaaaacaacactaaaataaaaacaaaatgtgtcatgtgaagcaactcatgtatgttgctatctcttggatccggaaatatactgacaaaattgaaatggaagaccagagacagaaaaaaacaaaaaagcaatttctcaccatgcatattatttgaaacaaaagaaatttaagttactgacatcttgtttgaacatcttgtttggagatttctaaaatcaagtaataataagtaacagtaaatggtactgtgcccattattatacttttaagctgtgttaaatgttaatgatattgtctttagcaatttttattgtttttagtgaaagaaaaatatattcacatcagagcatggttaccattcatattcttcctttaaagtcatatttttcatcataaattcttattaccttggtatatttgggactgctatggttggggctatttcagataacaaataattgcaaagaagtatttacttttcattgaaatattctttaattttgttttatgacaggattgaggtatgccctcaaacattatttcagtgattattgtagataagtattcgaatctttcatctgttggatatctggataaatcaaatggcctggccatggcaaaccacaaaatccagtttcgtagagctcatttgtttcaatgaaagattttaattaatcatattggttgcatcacaatgattttgaagttactttgatattaaataaaaaagaattcttatataagcaatggtaataaagtactaaagtattaataaagtattgagaatttgaaattgactagagaattcaaaaatgagaagagacaagtcaaggtaaattccctcatattcacatctacaccttatgggttacaaacatttgaattctgaaagataatgctggcacgactgtgatggtcaatgggtttatatcaaataaactatattgtagtttataaaatggttttctcttactatagccaattaaaatcttaaaaatagagtgtgtaatgtagtacagattttaagttgcctttatatggcttatgcttcttgttatatttgtgttttggggggaattcttggcaagagattaggtccacatctgattttatgaaatgaatcaacaatgacagtaaagtaataaagtcaacataatgatttaattgtctatgattcacataagtcacttaacaattatatttgtttagtggtatgtttatcataaagttaatatgtttccagattgttcaagttttatattgttatatttttcaaatttcattttatgaataatgataatttatattccctcaaacttccatgtattaccatagttgatcttttctgttcattctctgttttgaaagaaatctgactttttactttcaaacatctagttttcattatcttggagctaattcaatcgctgtgatacctggaaaaaattacattttttatcttttagtttgtaaggagacttttgaacctgaaacagaaactgaatatttttgagattcactagatggattggttttcttaatatgcatttggtatagtaataataacgtgttatctttcaggtataattttcaattcatatgaatatgaacaatttatattgaaatgctgtggcgtttttatttgtttagttcttagaaagggtagctgttctatgggtttacagagacaagatttttatacataattggagatactagatggaagtagtttggctaaaaaggaaaaaaaattctatttgattgaagatggagggctgagcatacatgatgacttcttatccttcctgacacctcacctcatagaggcatatacataaaggaatagatccatgcagcaaagaaaatcagagagacttactagcacttggtatgttttcaagaaattactaggagaaggaaaaatgggaatgagctaactgatggaacaagcagtgcagaggaggagatgggagggaactgatcagcctgcctgaaccttggagagtctctcttctgagaatctgcaaggatgaagatacagagctcaaaacaggagactcaattaaaggaccatatctgcaactgggacaattggctcacctacttcacttttacaacccagattagaaaccagtctgatttcagttcttctgagcaatgaaccatatgggaaagggtgacgtttctgttgtgcctcttggcatgccactactaagcctacattattctggcttgggttggggggtgcagttttcctaccagttcctgccttaagtgaaattcctgcctaaagtgaagcttgcccgtatccaaagctacccatgtgcacagagctcctagttaatgctaccaagtaggcaagaagataggtgcaacctgtttttattattatgcttgttcattgttttctgaagctgtcatttcaaatgcttgatttttccattatgttcttaccttcagtttattgttcattaagtatttgttccccattacacagatttttcaaaaattaaagcagactcttttctttttatttatttatttatttatttatttatttattattatactttaagttttagggtacatgtgcacattgtgcaggttagttacatacgtatacatgtgccatgctggtgtgctgcacccactaactcgtcatctagcattaggtatatctcccaatgctatccctcccccctccccccaccacacaacagtccccaragtgtgatgttccccttcttgtgtccatgtgatctcattgttcaattcccacctatgagtgagaatatgcggtgtttggtttttttgttcttgcgatagtttactgagaatgatgatttccaatttcatccatgtccctacaaaggacatgaactcatcvttttttatggctgcatagtattccatggtgtatatgtgccacattttcttaatccagtctatcattgatggacatttgggttggttccaagtctttgctattgtgaataatgccacaataaacatacgtgtgcatgtgtctttatagcagcatgatttatagtcccttgggtatatacccagtaatgggatggctggatcacatggtatttctagttctagatccctgaggattcgccacactgacttccacaagggttgaactagttgacagtcccaccaacaatgtaaaagtgttcctatttctccacatcctctccagcacctgttgtttcctgactttttaatgattgccattctaagtggtgtgagaaggtatctcattgtggttttgatttgcatttgtctgatggccagtgatggtgagcattttttcatgtgtgttttggctgcataaatgtcttcttttgagaagtgtctgttcatgtcctttgcccactttttgatggggttgtttgtttttttcttgtaaatttgtttgagttcattgtagattctggatattagccctttgtcagatgagtaggttgcgaaaattttctcccattttgtaggctgcctgttcactctgatggtagtttcttttgctgtgcagaagctctttagtttaattagatcccatttgtcaattttggcttttgttgccattgcttttggtgttttagacatgaagtccttgcctgtgcctatgtcctgaatggtattgcctaggttttcttctagggtttttatggttttaggtctaacgtttaagtcttgaatccatcttgaattgatttttgtataaggtgtaaggaagggatccagtttcagctttctacatatggctagccagttttcccagcaccatttattaaatagggaatcctttccccattgcttgtttttctcaggtttgtcaaagatcagatagttgtagctatgcggcattatttctgagggctctgttctgttccattgatctatatctctgttttggtaccagtaccatgctgttttggttactgtagccttgtagtatagtttgaagtcaggtagtgtgatgcctccagctttgtccttttggcttaggattgacttggcgatgcgggctcttttttggttccatatgaactttaaagtagttttttccaattctgtgaagaaaggcattggtagcttgatggggatggcattgaatctgtaaattaccttgggcagtatggccattttcatgatattgattcttcctacccatgagcatggaatgttcttccatttgtttgtatcctcttttatttcgttgagcagtggtttgtagttctccttgaagaggtccttcacatcccttgtaagttggattcctaggtattttattctctttgaagcaattgtgaatgggagttcactcatgatttggctctctgtttgtctgttattggtgtataagaatgcttgtgatttttgtacattgattttgtatcctgagactttgctgaagttgcttatcagcttaaggagattttgggctgagacaatggggttttctagatatacaatcatgtcatctgcaaacagggacaatttgacttcctcttttcctaattgaataccctttatttccttctcctgcctaattgccctggccagaacttccaacactatgttgaataggagtggtgagagagggcatccctgtcttgtgctagtgttcaaagtgaawgcttccagtttttgcccattcagtatgatattggctgtggatttgtcatagatagctcttattattttgaaatatgtcccatcaatacctaatttattgagagtttttagcatgaagsgttgttgaattttgtcaaaggccttttctgcatctattgagataatcatgtggtttttgtctttggctctgtttatatgctggattacatttattgatttgtgtatattgaaccagccttgcatcccagggatgaagcccacttgatcatggtggataagctttttgatgtgctgctggatttggtttgccagtattttattgaggatttttgcatcaatgttcatcaaggatattggtctaaaattctcttttttggttgtgtctttgcccggctttggtatcagaatgatgctggcctcataaaatgagttagggaggattccctctttttctattgattggaatagtttcagaaggaatggtactagttcctccttgtacctctggtagaattcggctgtgaatccatctggtcctggactcttcttggttggtaagctattgattattgccacaatttcagatcctgttattggtcttttcagagattgaacttcttcctggtttattcttgggagrgtatatgtgtcaaggactttatccatttcttctagattttctagtttatttgcatagaggtgtttgtagtattctctgatggtagtttgtatttctgtgggatcggtggtgatatcccctttatcattttttattgygtctatttgattcttctctctttttttctttatcattcttgctagcggtctatcaattttgttgatcctttcaaaaaaccagttcctggattcattaattttttgaaggtttttttgtgtctgtatttccttcagttctgctctgatcttagttatttcttgccttctgctagcttttgaatgtgtttgcccttgcttttctagttcttttaattgtgatgttagggtgttaattttggatctttcctgctttctcttgtgggcatttagtgctataaatttccctctacacactgctttgaatgcgtcccagagattctggtatgttgtgtctttgttctygttggtttcaaagaacatctttatttctgccttcatttcgttatgtacccagtagtcattcaggagcaggtggttcagtttccatgtagttgagtggttttgagtgagattcttaatcctgagttctagtttgattgcactgtggtctgagagatagtttgttataatttctgatcttttacatttgctgaggagatctttacttccaagtatgtggtcagttttggaataggtgtggtgtggygctgacaaaaatgtatattctgttgatttggggtggagagttctgtagatgtctattaggtccgcttggtgcagagctgagttcaattcctgggtatccttgttgactttctgtctcgttgatctgtctaatattgacagtggggtgttaaagtctcccattattaatgtgtgggagtctaagtctctttgtaggtcactcaggacttgctttatgaatctkggtgctcctgtattgggtgcatatatatttaggatagttagctcttcttgttgaattgatccctttagcaggatgtaatggccttctttgtctcttttgatctttgttggtttaaagtctgttttatccaagactaggattgcaacccctgcctttttttgttttccwtttgcttggtagatcttcctccatccttttattttgagcctatgtgtgtctctgcccgtgagrtgggtttcctgaacacagcacactgatgggtcttgactctttatccaatttgccagtctgtgtcttttagttggagcatttagtccatttacatttaaagttaatagtgttatgtgtgaatttgatcctgtcattatgatgttagmtggttattttgctcgttagttgatgcagtttcttcctagtcttgatggtcgttacattttggcatgattttgcagcggctggtactggttgttcctttccgtgtttagtgcttccttcaggagctcttttagggcaggcctggtggtgacaaaatctctcagcatttgcttgagcagactctattttcaagagaagtagttgagtcttaggagtctgcagaaactacttttacctctgaagacatttgctaatatgttgatgggatataatttaggaacaattagtgtttacattttatcattttagtttgaatttaataatagcataagctaacactgttatttaatagtgtacgtaaatgctaactgaatatatatgtattcagttacttattctttatatcttacaggcaaaaaagatacaacccatgagtgcttactttttcgggttgtaccttttttgcctgtaagccataaagagtattttattaaaacattaagaaatgttagtctcattaagtagaagagaagaacataattcttatgtttaagccatttagtagtgggaattgaatgtagtgttcagaaacgttgcagttagatccactcttaatttttctcatttccttaaatttcatggatatgcatattgagctattttcgtattcaatctcagctaaataaagtagcgcaaatatgcatgactgaaattaccttytataaaaagttccaaaagcatttgaaaaatatcccacgggtgataagtctgtaatattttactttattaaaatgctgtacctggcttctgagtggttatctaagaagaagraaagaatctacagtataatgagagttaaccatgttttgtccaaaatgattttgaatcaccgttsggacagatcttgaagactagtggaaacttcaaayggcagtatcgaacttctgttccttttggggttgttgagtatatgaagaatattatttttctgtgtctgacagtcggtagctttgacatkattatagtgaagtataatttagatgttagttttaactataatagactgtaactccttgtattttgggtgctgtagarattacctttccctttgcatgtacgtgacagttaagatctgaagaatcttgattaatggttcttggatttatgtttaaagaaatcaaggatgggcatttttctcatctccgtctttggcatttgaaacartatacaggttgagtattccttatccaaaatggttggaaccagaaatgtttcagattttggattttttcatattttgtaatgttttcatacacgtaatgagatatgttgggatgggacccaagtcttaacgtgaattcatttattttttatgtatatcataaacatatagsttgaaggtaatttaatgtaatattttgaataattttgtgcattaaacaaagtttgcatacattgaatcatcagaaagcaaaggtatccctgtctcagccagccacgtggatactctgtggtgtttggcatcactgtcattcctgactctgaatttgtatgctactgataaacaactcttttattagacttactcacacatatgtacttaacagtgaaaaaaatgagttcagagtaactaagcagcataatagcatcaaacaatggcaggctttcatactttacctacagtgctgtttttgttaaaaggttactctactctgtattttattttttttaggtaagaagaaatattggaaacatttgagagatcaagaaatgggtcctctagggatgaggagaccttctgaataaactatgtcctgtgttcctgcattttgacagcaacccatcacataaggccacttacggaattttctccttgtagtgtcatgtcagtgctcaaaaactttcagatgttggagcatttcagatttcagattttcagattagggatgcacaacctttacaaagggcctttatagagattttaaatatataacttgttgtctactgagtaaaagatgggctgcttctgtttttctcctaacartattttcagcttctgtactaaccagttccagatgttccacgataaagaaatatttaattttcatatgaaatttatgaaaggaaaatgcataggagggcattttagcaaaacaataagacaaaacagcttttgacagttggtttgctattaataagtacataggagtacacagtaaatggaaggctcatttagacccttagaatttttcttagcagggggccctttacctgaaatcatggtactagttttaaacttcatgttcttttttgtaaagacatttaaggcgatcagctcttttcaaaattaggttaatttttcagaaagaaataatatatcaaataaaaggaatattatggtgggttcagatgaattttaattgaaacataagcaacagaaaattttaagattcttatatgtggaccactttgtataatgtgcctacaaggtaaagattttgtggtcatctgaattttgggagaagtaattttccaagaattaatacttaagctttttgaatcacagttttgtatacccmatttcattatttggttctgtgcgatatagaatgttcaaggctaactataatcatttttgtccaatttgttttaaagagggttcagcagctccaggaatggtataatggtgaatgatgtttccatatcaatacagatctacaaatatgagtatatttgaagaaaagcaaattcatattgaatttaaaggcatataaattggatttcttttccattcatggacatctacttgtataaagaataaaaattacagtttgaatacatccaaaaccttttctcttaccraatttcaatactcttttctaacaatgtcttagaattttgtagtatatctattcctccsctagataagatctgtagcacacttactctcttcctccctgttactatcctagaatgcttttgtattttaattttagattatttccttttaaaattatgcataaataattatttaaatttagcttcctactttttggacactactattggacaccaccacatctttttttctctggatkgatttttttttgttttactggagttgatcatttaataattcttagattgtatctgaaggtattaaactagcctgtttttgcatgactgaaaatgtatatttattctcacttgattgctgattagacttgacatagagtcctatgtttaagtcattttatcttagatctttgaaaatactattctattgacttttctgatattgctaaaaagatttctgatatcaatataatttttgtaccactgtagatgaccctttttcatcccttcgtcctctttctttctctttggaagattttggaatttttatccttggggtttgatactacgctaggatgccatattattaatgctttgcctcagctgcctctccctgcacctctgcttttgtctgaaacccgaatctacctttagctaagggaaattttcttctttcatttctgtgattgctttttctactcagttccgttttattctttttttcagtagctactagaacttctagatctatcctccttttctcttactttatatttcctcattttgcaggggattctgaataatcttttgtctttgtcttctatctcaataattttatctttagctacgtcctttaatttttttttttttttttttcctgagagtctcgctttctcacccaggctgggatgcagkgatgcartcttggctcactgcaacctctgcttcctgggttcaagtgattctcccacctcarcctccagagtacctgggattacaggtgcacgccaccatgcctggccaatttttgtatttttagtacagacaggatctcaccatgttggccaggctggtcttaaaggtcctttaatttttcattttcttttttaaggctttgtattgtcattattttgttagtcatgtttttaattttgtagcagtcttttccataattgtttttttttgtctgtgtgctatcttttcaaatctcactgagaattacaattatatttaacgttttcctctgtttcttttactctgctgagtgttatttcttcaatatgttaagtttggtgactttcttgctaatttttcctcaagtgtttggtgatttttggttgtttgttgtttgttgaatagttgagagcctaggctgaacagtcttggtggctggagggtatttatttcatcagcccaaatgagaatccctttttacttcttgtactatgtagattctcattacagaagccttcatccaataactgcagggcaaaagaagtgggtgtggctgggcagggtattcccggttgtagaagtttttcacctgggtttcggactacatttccataaattggctgctaccttgttctgtttctctaatctgggactctccatagtcagaaattgcatttgggagaatgtactcctgcttttgttatttattgaccatgagctttgagtttctctgagcctctatagcagactcacactttcttgttttagctgcaggtttctccaatgtgattttgcctttaaactaatcacatctcctctgatttgtgtttgtttacagagcttcttcaaaatttttggtctgcagtggtattattttcctgcactatcattctttcttctttttagtaatatattttatatggaatttgaggggaaaggaaagaggtaaatgtgtcctcattggccatccattcttttttaaagtaaaatgtaaaaatacagattttgaaattaagagaactaagagatgatgaaaccatttcaatggagacttatcaacatattatgaagggaggaaaatgtgctgaatattgctgatgtttaatgaatttagaaaggacatttatttagcattagcctctgtcaccaatttattatttttccctgtggaaactaatgactttggagaaatttcttgggtaatgtttattgttagtcatcctgtttaagaacaacttgcttaaggtgatatttttatttcatkgtagcaaatggattgttttgacatattcagtrtggacccatttaaagtaggcatgttattttcaaaagtgccatggcatgtcagtatcttgtaaattctaacttaaccaatattaaagaagtaaaccttcatgtactttaatggagatcacaaaagracttcactgtcttgttctatgcaagatttagtaaaaacagagtattaggtgttatagtaatggtcatgcaaagcagtagctcatctgtacaagaaaattaatggtcttctaaaatggccagagatttgtttataacttcattttaattaattacatttttggaaaatgagttgaatttaagattagaccccaggcttgaatttgtcatattttttataatggtattttgaaacaaagtttgctaatagatgtttaaaagagagtaagaaaatatttacatagggtttatttgtggagtaagtattgtgtctttgtcattattcaaaaatagaaaaaagttgtgaagcaacatgttctctttgtgaatgttgaaaattactaacagatctgtgcgattggttttgtatgccttgtgaagacttgccaaatttgattttatttttctcttttacttttttctagtaaagccaagtcctacttgagagacatcagtagcctatggaaatttgttgcttttctttgaaaagtgcacctgcatccaaaactgagtaaaaacatatttcacgaagaaaactataactaattaaatttctcagtactacctaatttgccaatataactagttttggttaaaaagaagttgattataatgttcataactgtatattgaacagaaaaactggatgcaatcagaaatcataggtgtagtcaaggagatgaaaattgtagatgtgaccgttgctatttscttttaaggtttcctaatcttgcctagcgtaatgactgagttttatgggtatttggaggattttcttgttccaggtggtggtcrtcctccttattttattttttggtaaggctaggagtaatgtagatgtgtattcttctcataacttagtaaaactcttttatcaaattggtcagtgcagcctgcagctggggacttctaaaaacatrttaccatgactagaaatttttatttcagtgcacttacttgacatctttctggttattattgaccaaaacacttgactcctgcctcttctttctttttatccattttgttgtccttattttgcatatttttgcatatgtacagatttctggcttcctcattcctatcaacaaccagaataacttttagtggtctaacttgtatcttcacttatcaacttaaactgttctttttgaaatgttaccagtgggttcagtgctcctgtctctgttctctgtctctggatctctcttcaacctttggttccactggccagccattcttaactgtttcggtttcagaaatattttttccctttagttttataataataattagctaatttttcttgagcacttactttgtatctttgactattctaagcactttacatgtcatatgatctttaacacaatccttagagatctaagtttgtattattttttccactttcagataaagaaggtaaggcacagagaggttaattactttgtttgaggccacactaataagtggtagaatcaggattcagacacaggcagtctgactaaagagctggtacttttcctctttagatgctatactattctgatgagtgtctcctctcatctttttctgtttggatctagttgtgtatattttcatttgccctacacttacctggttaggttaaaatttctacatccctcaaaactgctgaagtatcagttaaaaatatagttttcaacagaatagaagtttaatacatgttgtgaaccaatttcttcgtgttgccttttgaaattaaatttaaagagagcagtcattaatggctcaaagttagacctaagaggatttataggtgatgtgtatatgtgtttttgttttatccatcattcttcagtttcttaattaccaatactataccaagacaaatgcctgcatttcatcattaaccattaaaatatgattttcttagagttgaagattgaatttagggccagttttttcaagtacattaattatgtttaaatgtgtaagtctactcattataaaagtgaattattttgtaagtgttggttattaagtctgtgtattcccaagattttcagtctgaagtgagctgcagatacaatgcctaagcattttgtcctttgtattttgtaccagcaaaatgaaaatcattttttatagcctcattactcattcccaaaatgacctgaggtaccagttaggtccatttgcacaatatctggcaatatttctatgtcaaatatgttacaatctggtatttaaaatggccactgtaagtattatcaggcactattgttcctttttaaaaaacagtataaaatttgaaaacagtgctttggaaattatgtctttagtggctgtaatataaatggttaaccttacaaagggaaaacatgaaattgtttgaaattggtttatattggttgtcatgctaaacatattttttaatagtttgcttatttggtttgatattggttgtcatgatttaaaatgctatggttgtgtagaagttcttcacgaatatataagccgtttttacttacacatatattttagaaaatgaatagtttatatttttgctgttggaggactttttaaaaacatctatgaaacactaagatacgtctgaattggagctgaggactaagctctcatttatcttgcccaaattcctacataagggatctagagagtcatgccctacaaaccataaattctcatcagatgggttttatttgaccctatgtatcatgacttacttttcaatctgactctggcataacattacgagacaaggaaaaaatatttaaccccaaaatatatttccttgccataccttgaaattgccctgcaaagtctcttgtgggaaaaatccacatcttatagagaatcccctttcctctttgttttccttcctttctttccagatccaggcgataatcaactaagagccaggcacccttttaggtccgataagaaacattttacagcctgctctctctctgaagtctgctctctgagagattcctctgcccaataaaacttggtctccacaatcgtttttcttaacttgaacattcctttccattgatcccaggtcttgagataaactcgaccaattgtcaactagaaaatatttaaatttacctatagcctggaagctccccgcgcccctactttttgttctcctgcctttctgaaccaaaccagtgtatttcttaaatctatttgattgatatctcatgcctccctaaaaatatataaaaccaaaatgtaccccgaccaccttgggcacatgttctcaggacctcctgagggctgtgtcacaagccatggtcgctcatatttggctcagaataaatctcttcaaatgttttacggagtttgactcttttcgtcgacagagcaaaccgtacttcctgaaaagattaagagttagacagctagactttattcagagtgtgaacctatgtacctactatgtaaaatgcaagagctttagagcctttaactaaaggagtggcccctaaatcaagtcaaactcttctgtttcccaactacctcttgctgtataggakccatctggctctgctttctcaggtgtacattcttagaggaattttagtgattaaagtacaggccttggtgctgggggaagaaagagggttttcttctgcaggtttgttaaactgtaattcaggtcaaatttcgaatatacgtatgaaggcacaaaagtgtttaatattttagtttattccctttagtagttacaaaaattactgcttagtgaaaacttagcatcaggatatcccttcactaaaatctaggtctgtaatttgacaattcatttcacagcacctgacattactgttacattcactgtagcacttagcatgcaaagattatattttctacaactctcagtctcctctgttattggatgatgcgagcgcattaactacaaagtcatgtaaaggtcaagtcaaggcttaatttgaaaacagaagcctgagacccatccgtttacataacagacacagcactgtggtctcctgtgtgactgttaggtctgagcactgccccatattgctaatttctcacattgcttttcttaacattttttttctttaggagcttgatggagagatataccatttctgtcaggttttgcaaaatgtcttgagctccttgaaaaatagatgtcatgtaaatgcaaagtacggtcagttcttttagcctaagacattatttgatttttatagcaagtctattccatgtaaatgacatgcagtcatatagcttaccatgaatacgttcatgtcctaaaaatctcagatactgcctatattcagagtagctaacatttaattttgttttcatgtgttctttgaaaagagtagggaaaatgttttttatattattatggcttaatctctggatttggtcaccagtgaaatgaatttcatagcctcattctattacagacattttgtctgcttcgcaaaataacacaattttgcattattggtggtctgtgttcaagagacattacatctaaagagagctagaaattgcaatttaatactaagcaatgtgatgtgggaaaggaggccaactctccacatgctctttctgctagagcataatattctgcatattgacttttttttcactatccccaaaagtcaggatttttcattaagttctgataatactgttgaaattgaccttgattattcatgtaaagggcctctcagacaacctataggtatgagaatagctttcagaattrtaatcatatttaggttatatttaagcagtgatgttacacacttcccaaaaagtaatttattgggacatttacataactctgtgtacttaaatttatctacttattgcttatttaaaacattacatatgagagtttgtgttttccttactcaccattttccatacggctttattttcctcttagtttgaaaacttaaaaaaaattcaagttaacaggcatttattaaacatctgttgtattcaaggccctgggctacgtacatgtggaacataaaaaatgatgatgatgacagtgattgcaaacacttgcaataagtcctcatattgctgtcaagtaggtgctgttgttatgccatattacaaatgaagcagatgagccatagaatatttcataatttgctcaaggtcacacagccagtgatttsagaagactggcttaaaacacatgcagttcgacaccagagatgacactcttaaccactgtgctatactaaaatgaagacaagatcctacccttaagaacctttcatcctactagaaaagtggtaatacatattcagagaaaaaaacaaaaagaaaacagtaagtcagtatgtgttaggtgctgcattactggctcaaatatggaagacattggtgctcagaaagagatgtatttcttttgggaggtggggaaggcctcctggaagaagtgttttagctgacccttaaaaaakcggcaggattttgtcaagtgaagttaattagaggaagaccttctccttaagggggcaatgagaacaaaggcattgttttcaggaaaatgcagtgcccaaagttaatttgactatatgaaaaagaaaartatttatacctatgcagacctttgaatgtaatgcatgttttcatttaaaattagaaatttatataatttttgaggtattatggatccaaattgtagattttttaaaggttaagctgttatatttttctttttaactaaaggggtatatttcaatggaaaggagttgcccaaactgaaatccgcagcgatgctaaggaataacatttatttcatatgaaaatattgtaaaatattttatggatattgttttttacatctaatcttaacattatctgtaagctgaactttgatgcagtagtagtaaacctactttctacaggaactacttctattacactctttaatttaaatctctttccataacctgtcaatatttaaagtacaacaaaaggtagttgcactcmgaataaaaatttgttttcacagagaattttagcccattatccctgatgaacatcgatgcaaaaatcctcaataaaacactggcaaactgaayccagcagcacatcaaaaagcttaaccaccatgatcaagtgggcttcatccctgggatgcaaggctggttcaacatacgcaaatcaatgaatgtaatccatcatataaacagaaccaaagacaaaaacgacaagattatctcaatagatgcagaaaaggcctttgacaaaattcaacagccgttcatgctaaacactctcaataaattaggtattgatgggatatatctcaaaataataagagctatttatgacagacccacagccaatatcatactgaatggacaaaaactggaagcattccctttgaaaagtggcacaagacaaggatgccctctctcaccactcctattcaacatagtattggaaattctggccagggcaatcagacaggagaaagaaataaagggtagtcaattaggaaaagaggaagtcaaatggtccctgtttgcagatgacatgattgtgtatttagaaaacctcattgtctccagcccaaaatctccttaagctgataagcaacttcagcaaagtctcaggacacaaaatcaatgtgcaaaaatcacaagcattcctatayaccaataacagacaaacagagagtgaaatcatgagtgaactcccattcacaatggcttcaaagagaataaaatacctaggaatccaatttacaagggatgtgaaggacctcttcaaggagaactacaaaccactgctcaasgaaataaaagaggacacaaacaaatggaagaacattctatgttcatggataggaagaatcaatatcatgaaaatggccatactgcccaaggtaatttacagattcaatgccatccccatcaagctaccactgactttcttcacagaattggaaaaaactactttaaagttcatatggaaccaaaaaagagcctgcattgccaagacaatcataagccaaaagaacaaagctggaggcatcacattacctgacttcagactatactacgaggctacagtaaccaaaacagcatggtactggtaccaaaacagagatatagctcaatggaacagaacagagtcctcagaaataataccacacatctacaaccatctgatctttgacaaacctgagaaaaacaagcaatggggaaaggattccctatttaataaatggtgctgggaaaactggctagccatatgtagaaagctgaaactggatcccttccttacaccttatacaaaaattaattcgagatggattaaagacttacatgttagacctaaaaccataaaaaccctagaagaaaacctaggcaataccattcaggacataggcatgggcaaggacttcatgtctaraacaccaaaagcaatggtaacaaaagccaaaattgacaaatgggatctaattaaactaaagagcttctgcacagcaaaagaaactaccattagaatgaacaggcaacctacagaatggragaaaatgtttgcaatctacccatctgacaaagggctaatatccagaatctacaawgaactyaaacaaatttacaagaaaaaaatcaaacaaccccatcaaaaagtgggtgaaggatatgaacagacacttctcaaaagaagacattkatgcagccaaaaracacatgaaaaaatgctcatcatcactggccatcagacaaatgcaaatcaaaaccacaatgagataccatctcataccagttagaatggcaatcattaaaaagtcaggaaacaacaggtgctggagaggatgtggagaaataggaacacttttacactrttgstgrgactgtaaactagttcaaccattgtggaagacagtgtggcrattcctcaaggatctagaactagaaataccatttgacccagccatcccattactgggtatatacccaaaggaatataaatcatgctgctataaagacacacacatatgtttattgyggcactattcacaatagcaaagacttggaaccaacccaaatgcccatcagtgatagactggattaagaaaatgtgacacacatgcaccatggaatactgtgcagccataaaaaaggatgagtttatgtcctttgtacggacatggatgaagctggaaaccatcattctcaggaaactattgcaaggacagaaaaccaaacaccgcatattctcactcataggtgggaattgaacaatgagaacacttggacacagagagaggaacatcacaaaccggagcctgttgtggggtggggggaagggaaagggatagcattaggagatatacctaatgtaaatgacgagttaatgggtgcagcacaccaacatggcacgtgtatacatatgtaacaaacctgcatgttgtgcacatgtaccctagagcttaaagtataataataataatttaaaaagataaaaatgcttaaacagaaaaaaaattggtttttactgtcatgaatttttcccacgtttatgtttattaacaactgacacaaacaaaacctgtacagaaagtactctttattatacactttatttcaaagtactgaaatagtgttttatgatcatagtatttctagaggaaagattttctcccaagcctttaaggggaaagctaatccacttggagaaattttgggccacccaccaaacctgtgatttcctgccccaatttatgaaccaagttatactgagatcgttaaatggtgtgatttctccttrtgactttcacattttactttataggttatattgacttttagatttcaggtagtaaaataaaaaatcttatgcagttcamgttagaaaaattggattagtccaagtgatattttcacctggtattttttttcaggcatttcaatgttactttttattacatttataaaattatatgttttaaattgtatggttttcccttatctttttgaaaaataccatactgattcatctcaaatattttagcctcttcttaagtttccctttcccctcaacttttccgtaagcgcacaaaagaaagtattgatttttgccaattattttggttgctgaggttgtaagccatcttggtttgcttacatgtaggttattaaagtacccttcctagtctgacttgccagtcttacttctctaccttttgttagaggaataagggatgaggatgagagaattaatatatattttttaccccatttctgcatattttaatcccatctccagaaaccaggttaatttcacctctgtcacaaatttgaaaggaagggaaaagatgtattaattgccatttttattgttattttctgactttcaagccttctaatctaaggttagtaaatggacagcatttaaaaaaaatattcttgttatcttgacataatgaagaattatgtttttgagtattttgtccattgtttcttatttcctactttacatttttatttacagcaaggttttatccttttactaaagggaaggagatgggwtgaatggcagactttaactggatgctttatttaggcttttsgaaagcaaaaaaagtttatacattgttacagctgggtgttgggttacaggctgtttgttatattcatgtattagttcctgttattttaacattttaaatatttcataattgaaaaaggaaaaattagactgggaccagtttatagaaagctttaacttctaggcaaaaaaggtagaactttacagttggttgtggagaagatattgactgtcttttgtagagagtagcatttcgaaaaactgaatttggcgtctgtatttagaacggtctagagaatggagatactgatgaaaaggaatgttagcaaattcagcattctgatttctgaaaaatgagtgcttagattaggtagtggcatggggactagaaagaacagggatgctgctgctttgtataatcattcccattatataaaggttatatataaattaggacggacacggtggctcacacctgtaatcccagcactttgggaggccgaggtggatggatcagctgaggtcaggagctcacgaccagcctgacgaacatggtgaaaccccatctctactgaatacagaagaattagttgggcttgatggtgcatacctgtaatccgaacactacttgggaggctgagacaggaaaataacttgtacctgggaggtggaggttgcagtcagccgagatcacaccattacactccagcatgggcaacgagcaaaactctgtctcaaaaaataataataaagattatatataaataaataaaatcacaccatttaacaatctcagtataacttggttcataaattggggcaggaaatcacaggtttggtgggtggcccaaaatttctccaagtggattagctttccccttaaaggcttgggagaaaatctttcctctagaaatatatgatcataaaacactatttcagtactttgaaataaagtgtatattaaagagtactctctgtacaggttttgtttatgtcagtttttaataaacataaacatggggaaaattcacatgatagtaaaaacaattttttttcctgtttaagcatttttatctttttaaatttttatatatttaatatataaaatatatataaaatataaatatatatttatatttatgattatataaaattcctatatctttatattatcatttccataaccattttagtaagcatccccaaatagaagttagggtgtattactaattctgcttaatatactttgtatacttttgtttcctatctcaaatctagtttctattatgtaagtataagtaccctccatgaattgggttaacattctaaaccatgaccagactgagagcatgacgactaatgtggtttttactcctaagctaccagtatggaagatcaacatttaagaaggcattagtcatctgtgctgctgaaaataatggtttcacattagtctggaccaattagaaggagcctatgtctacttggaagagtttgatttgcagcatagtccttggctgcttctacaagacttggcaaacttttgtttaagtcagaccctgcttaaatgtctaaaaggaaactcttaggccattatttccccctactttacataatattgctccatacaaacattccacttttacaaaatcatttactttttcccaactctgtgatacaaatgagttatcttttcgtaaccaccaacctctcagttttatatttgttagctcagatctgacatgaaagtaaaaattacttataaccactttgggattacacaaatttaacctgttcccatgttgtattcagtcctctgtgaaatacgagggtacttcaaaaaggtcaaggaaaaattgaattaaaatataaaaataaaagatgcaaattttatttctcaacataggctccattaaggtcgagacacttttctaagcgataataccagccatttagtccatccctcatttcttttggaattgaggaatttagccatgtcagtgcagtctttttgtaccttactaactgaaaaaaatgggtattctttatagatatttttaagatcaggaaataaaaagtcagaggaggcaaatcaggtttgtaagggggatgcttaatggcttcctattgaaactcttgtaaaattgctctgtgtgattagaggaatgagcaggagctttgtcgtagtggaggaggactctagtgaagctttcttaggtgtttttctgccaaagttttggctaatgctctcaaaacactttcataataagcagatgttatcattctttggcctcccagaaagtcagtaggcaaaatgacttgaacatcccagaacactgttgccataacctttgctcgtgactggaccactttcatctcttggtagccattgttctgactgtgctttgtcttcaggatcatactggtaatgccatattacatatcctgttaccattcttggaagaaatgcttcggaatctttatcccactcatttaaattttcattgaaagctctgttcttgtctgcagttgatctgggtgttgtaagagttttggcatccatctagtggacagtttgctgaacttatttctcaatcacaatcgtgtaagctgaaccaattgagatgtctgtggtgttgkctctggtttctgctcttaatttcggttctcttagggcatgaacaagattatttttttcctctcaaatggatgtggatggtctgtcactgtgggcttcatcttcaatgttgtctcgtcccttcttaaaacaagttatccatttggaaactgctcatttcttttgggcattgtctccatcaagtctttataaaacatcaatgatttcaccacatttcacccacaattcatcttaaatgtgatgcttgttcttgcttcacttttagaagaattcagtttgctctgataggggctatttttaaatgaatgtcctatccttcttagtgcctcaaactagatcctgttcagacatactgtaaaaagttagtatattttggtgcaaaagaattttgaaatccatgcatagttttttcrtaatatgcatttttcatgagctttttgaagaaccctccttgtaatgtatcttaattccctattccattaaatctatgattttgaaccagccatatgtgacctgtaatcaaaaagtgatgtttgatagatgctgtcaccattctgtcatttttcctcatccaagatagaagatgtcttcgaaagctttgtatatgttccagtcctataaaacaattctacaaaacaatttcaagttcaaaattattattgagaacttttaaacaggatatttagaagtttgttttattaacttggcctaggtcacaaaactcattaatattaatgactagactacagaggcatgtagcctgtctaaacattaacagatacaaaacattaaaccaaattgtgaagcttcgttatgctatgagtcatttcaggcaaagaccaatatagcaagcaaaagctgaacagtccagttgaaatgtttctgatctaagcctttgacttctgtttgtagatgaagtggagttttgaaactgacactcaaattttttattgacttcatatgaataaatgattcattaaaatataatacttggaactaaagtcatcattcaaaacaggcatttattattaataaactacagaaaagagaaaatttgagggtacaatttactttttttaaagtatcttaaaattgcatttattttctcttagagaactttagatgatatcagtcattactaatgtcataaaatgtatgtaaatatgagctaagtgatgtattttatttacccaaagatatgatctaacagcctctgcaactgtcaccaacctttcctataaaacagcaatatattaaatgatagtgaagagggtctgaaatttcaaccttgagatgcacttacactgtattcagtacagcagatttatacttctacttatatatcaacaacaggtctttctaactggcaagtcttgtggtaaacatgagaaatatggatgcttattaggtcacttttggtaaatagaactaataatttgagacatttgtctacaatagagtttggcaaactttcttctgtaaarcaccaaatagtaaattctttaaatttgcagactatacagctctgctgttacaacacaaaagtaggcttagacactatataaaagaatgagtgtggctgtgttccaataaacctttatttacaaaaactgaaagtaggtcagatttttcccaaaagctgacagcaggtcacacttggcctgcggactatcaatccctgagctacatttgcttgattttcttactgtatactcattcctctgttcagctgggcttggcttttccccatcactgcaccaaaatacttttgccaatatcagtaacattctcatcattgaattaaaatgaacacttaccagtccttgtctcatttggattcttgggagcagttgacattctaatcaatctgtccttaaaattttttctttctttagtgtccctgacctacctctagtttttaacccacctctcaaggcagtctcttaattattggtgtgccttaaggatttattattgatcttcttgacacatttgccttaagcagtactttgtgttactatagctctaatttctgtctgtttttctccctcctgagcactcttaagtattaatctgtagcccagattcctaatttaaatactgagtttgtacatctaatggcctgctggtattttctacatgcttatccaaagatacttggaaatacctgtcttaaactgaacttgaaattcccaacctctatttcatccccaagattacttccctcaacccccattctatctcaatgaatggccctacccatctttcacttgcccaaggcagatacttgtgcttcatctttgattcctaactcttcatctcacccatgtctttcattgaaagaatcagttttgtggatgtacctccaaaatagctcttaaatctgtatgtgttatagtctgttgcttctatgctagttcaagccaccatcatcacaaatttaaattactagtagactgctctgcttttccctttcatgttctcttttgctggtgggaatatcccccatcctgctttattcccaataatttatctttcaggtatcagattagatatcagttctactaggaatcctttattgactccagaatgtaggtgtagtgtttgttctctgtgccctatactttgcctgttagggcaaagtatrtcattttgtaacctcagtttatttgtctctattggactcgtaagctcaaggaaaacaaagattgtacmcattgtcttcatcattgctgtaaccccaacamcctagcgtgttgctcgtaaatctatgttgaaaacaagtgaaattagtctcaatatccataaaatacaccatgttctgtataaatcaaagcaccrgaacatatctgatggcttaatttgcactcaaagtaagtatataattagaaagttgaataaattaatgaaataaagatgtcatacttcacaaagttktatgtagaacatcagatcctaaatcataaggcataaactgctaatggccagatttgcttcaccatatgttaatgagcgtacaagtaatcactgtgcttataagtaatataagtatcccctattcttatttaatcctggctccttttagagggaaagtaaagaaataaactgaaaaaaaaatgtatatatatatatatggtactacccttgaccttaaggaacacactatgttttggaagccttcattgtaaaatgatcgtaagtactaacacaggtattcttactgtgctgtacagcaccaaagcaagcagcaggtggataggagggggagaggaaatcaggcgaggttttgcagaggaggtaacacttcagaagagtcttaaagtatcagtaagacattgscagaaagaaaaataaaaattaatttcaaataaaatatatataagcatgtgaagcatgattgagaaatatcttcttttttttcttcttttttgagatggacttctgcttttgtcacccaggctgtagtgcaatggcactatctcaacttactgtaacctccacctcccaggttcaagcaattctcctgccccagcctcccaagtagttgggattacacctggctaatttttgtatttttagtagagacagggttttaccattttgccaggttggtctcaaattcctgacctcaggtgatccacccacctcagcctcccagagtgctgagattacaggcatgagccaccatgcccagccgtatcttcttaattgtcaaaggaaaatcaaagtgtgttagtagcattatcatatattatgtttttgtgtcatacatgatttttttattctaaattttaaaatctaaccttaattcagttatttaaattaagatacaagccttgctaaacagaatttktactgatacatgctacaacatggatacatctcgaaaatattatattaaatgaatgaaactggtcacaaaagaccacatatatgatcccatttaaaattgataggatttccagagtaagcaaatctgttagaacaaagtagattgctggttacctaggaccgggagaggagggagcagggggtaagacaggagagttggtggataataactaaaggacatagggtatctttttgggatgatgaaaatgttctaaaattaattgtggtgatagttgcacaactgtatgaacattctaaaaaccattgaattatgcactttaagtgggtgaactgtgtgggacatgaatatttccataaagctgttaccaaaaaatataagttaaattctccagtgttgttattttcactaagttatgaaaaaaacccatgttccatcctttatttaggtatcattgtacaaactgaactatcagctgttgctgcattgaattcacagtagtacacaatagacatatttcaaacataaaataaaaccttattagctccagatatactaaggattatagaaatatatcaactcatttaaaccatgtactttttagaatatgcatcatttgttcacttgattccaagaagattttgtgaatcataatcaggtaattaggttagcagagaactaatgtgcatggaaaaatgaactccagtttttatcagtcatatttagttggaagagcctcattagaggttaaaattttcttctggatagttactgccttaaattaaccacatatcttatcaaattagttattgtacctgcctgtctttaggaatttggttccacaagtgttggaggtaaaatagcatgtttcctattattatgctgcagtttacaatggattttcagttgcctgttgtatgataaactcactgcccttcataacttgaggtaaatgctgaacttgccctttttaatttgttgaaacagagcttccattcactgataagaagtgtaaatttaactaaattgtcaaattaacctcatttaggtgcacacattggttctcttttccttgaagacttacgtgacagcacaagatagagaaaaattaagcctgcacatgttttcagttacctttttcttactctgtgaattacattaggttatttcattcaggatgccaaatacatagtagctcctgaaagtacaaatgcatcatttaaatttctgtctatgaatctaatgcagtcattttataaagaaaagagaaacctaaatttgaatgttgagatcataatctttaaaactacacactagaaacaatagaatttcaatttattgtttaaaatttacccagaatccctcagccaagatartaacacatgtcttgagaagttaaataatgtacctattacaaatgatgtttcagtcatcagatatgtacttatccttagaataaattataaatacttagaaaaatataccattacctatagtattgagtacagaaaaagctccattgtttttagctgtcaatgctcttttcaacctagtttctcactgttaaaaaagcttcaaataatcatattcaaaacctcttaacttgctgattatattcagcaaccatagctaaatatttcagtaccaaagctgaaaaatcataatggcatatcagcacacacataataaattatggttaatgaatactatacaaggtgtgttttgattggctccaagtttgtgatctgctcatggatagcacattgtatttttaagaggaaggaaaatatagtgatgatatgactgccaagcatattgctttacactgaagcaaagtggtattttagccaaactcaaaatgtaacatatagacaacaagtcaagtgacctaatagccaaaatgaatatatctaattaaacatttcatgaaaatatttcatgcgctctcttatacgatttttatactgaataaaggtttctggtcaaagacagtttgttatgttgacagctaaaactgttgtatgttttagctaaacatgtataaaacacaaaagcatttgccttaaccagcttgaggtggggaccttcaagtgtgaggtgctacctttttaagctaactacagaataaatacttagagtgtaattactatttagcccatatattttctgagtaaacaagacttataagacctgtaagactactaccattggggtcaaatactacaatataattagaaaatattgaaatcatttagacaaaatccacttattctgatattttccatatccaatatttttttccttcaggggaaaaatgacttgatgtcaactgaactatactaaaagatctagctaaatgaaatcactggtgtatgcatgtatgccctaggatgtgcatgcatgcaattggaagcactgttgggagaacacaagagacaacatgaaaaaagacccagagagaagtatgtaaaaccctactggtacttccgtactgcctggacatgcagtgcattaagaggatattgagagatgagtccgtaggaatcatgggccagagtttggaagtcttgaatgctatgctaacaagtttagagtttttgctgcttacattcttaaataggtaatcattttgttaaactgtacttttcaaaaattaaaagttattcgattgatttaacactgggaaaatgccttttgttgtgtattccatgtatttgttgcagttgtccttttgtaacttttatcaaactttgatgtaagctcaggagtttccgtttgcccagtgcccttcttaaagaatggggacattcctgtgaggttttggaaactgctggactgcataatattttaatgaagtctttggaatcacagggcttgaggtagcaacagagatcagctgaaattyaggtgaaaatgataattatgtagtatattcactggactaactttttttatttgtttcatattagaattttaacctgaatgaaacctagctttttaacttggcaatggtattgcattgatgtttgtaaaatgctcacagtggctgtgaaaattttgttggtctaattggtgtaacagatacaaagagatttgattacattttttcagaccatttttgagaaattgaagactttaaccttgcattacctcttattattaagacagtgtgacaccccatccgctatatttatcaaaataccctcagcaaagcttttaaatatttctgtatagaatgagttactgaatggaagtaattgtgcaaactgattaggacataggttctatgtattatcttgatatacaggtgaaagtgctatagcgatctgaagttaccacagtaatgcaatggcaagaacaatgacatgtttcacttttatgtattttatgagttatttcaccgttatgggcgccattttcctcatctattaaataagaggattgggcaaggatactgctgaagtgttttgttactgacatttcgtggttctacctacttccattcactagtttaacttgcatacataggtgtacttttcaacattcttgaatcatagaattggaaagaatcttgggtagccaggctgcctcacagaaaagtagaaatttattcattcactctgcctaggatgctttgcttgcactttctcaggctggtgccctttgagccagagctggttgtgacatcaattattatccctttggttgccaagattgatttcatggtttggagagatgggaagagaatcctattctccctcgttgccccacgtacagttcttcccaaatttgggagcttagttataaaaggcaacctgcagacataaagaaggatctttctttggttaaacgtctattccttgccatggtacattcatctttgtatcatgagcacttttctygggcagcacatgttactcttaaatgtttactgaatgactgaatatagtggatgacaraaatractaacagttgtaaatgtaagtagagtttcatggtttatttagcctatggtggagctgaaattatatctctaggtttttgaacaatgatgcttagtaaagattgtcaacaaataataatagagatattggaatatgtttacaatcatctataattatattgttatagagaatrtatctgtrgacatatttaataaatggtgcctaatgagttttgttttataaactcattcagtaagacttgaaatattatttacattttatctctgccttttatttctgtaactaaraagaaaacttcctctttaagtacctaccaaagtatttttacattcaacttggacaagagtttagtactatttcttttactgaaatattctatctcctgattttctagttgaaaagataattgcatcatttctaattctgatatccaatttaaggtttaaagctaagcartgtaaatttggtttaattcttayctagtttatatctgtattatttagaggatatttctgcttgggtaatttgtgaagaggttaatgcatttctgtcttgaaaaatgtatatgtgttcctaattcctaactaatgggaaaacagagggtatttttagtgtcagctttcatcaagtcagacctttctgaagaccttactgaattctatttccatgggaattttgctaatgggtatgtgcaacattatctaggtactcatagataggattacaaattaaaaataaaaaggaatgggtggtgaacaaacacatctttcttttcttttaagaaattgacagaatattaatctttgcactttcattttcactttcgtttcactttgcattgtttttagattaggtgcagaaagtccaagtttggtactaatgcatgagatcagcatagacaatataagtaatgcatttattaaggaagttcttagttgtaatcttrtatgtacaagcagaagagagaaagtcttccagtttctctatatttagttaacaatattagtgacttcaatgtgttttacaggaaaatggaaaatttaaaaataagccatccagttgtattgcctgtatactcgtttactgatttattttgattcatgtaatgcatgtgcactgtacatgtcaaaatactgtgcagaaaacgttaatgaagctggtgatattcaacatttattgaacacctrcataccctggatattggaatttccttatggctcagcctcaggctacctctgttttcatactactacttttttttggtcccatgtgatctgggaaaataccttcttttcctgggcaatttcatgtactttcatggttttaaatatcatcaatatatcagtgactcccaaattctcttttctggctctccagacatatattgtcaaggaaatcttgcagatatatcaagctaattgtgtctgaaactgtactttggatcctgcccttcttcagatctgcagctcttaagaatttctaatctcactcagttccatccctccagcttctgccagaaacctgagagtcatttttgactcgttttattttttcactacccttcatcccaattcaagtctgtcatcaagtgctgtctcatctacctctaaacattacctcagaatttttcacttttctctgtcattgctgccatcacatttgatcaagccactgtgtcttgcctggactaatgtagtttggagaaactccaaactggtttctccatatacagttcagccagttctaattcatttccaaataaaagccaaagtaagttcttaaatatgtaaacataattatatcactcttatatctaaaactctataatgcttttacattgctcttatgataaagatctcttttatctatcccagaagaggtgtttggtcttaaattagcttcctagggcgaccataacaaagtaacacaaacgaggtagcttaaacaacagaaaattattttatcacaattctgtaggctagaagactaaaatcaatttggtttcttctaaagcatctctccttggcttgtaaatggttgtctttctctggtgtctttgcatggtcttccttttgtattatctgtatccttgtctcttattagggataccattcatttggattaggggccaccctcattgactacattttaccttaattacctccaagctctgtctccaaacaaagtcacctcctgtggtactaggcgttaggacttcaacttaaaaattttgagaacacagaattcagaccataacagagcctaaactcatagttgatagacgaggaataaacatgtacacataggagcagagacttctggtgggttttgtgggaactaagcaagttagattagagaagattctgtagaaccaagaatggaagactaagaaaaatgttatcctgctttattctcccttaagcaggtatcatttgcagtagcctccaaaacatcttacatataaatgcttttatctcaagaggaatcatgcaatactgcagatgactcagtaaaaatccatcacctctcctacaaaaacaaccattctacctacaacaaaaacgatgacagcaataaaacaaaaactctaccttatttactgacttcatctttatgttttaaaacttattcatttgtatggaagggtgtgtatgtatatcaatatcttggcctatctagctatcacaaaataacaactttttttttttttaagacagtgtcttgctctgtcacccaggctggagtgcagaggcacagtcttggctcactgcaacctccacctcccgggttcaagcgattctcctgcctcatcctcctgagcagctggaattacaggcacccaccaccacgcccagctaatttttgtatttttagtagagacagggtttcaccatgttgtccaggctggtctcgaactcctgacctcaggtgatctgcctgccttggcttcccaaagtgctggtattacaggcttaagcctsaaaataagacctgttattttgaggcctggcctcaaaataacaactttttaaccaaatctgatcaatgtttcgtattagtcttactgcataatggcagtatccattgatactgctgttaaacaaccaataaaaaatccttccagaaataatttatattacatatccagttattatattcctttgaaagaattcctgttacaattatcagcaaaggccaggtacagtggctcatgcctgtaatcccaacactttgggaggctaaggtgggaggatcacttgagctcaggggtttgaaaccagcttgggcaatatagtgagaccctgtctctacaaacaataaaaataacttactgggtgtggaagcgcacttctaatcccagctactcacaggctgaggcaggaggttcgtttacacccaggagttagttcgaggctgcagtgagctgtgattataccattgcactccagcctgggcaacagagcaagaccccatctcaaaaataaacaaacaaaaaagaatgatcagcaaatttaatttctttaaaatcttttaacctaaaatccaattttgcattatatgaaaatatccttgtatctggtttctggaagaatggagatgtaatgtcattaacttttatgctaaagacagctatttttaaaaactacgcacagtatcatctaaaggattgtatgtgtgtgtgtatgtatgtgtgtgtgtgtgtatatatatgtatttagatagatatactttggtttaattcaagatagttttggcttatggatgacaagatgtggatgtgttttcataactcacagctgtcgtttatgccataagggtaattctyttcttattcagtatgacataatatgctacattttattatccagactrtctttctgactcygaggaaaaaaataggtccaaatagtcaaattccattatctaatgacagtggtaggcaggaagcacatggataattatatatacattgtcagattcagcctatgaaactactttaaccaggagtttctacattttccaccatgaagtctgttgttagagttgctactgataactaagatgacaggtctgaatttcattttattttctctttttcttcccttaacaaagatactaatgaactatgagttgactcataggccagaagtatataaaattaaggacgaaatatgtagagcctagacaatccaaagagaagcacctttaatactagtaattgaactttcattgaacttaatgcatttcatatatctttgttgggtgggggctgcaactggtttgtgttcaaactgaagataaattgtttgaaaatccacttaattgatggataaaaccttctgtacattttatgacaggtaaaaaatgaagttagttgattctggttttataagcaaacttgtgacttcctagttatagtcctaaggaaagctgaatgtgttttcctcctaaaaatgcaatgactccagggtagcttttgatcaaacccactcctaatatttgtaagacctgaaacaagagtaaaaatggagacccatatcatacatgtaaatgtaaaagtcatttaaaaagctaccgaactcttaaatgtgctctatactccttacttgataagataacttcttgatatcttggaaagacagatttaaatttaaaatttttggactccttgggattctatgtcagaacatgataatgtggggagttggcccttggcctgccaccctttcctttttatcctgcacatctaagctccattcttacttccccacaaaacaactgccctgggccaccccttggaagactatggagtatatgctgtctacaaatagacatgaaacacttaccactgctgtattccccatggtcttctctaagtcattatggattgaaagagaaatggcaatgattatgacagacataagtcagatgcttttctgtatcaatttagatgattatgtgtctttccacctttattctgttaatgcagtgtaatacactaatcaattttcatatgctgaaccatgcttgcattgtagaaataaatactacttgtataatgatatgtagtataccatggtgtataaaccctttaatgtgctcttgactttagtttgctagtgttttgttgaggatttttgcgtcaatacttacggatattggtctgtagttttcttgtagtgtctttgtctgactttggaaccaggataatactggcctcattagaataagcttggaagtatctyctcttkttcaagtttttggaagagtttcaggacaatggatgttaattctttaaatgttttgtagaattgtccagtgaagccatctggtcctgggcatttctttgttgaggagtttttaactaytgattcaatctctgtattcattattgatctgttcatattttctatttattcatgatttagtcttagtaggttgtttctaggaatttatccatcttgtcttaggttattcaacttgttagcaaacagttgttcatagtggtcttttataacacttttttatttctatggcatctgttataatgtcctctctttcatttttaatgttagttatttgggtcttccttctttttttcttaattagtctagctaaggatttgtcaattttattgatctttttaaaaaactaactcaatttctwtgaatttttatattgttttttgatttttctatgtcatttatctctgttgtaatctatattattttcttcttcctgcttactttgaccttagggttttttttttttcctagttccttggatgtaaagttaggttgttaagttgagatatatatgtattttacattatacacttaacagctataaacttaaccctttaacactagtttcactccatcccaaaattttgrcatgttgtgttttcactttcatttgtcttaagatatttcccagttccagttccccttattacttatttggcccattgattgtatgagaatgtgtttaatttccacgtatttgtagatttcccagttttccttgtgctactggtttgtagttttattccattgtaatcagaaaagatactttgtatgatttcagtcttctggaatttaagatttgttttgtggcccaatgcatggtcttatcccagagaatgttccatgggtactcaacaatacatgttctgctatttttgattagagtgttccgtatatgtctgttaggtctaattggtctataaggttattcaaatcttgtttccttgttgattttctgaataattctgttcattgttgaaagtggaatattgaagtctcctactattattgtgttgttgtcaaatttcttcaatcctgccaaagtttgttccatatatttagattcatgtaaatacagtaagtcctcatataacattgtgataggttcttggaaattgcatctttaagcaaaacaatgtacagcaggcttttaaataatgtcattttgttcagtgtccttttatcataatgttgagggaaaaaatggctttgttgtttgtactttttcttaaagctgcagttttcaaaaaactgtgacaacattgagaacttactgtatttatgcaccaaagctatgaggtttggtgcataaatatttataattgttttattttcctggtaaattgacccttttgtcattatataatgtctttctttgtgtcttgtaatggttttttatttaaagtatattttgtctgactttaatgtagccacttctgctctcttttgttaccatttacacgggatatctttttccatcctttcactttcagcctatgtgtattgttagatctaaagtatgtctcttrtaaacagggtatagttggattctgttattttatccagttaaccagcctgtatcttttgattggggagtttaatctgtttacatttaaaataattaccgataggcaaggacttattgccgttttgttagttgctgtctatgtcttgttcctttcctctctcattgcctttctttgtgtttcattgatttttttttctagtggtatgctttcattcccttctcacttccttttgtgtgtattctacagatattttctttgtggttaccattgtaaatccataaaacatctcaaagttatagtattctatttcaaactgataacaacctaactctaatcacatatgaaaactttctcctttactgctccacttctccatttgttactgatgttacaaattacatttctatatattacatgtacattaatatagatttatgggttttgttttgttttggggttttttcatttaaatttcacatactaaatttacagtattacgtattactatatttttccatgtatttacctttattgagaaccttatatttttatacagctttgtgtttttgcctgctgtcctttcatttcaacttaaagaacttcctttagcattttgtatagattagctctaggtgatgaactcccatgrcttttctttatctgggaaaatgttaatttcttcttcacttttgaagaactgttttgccagatgcagtattcctgattaatagtttttttgtttttgtttttgtttcctttcagcactttgagtatatcatcctactcctttctggccttcaaagtttctgctgagaaatttgctgataatattatggaagctccctcatatgtgataaatcacttttctcttgctgctcttaagtttctgtctttgactttacacagtttgactataatgtttcttagtatggttatctttggattttcctcgttggagttctttgaatttcttgatctgtatgtacatttctgtccacagattggggaagttttcagccattttttcttcagataagctctcttatttttttctctcttactttcccttctggaatacccatcatgcatatatggacctggttgatattgtcctaaatcccttatcatctcttcacatttcttctttcttttttctcctctgctcagtgatttcagataacttgtctgcaagttcactgattcttcattctgcctaaaactgttgttgaatacctctaataagtttttccattccgttactgtatttttcagctccaggatttctgtttggttcttttttatagtttytgtgtttttcttgatgttctcgttttgttcatgtatcattttcctgattgttttcaattgttggtgttctctctctttttttttttttytttttttttttttgtgagacagtctcactttaccacccargctggagtgcagtggcataatcttggctgactgcaacctctgcctcctgggttcaagtgattctcctgcctcagcctcctgagtagctgggattaaaggtgcatgccaccatgcctggctaatttttgtatttttagtagagayggggtttcaccatgttggccatgctggtctcgaactcctgacctcaggtgatccacccacctcagcctcccaaagtactgggattacagatttgagctaccgctcccagccttcttttagctcattaaacatccctataatagttattttaaattcccagtcaggtagctgatagacctttgtttcttcagggtaagtgtcccgagttttattttgttcctttgattaggccatatttccctattgctttgtatgctttgtgatttttgctgggcattttgaaagacaactacctcccctagtctttgcatactggctttgtgcaggggaagaccttcactaataccccagctgggagttctagggcctctcaaatgttttctgatattttgctccctctggcacctgcccgtggaactgcagctctaatatgcctctcacctctgttttcagtgccttccaaacgctggtgctgggcgtgtgagtgcccttctttaattaatacagaaaccagttccttgggaatcccccagaaagccagaatgttggatgtatggttcattcttttatttctgtcctgagggaggagctctggcatggggggtggtgggttcttcttggttgctccgctattccacatgggagagaggcatgcatgaatacactgaacactgtgaaattcatttcctaccactttcattggaattccttcttggttttataatggtgtgggtgctgtagcatctcaactggtctctcaagttctcacaagggtattctgatccgtatattgttaacttggtaccttagtggtggaaagagggcctctagctttctagtctacccctatagctattgttcttttaagaagtatgttttcgaagttacatttcttctctttcctcaatgtaacattttaggaaacaccaccttaaaacaaagcaaagcaaaatatagaaaacaagaacctggcttgactgccacctttaggggtacatcagatcagttgtttacgtgctgattcagccttcattctctcctatctttttggatggaggtgagagtgatgaacttgtcttgcttttctcagaactttagggtaaacctaggcttatcatccttccttaactgctaggagggcatatactatgtatagatgatgctgattaaatctttggagctttaatgatgtgtgacagccaatgaatttttctaatatagtataaaaacttcatgattttatatcattcttaaaggaagaggctttaaagcagatgtacttcttttttcattttaaagcttaagtacttagatatatgagagaaaatgaagaagtatggaaatttgatcctgtacacttagcttcatgaagagtgagatgcattttctgaacatagccccattgactcttctggaattagttggagataatttggtttgaaatgtcggctttgtaaatagaaatggaaatcattaaaacagataaaagtgaacatagaaactgcgaactagaataaacagtatgttggaaatgaccatgtggctcaattttgcatcagttttctacttctttagttcatgatgcccattttatgtcatgtgattacagcagtgtgatcagagcagttagcatattcttggcattttctcctcattaactttcacttcttcagagggaccttgagtaaaataaacacatttgagcagtcttaagcaaattgtttgaattgtttcctcagtatacagaatcaaccaaaagtaggttggattgagttgagttgggtttagtttaatatcatactttactacagcatcatacatayatatacaatattacctagcatctgtagcacccataaaggattctctaatgcatgtgaagtaaaaggaaagagwgtgtttaagtcctgactttgaaactgttgtgttaattgtgaacttttgctgagtctatacattgaagaaggtaacactcagcatgttgagatcacaactgctagattagtgcttggaggcagtagctgtgctgatgtgaggcattaatggctgggtgagttcaatcagatatcctgcctccagtgtctttgtgtaatggtatttactagatttcaaacagactgctgagaaagatgaaatataatctcatgtattatctctgtcttgaaaaaattagataataaagttgttctcttactggcrtatgttttattaaccttcgtagagtcaacttaaaggacagatgtctgtagaattgaaaccttttgctagagtgttattaagtgcatttttgagttctaggaatcatggggttgagtagagcaggtaagcattttttaaaaccactcagaggacaatcttatgtcatattctgaggttagctggagagaaaaaatgtgatgtaaattgtgtgcaactacattctttttgttgtttttcttccttacagagcctggagaaagttcttgtggaattcagtcacaaggagttgtttgatttctataacaaggtctgtatttttaaaataattttctaatatgtggagtttttttcayaatattttgtttcattttatgaattcttatttttaaatgtcatattatggaactaagttctttaaacttcccttataaaagaccttatgtttcacaggaggaagtatagcagaaatgaagagaatttgaaaaactaaatcaggaagaaaaggaaaatagttttaattaaagcaataggattgttgctttaatataaaacattaagtaatgaactttgtgattcctagccacactgacactttaaatatatrtaatgtcaaatactttaatttctgggcccaagggtaaagggaaacatgcctttagagatttatctgtgagtatatttcatgtctctttctgaagactgattttgtaatccaggaaaatatactccctccaccccccaactttaaaatattatcaagtaggcagttcttctgccagtgtactgccactggagcatgcgtgtggttatcctgttcagcccaccaccactgtacccactccctcatatgtaagcctccaataaaaccccatgtctcattaaaaaaaaaattatggagtgataatttaaaaggaaacagctgaagacacttaaaacaacagtattaagaaatcttctttctttgaaaatttgaaaacttaaattttcaagcacaaattctaatatcttcacctaaaaagaaaaatattctaagtggtaattttattgctatgtgaatggatttaatattcatagttaccagtgctattttttcctttctatttgcatgtgtctgaataacacttgatatgagtttcgttcccttcactaacgtctttttttttttttgtctttgtaaatagctagagactatacaagcacagctggattcccttacatgatgttttcgaagactgtttttttcatcacgctcctgccacctcattattttgcattgaagatacattgccaggttgtgttttctgaaggattcagtgacttgctttctgtaaattatatggcttatcacttcttagacaaataacaaccaatagagatcattgttaagaatactgaggttctaatatactttctttagttctgtgagccaacagtaattattaagaacactttccctttaaaggaaacaaaagtgaataccatattgtttttactgtcatagtgttgctttcttgcctgtcctgcttagtttttacttgctggatgataccataatgtatcaaggagcgtccatggatacaagataagatgtgtaccttagtagaatacagagctttggtaattacatgaataaaattaagaaaatagccatatacaatcaaatacactatggcatttttatttgaatatgatgagtatattttgcttcggaaataatataggaaggaaatgtaaaatagtgagtagtatggtatcagttaattccagtctgagcttctctgtcaacttcagtttctctctcagtttaatgatttaataatagtccaggtttttgtgtgtttttctttatactgcaaattaataatgattcactttatagtttgggagacagaatcaggtcttgaataaaataattgtaatgagtgctaaatgggcaccattattcgaatcagataccttttatattctctttccataaatacgttgatttctgtcaataaaatttttgtgtcttaggattggttgaagtgtacattttttaattatatacattatagtatattttatgccatgaatgtatgtaaatgaatacatttacgtacatttgttaaaatgtatgtaatgaatacatttacatacatttgtttaaaaaaaacttgaattttttatgaatgaaatttctgtattgtttscaaaaagagagagattcaaacatgacttkcttcacatgaagaaatttgatttcagaaatgtcctatatttaaataagcaaagccattgaaattgaagcacatttcttatttgaagcatctgggaaatacaactgttaagtatctctcaaatattcagtatatggaatttatacccacatttgtttgtatatctatytgtaagctgttgcttagaagaattgagagtttggattatttcagaatacaactattacagttttccatagttgattgaaagtttttaaactcaaactttcattggtagaatatctggaaggcatgtttgcaatataatgtggcttgtaggatctctcctacttttttaygctctgttttgccagttctcaaaagtaaatacctgaagtcctagaggtactataaacattttggtaaacattctttgagactttttctcatgtacatgtaaatatacatcatcccaagttaaatttgataggccttcctgacagtagccatatagataaatagaagttttcgttggtttagtggcaaaactgaattcttaatgtaggtatacaagttaaatatgatggttagaaatgaagttttctgaaagtagttcgttgtatgctccctaaaagaattagctttatatttatcttaagaatatctctaaacctatgcaaaaatatggcaaatagtcttctttccattagtctagttcaacaaaatctgactcagagacagtaaagaaagggcaagtagaagatctaatgccaactaagaagataattatttctgaaatatttagttgaagataactttctttcttaagacattactgtkgttatgatgcacaagtcaaagaacatgtggcatttccaaagagtattaaatgcatgttacttttttataaaaataagataaatgagattaatggggcttggaactgcaatcttggtaaataaagttactgtatgtctttcacgagtgtgtgacatgaggattgaatagacagaattgcttgttagaaagaggaactaatttttgtatctattacaaattatatttgtaattcttccctaattataaattatcatgattatttttatttgggaaataccaaaaaatcataaataactaayctaaacttacagaatcctatcatccaaaaatggccattaatgacagtttgatagatttattgcagtttttttgtatccatttatctttcttgttcattttttcttctttcctaacaaattgaagtaatgccataaattctgtttcatactttgctttatgtacccttacagcatgaacatttttcatatctttattgcccaaacataattttaatgtatattaaatagttcatcatttgaatgatctatactttatatactttatatttctcaaaataattaaattgtccaaattttggcacatttagattattcaaatttttgaacgtagggaactcactgataaatataattatacataaaccctagaccacatctctcgtgatattattagtatagattcctagaagtagagttgctrtgtcaaaagtatgaagatttattttctattttcatctttaatcggattttcattataaaaaaacaaggccaggtgtggtggcttatgcctgtaatcccaacactttgggaggctgaggcaggaggatcacctgaacccaggagtttgagaacagcccacgcgacatggcaaagccttatttctataaaaaaatacaaaaattatccaggcttggtggtgcatgcctatagtctcagctactcaggaggctgaggtgggaggatcacctgagcccaggaggttgaggctgcgagtcattctatcatcccactgcacttcagcctaggtgacagaatgagaccttttctcatacatatatatatagctgcccattaaaacaaagttgcaccattttgccatctcacttcctggaagtacctacctaatactgcagacatttggtgggtgcagtagctcatgtctgtaatcctagcactttgggaggctgaggtgggcagattgctggagcccgggagattgagaccaccatggtcaacatagtgagtcctgtctctacaaaaaaaaaaaaaaaaaaaaaaaaaaataataataataataaattagccaggtgtggtggcacacacctgtggtcccagctacttgggaggctgaggtgggagaactgcttgagcccaggcagttgaggctgtagtgagctgtgatcatgccactgccctttagcatgggcaacagagcaaaaccccatctcaacacacaaaaaaccagacatcttataatacaaatatacacacctcttgtgtattttcaaaaatacatttatatttatttcaaggcctttgatatatattgctaaattgtttctccaaaggattatattaatttgtactcccacaaacaatgaatgagaactcacttgcctcaagccaccttcagcagccccttcttccttctatacatttcaccctcaacattttttataacctgaggtcagtgtttgtttaggaagagtgatgggacatattgagatatgtcactttgataactatagaaggattgaaaaggaaatctctttaaaaatcaaatatgagagccaataactcagtattcaagtgtaagggcttcgaagtcaggcatttatttattcaacaagtaatcactgctgagtatggtgaatatggtggcaggaactgtgtatgctaggtaccatgtttacagtgataggcaaaactagttcttggcctcttgaaatgtaatgtgttagtgaaaagtaaacaaatatggaataaatgaacaaatatgggacaaaatataattggattctattcagagaaaattaatgatggaaccaaacttggactggggcatcaaggaaggattctctgaggagtgagatttgagctgagtccaatatgatgagttaagatggcacaatagtagaatagagtgacaggcattctagagagaatggcccatgcaaaatctcagaggatgggaaaggcttagcgcatttcaggaaccaaaaggtcagtgtggctagagtgtagtgaacagatggcatagtggagtgcactacaattaggtagacagggagccattctcttacaagttttgtcgtttttaccaccaaaatgtattgcaagtgtatctccagggcactaccctgtccaagctgccatcaactttgccctggaccacctttcttccattctagccctcctccagtccagtcgttgtacagagctaatttttaaaaaataacctattaattataccatctccctgcctaaaacccttcaaaggatcctattacacattaagtaaaatttaacgatctggtttctcaggacagtgcaaaggttatatccttgttcttctactttgtgtgtgtgtgttgagcaagttaatttgtgaaagttcactttacttatctttgtaataggaataatmatctaactaacatgagtgttttgaagattaagtgaaattcatgttaaacatttagcataatccttgaatctcaatcatataataagcattagctgacatttttataatcattaagaaaataagcagactctctgttgaaatttttccaggtgaagtttgaattagagtcaaaattgtagaaagcttgctatgaagccccttcactttaaacttatttggcattctaataacaactccattttataatcacagattctaacacaatgccaattctgcttttattttttatttaaaaaatgaggtaatacatgtattatgggaccagaatgaaaaaaataytttcttctgagtacctttccacgtggctcttctggctctgagaaatctttttctctactcagtgaactttgatttcttcttaccgtaaataatgtcttctacactttattcattataccaaggatcagcaaatgatggacatgacccaccacttgtctttgtaaataaagttttattggaacacagttgtcttgctaccaaactcactcttgagactttctsccttccttgctttgaagaaataataccatgttataagagaggctgcggatagggctacatgacaaggaactgagggtgacctctaggggctgagggagaacagccagcaagaaattgaggcccttagccttatagcctctatgaaataaattctgcgaacaaccttgaattagcctggaaatgggttttcttgtcgtttttttgtttggctttgttttgtttttttccctgttaagcttctrgatgagagcacagtccaactgactcttattgcagccttgtgagattttaaacaaaggacccaactaaactatgcttgaactctacccatggtaattgtgagatgataactctgttgttttaaacctctaactttgtagtaatttgttacgctgcaatagataactaaaacaacagccatgctcaattgtttacatrtggtctgtagctgcttttgaacaacagcagggttgagtagttgcagcagagaccatatggcccacaaagcctaaaacctggccctttatagaaagaaaggatgcagaaccctgctttatactatgctctctaaaccggagcatccctagagaaataaagtagttggtagggaacacaaaaagtcgtaagatggacgttgtatatatttcaatagcatcacttctactttttgccagaagtagaagaaattacattttctatcctcttttgcagctactgcagccgtggaactaagtgttgctaatgaattgtgaatggaagtgatcattcatctccagttgtcttcctctttctgtgattgaaacccagatttggagctgagtcagctttgagcagacaagaatgctaatgcttaagaggtagggagcaacaagatggaaggaacctgggtccctgratatacttatagaacacagctgtctccatgcccttgacagaaataaaatatcttgtttgagttattaaatttggggtcagtttaggctatacacagcacgtttgcctgtagcctaactaatatggtggcaacataattttattataattggccagtaatgtamaacatattttaaaatggagatttacattttatggcaaaatgcatataaatgttaaagaggaaatgggaaaccttaaaaaacagaacaaaacctttgtgcttgcagcctgcgaattcaggctaaattctcagtgttactgggaacctatattcacctccctccttcagtgtggttattttgagacaaatgttttgagaaaccataagggtatattgtaaatttcccccaaagtctttccataattctttttctactgttgaataagaggactgggatggttctgatttattcagatgcattagtcagaagctactcaggaattataatttaaatttctgatcaattttgcttccctaaaactttgattttttttttgccatcattatgcaaatagtcctactcaatagaccagcttcatttaatgctaaaattaggaacacattaatttgaggtattttatagtaaagcttaatggcatttttaattttgragaattttaaggatttttaaccattgctcccatctcgccatatgcacactcctgaagtatttttgaagctcttttgcttttctctgaactataaggttgtactagctgttatggaggcctacaatccaaatctaaatgatggcagttttcatagcctactttgttttatttgaaatggaaagttactgatttttatttcaaaagaagtagtctgcaaagacaggaaaggtgaagccagtccagtcaacaaatctgtaaggaagatggtgctasaggcttagagagactgtttcaatctccaaggcaggaaaaataatgaatatataataatcttcttttagtgaaaccagagttcagtcatttttagcatcttttaatgagaacctgattttttaatgatttttraagatttttccttcaaaaaatctaggtaaaggaaagcagttaatagtaaatttaatagttgcatttatttttttctgacttatgtttgtatttttttaattggcaaataaaaattaaaaacactgtacattctacccaaaactttaaaggaaagtcaataataaagttttttaaatctatgataaatatagacttgctgtaaggcaaggagtgcagtgatttctcaaggcctttcctcatctctccttctgagatttctaagtttcctttgtgcactatttttagtccacatttcaaattattctgcagtttcaaccagactacataaggggacaaaggaaaaagctgctgtcccctggataaggctgctttaacacatcaaccttggaagctccagcattcctctccatcccaagaatgtgtttatgctttgacagaggagcagagtaatttccagctgatcagagaaaaggtgacttgtgtattccagaccatgtgttctactttgcagtccagcttcttactctctttcatgctgctgcaagtagttctacgaacattggggtgctttagaaatactgaatgaatgaattaatagagtaygtagtttttttctgccttgggctctctccatttatttgcacagtactatctaaattcttaaaataattgtaaacttaaagttgtacaaaagtagttttcaaactggtttagccarctatgctggtatttggtaattccattagggaatagccacatcccttctagggagtatctcctgaggtcactgatccttttattcatcatccaggagataaacatgagaataaaagccttataaccagccagagacccagatttctgccctccagaaggctagagcaagttctcgcattgctgtgaagagatttatgatagtcatgaagttgacctacacatgcttctgggtactgatgctgcaagactgaaaacagttacattcctagcaatttcagagttgttttatgtgatagggtcaaaatgaagtgctccagagagacatcaacaacattcttatactgaaatatatgttcagtgtgtatagattttctgagctcattacccagaagattttaatttcctgctgaaaagagtatcttgattaaagacacacatagacacacacacacacacacacactcctgtacacactgcctacaaacaggctttcctcactgatgtgggacaattctgacaaagtttttttaagtctccctttacatggcacagattgttccaacttatcacaaatataccagctggacaaaaatcagataaagttgacatagatagtacagaaagcaggcaagataaacagagccacacagaaagctgttcagtaacagtttagtttaattttatgcaactaagactgtgcctttagatgtagagcccaatgtgagggatcagtttcttatgatagagtaatatttataacatctaacttttctaccttatggcagaatgccctgtgaatccttgaaactcaaggccttctttgtcagagttttggttcttactgcaaagtatgttctttccttatgtcatccaaacaaagtaactagagtagtaaaaagaaagtcagtgagtttggatgcattggctttctggacttgcaaattatccagtgcaggcatttctcacacagcaggcttggaggactctgggggtggccacctttgctagatatgctattaacctccttcatatggttgggtcagtgatcttgtaaagttctgcttggcaggctcrtaggtgttgataggtgccctaaactgatggaccagtagagggtggccaccatctgtgaggttatttcttcaggccctcaataagcacttacccaaatgcactgattttacagtgctgtggttctgtactggattccatgaagcacccttcccgtctctgattttccaggatcattttccttaagttaatgccattcctgtaaatgcatttctactctttgatcccttttctttagtttacactttcagttaaatctgtaagcaagataatctttgaaaattattttaattaatgtttatatttagctctatagtctgtgtaaggagatccagggttacaagagtctgcttgaaaaaatagagccacatcagatcaaattttctttccataggattgtattttttgaaatgttaaaaattctcctataattaaatatttaaaccttatttcatcatttttctaagcgtttttactttagggtttactaaaggaagccaaatcaatttcataaacttctctgtataggatttcaaatagaacatttttatggaaatagggtgaatatgttatagaggaagaaatgcttctgcctctctgcctacttccctattggccctctctctcgttctcccacatcctttagggaagaatggcttgccattcatgtttggtcagttaaagtattggttggccatgtttatcgatggccagatcaaccataaaaagaccatgcccatggatggtgctccttttgcatttcttgtttccactctatgggwtggaatagagagagtccagattttgaggagaagctgagatgtgtggggaagaggggcaggtasggagggagtgtctttcttaggccttaagaatgaaccatatgctcttacccaaccttaccaagctctgaaagataattgtcattttggttcccagttgctatcagtcttcctatgtgtagctcttctggaaatgtcagcatcaggagtgaatggcaggataagatttgggcatttgtgaagttctctagtcaggttccattaatgcaatcacaattccagcctctgtcctttatcagtcgtcttagcagatctgtcttatttttcagtgataaacgtagagagctatgggcaaaaacatcaaaggtatcattcatatctttcaattctcaagtaggcctcgagtaagagaagaaggctttgaaatcagttactctgactcccaaagaagacctgcttgacacttctaactctccattctaaatgagcaaaaatttcatctccctgaaagcagagggaagacattgctgggtcagtttcaaaggctcwttggttaccttcctgccacaatagaccattgagagtctctgctccccgttcctggcatggtggaaactgaccttacactcaccttcctctatgtacttctgagtgagaacttgaacttcaacatccccctctagctccctaggaaagtgaagaggtatggaatatgccctcagtagcctggcttgattctatcttttggctgtttgctgcatttgtagaaggaaaagaacaatagaaaacattgcttctctctttgcagactaagcatttacagtggaacatagctaagtaggmaaccaagaaaaagagaggatgagatgttaactgacgaatcaagttactcttgtgtgctccagtaacagatgtccaagaggcttcaggcctacctttgtgcctccttttttaaacgtatttgatcatctgcaagttggactgatttacatcatatgaaacccatgagatgtgcttgaggcaggagaatgaatgaattaaaggctttttccgtatgttattttcaccctgaagtagttaacctatcccagtgtgtatcaaaagcagaagaaactgattctgcaatgccaagttgtttctgccttggaccatttaccatacctgaatcttatgtgtctttttttttttttttttttttttttttgctgaacctcatccacaaaatgtgttataggcagtacaaaaaaaattatttaaattaaattagtgatagttagctttaaaaaacatgcaacatttcagttccctgcaaggggctctgaaatgtccaatgatatgtttcagagccattaagcttgtttgcctctttctgcttctccttcctgaccactgttgtgggggcagagagccagatgtcaggagsttcctttcccaaaccagttagcatgtcctcatattttgccctcttcagccacagcttgttctcggctctctccctgcatgaatcaacagcagtcccaggacaggcagagaccatcaggagcttaaccttcacacagagagagactccagatctcagagagcagtgctcaagattccaagacagaaccctgggattttctactgtgagtttcatgctgcaaatacacaaatcaacagttattttgtatgtatactcaggtttcttcatttatttgaaaaggwggaggaaggaatggagaaaaatggacagaggtaggagtgtgtgggggtgtgtgtgtgtgcatgcatgcacgtgtgtgtgtgtgaaaaggcattatatttaaagaacaatggtttttgatagccttataattactatattctaataggatgctgagcacggccttggcyggttaactctatttgcttagtcattcgttcatttacacatgtatttacccattaactaataggccagtcaaatgaggttacttctggagtgctgtagttctgtttgcatatcaggatctacaataaaagcattgccttaggtcctcaggtagaggttgatcaggggcagaaaggcttttcctgctgactccaccagcagcattctggtaagatgaaaaatggagaatgattagtgtgggccacccttgagagactatggttagtcataattgagtagacacagcaataccttcacgagactatccatcaagaaataagttttttaaactgtagttctagtaagaaagacaaacctatttaktttgtttaagtaagtgtgcttggtgccagggattcgaaataagatagggsctcatctctttggccttaattctaggctaaacattactcagcttgatggtaagtgtaaaactgaatacaactactacagcaatgacccactggaaatgtgtagcactttacagtttatagaaatccttttatatgcttgttctcgtttgatccttgcattattctttagttaattgaacaagtgttatttccattttctaaatgaacaaactaaaacgaagacacctaaatcacttgcctaagattacacagctgaactcagactagaactcagaatgtctaatccctagtttaaggctcttttaatacttcactgtgccaattatcaatttttgtccctccaaattttcccttgagttctctctctgccgttaatgtttggaatccctttaagctgtcctcctttatgtgagcaccatattaagctttctaagtagagggtgctggagggatattgcaggaggaagggacttctcttgtaggctccagcagctgcactgttggtcactggtatgagtgtgagtgcatctggtggtactgtgccccagccagagcacacagtcccttggtaagcttgcagccctgacctatcctagtgatcaccttctcatagccctcccaacacagacactagaaattctagccctcttgcccctctgcatgcccactcacctgcctcaccagttgtgactcacttgtaccctgccactcagatttgccctcctgacatggacactaggagtgccaagccttctacccaacagtgrtaktcccaaagtatctgtgcatacccaatctggctgtggctcatgtacttcctagagagtagctttcttcttactcagtgactgttaaccagctctggcatgagcaagccagcaaacctctcttccatccattgaagtgcaactagaccttctgcaaccagataagaacctgagccttgaggaaagatccccttccatccttccttgagcactctccctcagccctgtggaacattataaagttctcttacatcttatagttactgttttcttatagcttaatctttttttttgagacaggttstcactctgttgcccaggctagagtgcagtggcgtgatcttggctcactgcagcttctgcctcccaggttcaagtgattctcctgcctcagcctcccaagtagttgggattacaggtgtgtgccactgtgcccagctaatttttgtatttttagtagagacgggtttcaccatgttggctaggctggttttgaactcctgacctcaggtgatctgtctgccttggcctcccagaacgctgggattacaggtgtgagccaccgtgcatagccagcttaatcattcyttatattaagcttcccttatttaaatcactgtttggttcctgtctcctgattggaccccagttgatgcactcactaaatgttggtgtgaagtcacagacaaggtaaagtttcctatgggtaggactttatcatatatctcacatcactacaagcacctgcctattttaatgcctgacacacaaaaagtcttgaataagttctgattaattgagcacaatttaagttaattttaacacccctatttgttgagatgtaataacagcctactgagaggtccagcatgctgagaggaaagagtcaaaaatttgttcatgtatgtgatcacttatttgttcagtaatgttgatcaataatgttgactgggataagcagcactggctccaactgcaggtcaaacagcagaattggccccaactgggaggcggagtgaatsattgctgttagaggacaagcaaagggaacattcagaaggaaagaatgaaaacaacacagaaagacccagaaagaaccagggaaatacagagtactctaatcacttctgaggctcagaggggacaaatgacctgtcccatgtcatgtagccctcttcttggcagagccaagagtagagagcagattctataatcctcagtctaaactcttgacattacatattgcattgcttctccaagtggggcaggaaggggtggtaatgcaaactgcsatttcgggaagtggttaaaaaaaataccttaaaatgtggttatcctttacctagtagttctaaaggagtccatgtttgggatccaagaaattcccctgccaatgctattaccttttggaaaacagctagcagtctgtcaaatatgctagatttggggtttgacgcccctcaaggtaatcagtgacctgttaaaccacagtatctcaagccttgtaggcaaagcaaaatgttacctgtcctacccctgctcaaagtatccatcatttckctaatgtagtctcacacccatatgtaaagcctctctagcactcctttccaaaatctgtagcttaattatgctaatgatcttcatttatcatgttggtttacttatcaggacattttcctatttctggtcagatgtttttccagggatycaaggcatggaatccttcattaagtggggaagaaccaacagaatttgttccacatattcctctgacacatccccaaaagcatgacttctagcctgaatcctacaatgaatgtatgggtgtatgtgacacactgtaatttttcatcaacagatgggtcacatatgagccaaagatgaatgtagatgtagcaaggtctgtatgaactaagccaaaccatgtttagaatgtctttgttggctgtcattgggaagtagtgcatgctgattaactgatttgagatgtgcatacgcctctgtgctggaaagcaagagacacgtgggtccagagaaaatggaccagcctgtaagtgtcttagcagaggccagatgctctgcaaggagttcctgtgaaatgagagctatacttttcagaccacctctagctgaatacatctaattgggagttgcaggtgcatgggaaataaaatttccctcactggggaatttgctgcagtgaggatggctctattaaatcagtgaggaagcaaacttccaggacttggacatacttacttaggctatacactttgtaggctgggcttgctctaagagccagtcctgagatgctttctggcctgatggttttcaacaaagccactatttttctttctctcttcttccctgtgtctctcattccttgcacatatactgttctagagatctaaggttttctccaggaatactcttcttttacttttgttttattcatttaagagacactgctaaactctgggaatacagcagccctccgtgcaacttctttttgttcgtttttaaattgggcaacacctaattccataaaatagaatgagtgtttctgagacttctattttagtcaaaatcttgmcatcctctcttaataaccaatataggattctgttacagagagattcagaatagtagacttctggaccttggatgtcactgagtttaagagaaaggtagtcccaggactctggtctagcagctgagtaaggctcaggccttagaatggcttagcttgctccattgcaatgcatcatcctggatgttaaaatccagctgtctctctgaaaactaaatatgaaagactgagatttagtcaastttgctgagatttaatttacatataataaaatgaatcattttaactgtgcagttcagtaagttttgaaaaatgtctayacagattcatgtaactgccaccaaaawtgagaaaggacacttccaccatctcaraagattctgtgtgttcctttgtagtaagtctcttctaccccatccctagacaacagctgatgtgctgtcattgtacacatatattagctttgcctgtcctagaacttcatgttaatgggaagcatcctgtatgtactgttttgtgtctggcttcttcagtgtatttttgaaatttatccacattgttgtgtgtatccaaagtgtgttctttttcattgccaaataatgttctgctatatgaatatattacaaaatatttgtctgtttatctattggtggatttttgsattcgttccagtttggggctattatgaataaagcttctgtgaaaattcgtttctgtcttttggaagacacatgttttcatttctcttatagaaatgcctaggagtagagtgagtcgtatggaaggtgtttaactttataagaaactgctaaactgttttccaaaataattgtaccatatcacattcctaccatgcttttatgagggttcttaatgatccatatcctcaccaacacttggtattgtgagtctttctaatttagctttctagaagatgtgtgttttgatttgcattaccatgatgactaatgatttaacaatttttcatgtgcttattgttcattcatatatcttttaagaattgtcttttcaaatactttgctcattttaaaaattgcatttatcgttactctataagaattatttatattatatggaaacaactcctttgtgagatatttttattgcgatattttctctatgtcagtgccttgccttcaaaagaaggagtgctttattttttaaaaggcatgctcttatttttttcttttatgatttgtgctttatgtgttctaagatatatttacattttctgatgtcacaaatgtttaagttttatagttttagcttttatatttaaatctaattggattttttaattcttttttatcctttttattgaggtaaaacatacmtataagatttaccatctttaccacattgaagtgtacagttcagtgctgataaatacattcatattcttttgatttccctttatcttcccagccctgctacccttcctagtctctgacaactaccatcccactctctatttttatgagatacacttttttagcttccacatatgagtgagaacatgcagtatttgtctttctgtgcttgggttatttcagttaacataatggcctccagttccattcatgttgctgtaaatgataggatttcattctttttctgagacagggtcttactctgttgcccaagctagagtgcagtggcatgatcatgactcactgcacccttgacctctcaggttcaagcaattttcctacctcagcctcccaagtacctaggactacaggcatcagccactatgcttggctaattttttaaaatttcttgtagagacggtgtctcattttgttgcccaggctgctgtcaaattcctgaacttaagtgattctccagccttggcctctcaaattgctgggattacatgcatgacccacctcatctggccagaatttcattcttttttatggatgagtgatattccattgtgaatgtatgccacttcttttattcattcattcattatggaatgttggatcatagtagttctatttttagttttttgaggaaccttcatactgttccccatagtggctgtactatactaatttacattcccaccaacagtgtgtaagagggtccccatttctccataggcttggcaacatctgttattgcctgtctttttgatacaaggcattttagcaggtgaartgatatctcattgtggctttgatttgcatttctctgatgttagtgattttcagcattttttcatatactggttggccatttctatttcttgagaaatgtctgttcagatcttttgcccattttttaactgtttttagggtttttttgtttggttggttggtttcgttttgttttgtttgcttttggagtttcttgagctctttatatattccggttattaatcccctgtcaaagggagagtttgaaaatgttttctcccattttgtgggttgtctcttcactttgttaattgttttctttgcagaagcttttaagcttaatgaaatgccatttatctatttttactttggttgcctgtgcttttgaggtcttacacaaaaaaatctttgactcagctcaatgtcctggagcacttcccctatgttttcttacagtagttttataatttcaggtcttagatttatacctttatccgttttgattttatttttatgtatagtgagagatagggtccagtttgattcttctgcacctagttattcagttttctcrgcatcatttactgaagagaygtccttttcctattttgttttccagctttgttctcttgctgaggattgttttggctatttgaggtctcttgtggctccataccaatttttggattcttttttctgtttctgtgaaaaatgtcattggtattttaataggtattgtatagaatctgtaaatggctttgggtagtattgccatttcaacaatactcattcttccagtccatgaacataggatatctttccttttatttgtcttcttcagtttctttcattggagttttacagttttcctcatataaatctttcacttctttggttaaattgacttgaagatattttatattttttgtaactattgtaaatgggattacattcttcatttctttttcagattgttagcttttggcatatataaatgctactgacttttacatgttgattttgtatcctgcaactgtactgaatttgtttttcagctctaacagttttctagtggagtctttaggttaatgaatgtacttctcttgttctagtccttagaggagaggcttttaatttttccctgttttgtatgatgttggccatgggtttgtcacatatggcctttgatatttgaggtatgttttctgtacccattttgatgaggggttttaaattattaaatgcttttcaagcatctattaaaataatttgtcagagatgagttggctgtagatgaatggatatatatctgggctctctattctkttccattggtctatgtgtctgtttttatgccaataccatgctgttttggttacaaaatgtggtacattttgatatcaagtagtatgatgtctccttccagctttgttgtyctcttgctcaggattgttttggctattcgaggtctcttgtggctccataccaatttttggatttttattcttgattctgttcatgtgatatatcatgtttctgcatttgtgtatgctgaaccatgcttgcatccctgatattcatcatacttgatcatggcgaataatctttttaatgtgttgttgaatttggacaggcagtatttcattgagaatttttacatctgtgtttttcagttatatgggcatgtagtgttcttttatcattgtgtccttgtctggttttcatagaatgagtttgcaagtattcccttctcttcagtttttttttttttttttaagactttaatagaattagtattggttcttctttaaatgtttggtagaattcagcaatgaarctgttaagtcctgggcctttctttaataaagactttttactatggctttgatcttattactcattattggtttgctgagattttacattccttaatggttcagtcttggtagtttgtatatgttgagtagtatatccatcttctaggttttccaatttgttggcatgtagttgttcataactgtttctaatgattccatttcttttttttttttttttttttttttgagatggagtcttactctccacccaggctggagtgcagtggcttgatcttagctcactgcagcctctgcctcttgggttcaagtgattctcctgcctcagcctccctcccaagtacctgggcctgcaggggcccaccaccacgcccagctaattttttttttttttagtagggatgggatttcaacatgttgaccaggcttgtctcaaactcctgacctcaggtgatccacccacctcgacctcccaaagtgctgagattataggcatgagccaccrtgcccagccttctttctgtttctgaggcctcaattattatgtctccattttagtttctgattttatttatttgtatcttctctcattttttcttagtctgggtaaaatttgtctattttgtttatctttttaaaaatccatctttttatttttttgatcttctgtatttttaaatttctattgcatttatttctgctctgatcttctttatttcttctactgattttgaatgtggtttgttcttgcttttctagtttctgaagattcattattataatgtttattgaagtatttctgccttgtttttgttcttgtttttttgcccagagtggagtgcagtggcatgatcacaactcactgcagcctcaacttcccaggctcaaatgattctcccatcccagcctcctgagtagctgggacgacaggtgtgccctaccatgcccagctaattttttatattttttgtagatatggggttttgccatattgcccaggctggtctcaaatttttgggctcaagcaatccacctgccttgtcctcccaaagcactggaatttacaggcatgagccaccgtgcttggcctctttctgcttttatgatacagccatttatcactgtgaacttccctcttargactgcttttgctggatctcacagattttggtattttgtatttccattttcatgtgttttaagaaacttttgattttcttcwtaatttctttattgatccattcgtaatttgggggcattttgtttaatttccatgtattcatgtattctccgaggttccttttgttattgatttctagtttgatttcattatgttcagaaaagattactgatatgacctctgtttttttaaaaatgttctcagacttgttttatgacctaagatatcatctattttggagaatgtcccgtgttttaatgaaaataacatgtattctgcgtgtatagaaatttgggtgaaatttctataaatgtcagagaggcctattagatttggtgtgcactttaactctgctggttcattgttgattttctgtctggataatatgtccattactgagagtgggctgttaaagtcccctactattattgtgttgcagtctatctctccttttaagtctattaatgtttgctttatacactgtgctctgatgttggctgcattgctatttataattgttatatcctcttgctaaattgattcctttatcactatgtagtgaccttctttatctctttttacagtcttagattcatagtctattttatcaaagtttagctactcctgctattttttggtttccaattgcaagaaatagctttttctacactttcactttcagtttgtgtgggtcttttatagttgagatgcatttcttgaaggcagcatatagttgaggcttctttatcccaaattttaatttttttccctctcaggtagctagtcatagagatctttccatatggcctgatagatgtggcaggccttggtctcataaacatcacttccatccaataatggattgcttcttggcctgctcacctttatagatagggagagcagagagcactcatggtgaatagtttggattatgtggtcacccactgccccctgttcaaaatccatcagagcccagtaaggactcaaaggagaaggccttgcttcaaaaccttaaaggcctcaccacaggcttgagatgatactccaagcttctgcagataccacaagctcttttggaattcactgggtcactagcactgatgcctaggcccaatagagccttttcttgccttaagacctactgaaatctcaaatctcacagctttttttaaaaagcacatgtcaaatgaaggctaagtagaaaaagtatgtgcttagtagaagaaagacagagcaatagtgattaatttatctttatgaatgtatctagatttttgaaatctagaaaaaaattgtttaattttaacaaacacatatattgtgccttttcataagttaaaattttattttggatcacatagtaggrtagaaaatcatttcggtacttaaacgtcagcaaaaggtcttaatcagatatttagtgaataggccaaagcagccacccattgaaaactgtattacctccagaaacgaaacaagtccaccaagcattatgccccttctatcttggaatgggcacaagattcagcaacttgtctggcatatacgtgaccatgggtcaggttctcatgtatttaactgaggtgaaaggtccctatattttcatggatatagtgaagtagcatccttgtctggggaaatacccgagatttcttgtcatgcaccaagaagattaatgtcacggacacacacacatggagtgggttaaggaatggaaagtttaataggcaaaacaaagaagagaggagagcagctctctctctcttttgtgagagagaggcatcygaaagaggaaggctgcctgcagcggattgcaccagattttataggcaggcttgaggaggtggtgtctgatttgcctagggcccacagattggttccatcaggtgtgacgtttacatggtgcacaagggaggctggttgccccaccctaatcctatgcaaacggattttctacttgkccagggacatcttgcctattccatactgtacacatggctggcaaagagaagatggagctgccgttttgaatgtgcctattcccaggtagcttctttctgttggcacaaccgctggyattcacctgtgcaagcttctagcttgttagtctatgtttgcagctcgattttacaggctactctttgttagaaaagaaagtgattgggggggctgcttttcatttaaaggaaaaccttgccaaggactcctgtgccctcactatctgcctaagtaatttctttttaactcctgtatcaacagctttttcctgttgacacatatatcttttcaattctttaagccgtaagcagcctagttgagggttcagaaatcctccaaggtttactccaatatgatagagaaatatttattgtgtgtaggatgatgtgagaaaaagtttgggaggcactgaggtaagtaatatgagataatggtgacatgtagtaaaaagagttcttaacatttccttagaggctctagtgaatttttctctaaactgtatggtattctcttctcagagaaaattaaatcatttatcaacgcaaggtgataaatgcattcttctttagtagttatagttttgtttttaaaaagccttaatattagctaattcattcctaaggaaaacctaaggcctgtgcctatttgtccaccacagggatcaccatgcagctgaagacagtcacctaaattcagttcttgagcataggaacagttcatcaggctctgtaaagtttgttctctaattcaaagctttcgattatggagaatgtcacttaaggagaaaggagatcttatctatattaccaaaaactatactactgtatgcttgtggttatcctgctctgtgttttggagtggtacatcttatcactcacttgactgtggccrgagggtgggaagagtccttttatctcgtaactcccaaaatgatgcctggaaccacaatggtttgtggaatccatgatcaaatcacaaaaaagattttttttttttgtcctgagactgactcctgggtttctaaggaggtggttgagattgcagtttcatcttttctgttatctcaccagcattgacacataaaaaggttgtttttttttttttttctccttgagccttttttaatttaaagaattacagggaggaaagatcacagagagattcccagtgataaagcaaaaaagacaaataacaagtgtccgcacatgttcctgttcaaaacatgatctcctgaggtgttaggaaagtcacacaggccccttctccactcgacatgatttccacaggtaggggtgggttgccttgtgaggctcagagaagggaaacatcaaagagccatcctcagtctcatctcttcttcctgggtcctctcagtgcggggagctgtgaaggttacccttggcactttttccagaagtggtacttcttccagacccagacaccattaagtaggcacagggtacggctcttttgtttgcttaatccccaacagtagagccttataagtcctaggtattctttcctatggggaacagtccccaggatactttctgctgcattcagatgagagstaatmgctaatctttaaaaccattaagctgcacttagctgagccttcacttacagattctgggagaccctttgctattacacagtggaatcaaactttgtgaggtcatgagtgtagtcaaataagccttttctgtgagaaatcagtgagacatacatttcctcaatctcagtgctcaggtggagtatatgctttgctgccttttgtttaaaacagaaatttttagaaggtttttaatcctaacatccctctgaatttttaatagagttacttatttaaattgaattgtattaaaatttcagtgttttcatcttcaagacagcaggagacctggagtagggtaggcaagtaaggcacttamctcagacacaaaatttaaaggaagttcagcaatcaatataaataatattttaaggcaatatttttaaaaacaaaaattaacaaaaaaaaatgaagaaaataatgaaaattgtaaagaaagactgggtcaggaacagtgcygttctgagccatattggaacctgaggcaaatgaaaaactcagtaatattttgttcatcatggatacataatctctttacaatgtgcaaagagattctgcttattattgctttgtccttttggggaggtcatagttccttgcttgctgttgtttcttgtgggtacagatttatgtctttgcattgaaagattagttatttattccattttattctgttcagcttattttggtttttattggatatattggctagcaaatatttagtgctaagttgctgcctcttttttggstttaagtggtaccttaagcccaggttcatcttgcgttgatgaatgatcagagctctgcctgtcatgaacaggggcggccccaaagggattatcccagcagtgtgtcaaggctgactggctagggggtttgtgcctaggagacctgtggaacatacctcctacagcatgttgctgttgaacaacctctttcatatggtgtctcctgccaagtaacagagcagagtttccaggctgtggatgacagtcttgcctccctcttttttctctgcctgtccttagggatatttcttccttcaaggagtcacagtgcttcacatgggtcaaggcaaagacaggtctcctgccaaggcacccaagatggtgggtaagctaattgatcacttcaatcttatttttctagtggaaattctgagtttggggcagattttccatgcatttagtgctgggtagaggtgggggacacatcacatatgtgaaagtccagttctctaaccatttgctcagagtttttcactcttctgtggccctgggagctgtcttatcctcatatttgagttctgaattgttgccggtaaaaatgttggtgctgtgtatttgtttgtggttttctattagggggagtgaagccagcttgcttctgtgctaccattttggaaccaaaagtctgtaagttgttttaagataattttgataaatgatgtgagagagagccaaggttcacttctttctaaaaggatatcccatttttccagcatcatttgttaaacagatcatttttttcccctctgagttatcttaacacctttgtcaaaattatttggccattgattatgtaagtctctttggttccatatactgtatatgtttattcttataccaaatgcacatactacttgataactgtagctgtacagtaagttataaaataaacataataatttttaactgaaataatattttaaaaawcaaacagaaatcttgaaaatgagaaacacatttgctgaactgaagaattcattagaggctctcagcagtagaatggaccaggcagwggaaagaattggtaagctcgaagactgggtttttggtgggtttttctattggctatttgaaaatacacagatgagaaaacaaaaacaaaaacaaaaaggaatgaaagccacctggaaaataacagaaattaccacaaaaaaacccaaatctgtgaattattgctgtttcagacgaagctgagcaagagcaaggggtagaaatcttagattagatgattacagaagatgttgcatatgttggcagctgcaaatgctggaaatggtcagctacagtattatggtcccactcaaggtgtctggaaggacagtagagtagtaatatcttcccagtagtcagaactttgatctgtacatattgttgttcatttgctgggaagtggagatggcctaagcccaggaacacggtctgtgctaattcgaggcatttgaatcttgcacaaagtttgaaaacagttgaaacttttacagttaaatgtgtgaagtacataaaggccctggcaaccacagagtgcctgtccatctacatacatcagcctaagtgattccaagccaagttttacaagtttttcctgttatagtgacagatagaatgaaaaatatgtccttggatagttggggkaaagtagctaaatttttctccaaagttcaattcaagaaacattcattgagcaagcacttaccctgggccaggcactgtgttatgtatttgggatatggaagctcataaaatgtggtacctatttcaagactcagtgaaatatctccctcccatagtctaggaacttaaatgaaaataaatttctctaggatcccaggctagttctctgttgcagatttatattaatatattactaagctaagagactggcatgttggtgagtccagagagccagattgtcatgaaacacagtaggagtttggtaaataatagttggattaatgactaaaaatgatactcctgaaccctctttccatatctggtagcagctatgccataagagtcagtcccaacagacacctactaattaatcagttcctgtgaaattcctgatagccccatgtgaggcatcattttgaacccattctgacctgaaaactggaacatggaggatcatactaagagttacattcaaattgcacactgtcatgtctgtgttgtgtggtgtcttggtactctaaagtttaactgcacgctgcttccggtttctcccmttcatgcatgttcattgactagccatagacatgagctctttccaccgctggccttctattttccagagttctcctttcattcttcagtggctgtggttgtctctggatcttttccctgcttcctctggacaataagtttaagggagtttttctattggcattttggagacctagcactgttgacagtatgtctattgctgccttcagggcaaagcagtataaaaatgggagattcactctgctgatcacttttcaaagttcaactctccttcataatcagcctgtgtttttctatttccagagcctttagataatttttctttttgttttgtattttttagagtttatagctgccatttgaaagaggattggttgtatgagaagctsatcccttctatactagaagcagagcctcccagatactgtattttacagttctaaaatgtcagtttaattaaagtatagattccctataacaaaatttcatgtttccatacctgtgttctatctttttttctatttttatttgtttattaatcttacttattttgaagtctttgtttgcaagcctggtatttggttcatttctcagtctgcttccattatgtgtttaatctctttattatcagtcactttactgcttcttaactctagtttaattgtattgtatgctggacattgtggatttaaaaaatgttagagtcttcaaatgatgcgtatctttcaccagagttgactcatcctttattagacataaaaagtgagaattgattatttaatctgatcaagagccgagctaagaaaatgtttggttgcagtttttataagtctcaatctacctagtgtttgttcstgctcttagggtatagcccttcaaatttttccgttgagaacctgrtatggccatggtgacccccattttggtaaatcgtgaactctttctttgtttccttaacacagtgagacttccccagtgtcaattctgcttttataaggtgttctgcttaagctttttaggcccccaactaaatgtagcttcagaatttggcaaatgtgtttagggaaaaactggaagtatgttgagagccctttggtctccagctctgcaatacttccaaaaagttctgytggtttctctgcctctgtgcagtcaaagcttgattctcaggctcttggcctttggcccaaatcaacaaatgcctccagagaaaaagcagctacagggaatcaatttccttctcttccttcagtttctctccagaatcttgaccctcagatgtctttatacaaataatttacaaagcaattaaaaatgcatatgactttttgttataaacataatcaatgggagccttaatttgtcacaagtcagaaacctgtctacaagaaaaagtaatagctatataaataaaacctgagcagaccaattgtgataccatttcataaacgaaggagtatgattcattttaatctctgcacttgctctacacagccaaaataggaaagaaaaaacagagacagagacttcacaaacatgctctacaatcttatgcctcccaaccttatcacatgctgttccctctgctggaaatatacaaattctcacacaagacttaagacacggcagacagtaagatgtcacattttggctataaatgtgaagtgtgagtccatcagagaaggcatatctttgataagaggaggactgagccccatctgggttaattttcttgtcttcaccacagcctcagcaatggaaggaagagatatgtgtaatactcctctgcactgtacccagaaatatactaggcactgaaggcacagaagtaaaatacaagtctctgccccagaggagttcccaattctttatcacagctcttttctacattattgagaacctagtagggaagaattttaataatatgggatgttctttggttttttcttccttcctgtaccttctgccatttttatagttctttatttagagctgaccaggcagaaagttgtaagcaagagaattgtgaaagttttgtgcttctcatcacctgaaactaaccccacaggctattatactctgcccagtrtattaatatattctcagagctttaagactgtgttgaaaatgggaaagaaaaccttttactgtgtttattatatcagcctgatccaatcakgcctgsgtccttttttgttagkgtaaatggagagattactctctaacaattttcagacagtagtagttaaactgtgtatttgtwtctaaataaaaggttaacactactggcatgcagaaattrtagaaatgtacattttatcatgataaacaatcccaattgtgtagctttaaaaatacaaaattctacttgcaattattttcagagacttaaaaattaagtttccttccctgtagtattttagctgtcagaatggctacttccattatctacccatccaaaattattcagttgatttaatacctgcaaaattagtgaatttttaccatgggatttaggcaggggatttttccagctatactgatatcaacatttaaggtgattatgaatagactttttctattccactagttccttaggaaatacggttttcacaatttatcttcagtggaaaagagatcaggactgggtatgctatcaggattcaactctgtgccatttattggaaaaaataaccacaaaaattgctgctgagytccctccgtcagtgtattctcttcccaatatcctgctatactcctgccagagctgttcaggtcagagaaaagtagggtgttaggttattgacataagaaagcttggatagcctagggaatatttgtagatatagtcagaggtctttgtaataatatagcttctctgagcatctctgttcagagtgttaggagacaaggagagagaatgaacagtatagttttgttatcccacatttttttcaatgacatgaggtagtgggaattggctcarttcagttatagaggttaaattttaagccctattcacaagggacagagtgcacaatagatttttacctaaactttataaagctggaccatttattatactcagatactaacccctttcatcttgcatttcttgctttatgttgaacaggatccaaagagcagaaattttgttggctgtaaaaatctgagatataatcctgaatggcttatttctaagaatagaatatattttagccttagtcaattttacgctgctataacagaatacctaagactgggtaatttataatgaccaaaaatttattggcttacagttccagaggttgggaactccaagatcaaggcacctgcatttggtgagggccttcttgctgcatcattacatggcaagaggtagaagggaaagggctcaaaagagcaaacccactcctgggagcccattttatgatttcattaatttattcatgaaggcaaagaccttatgatctaaacacctcccattgtgccscaccttccaacaccgtttttttgggggattaaacttcaacatgagttttggagggaacaaaaacattcaaaccacrttaaaatgcttaatacataaatattttcaaatgtatttcttaaaaataactgtaggtaatttaagtctttgggatttgaaaagttgagggcaaaaacatgatgcaacatttctgcatctctttctatctycattaaacatagatatagtgacttctccttctgcttacaaaggattaactgctatagaagtgttcatggagtcccttgcaactttggttgattatcaatctctgcatactctgttaaaggaattaaaggaaaacataaacataatgaggagagaaatggaagatacaccaccaagttgggcaataacaacttccaaagtaaaataattgtaaggaaactgtaaagtaaacaattcccagagctcacacaggrctgggattgtttgactaatgttgcccagtcacagtgaagagacattatttaattcaaggacattcaatagagacttgagaagggtcaagccttagaaatggggcaaaatcaccctaaaacaagggcttctctatgtgatcttaagtagagcttttaaaaaacacctcaagtggctgggcacattggctcacacctgtgatctcagcactttgggaggctgaggcgggcagattacttgagcctaggagtttgaaaccagcctgggcaacatggtaaaaccctgtctctaccaaaaatagaaaaawtagccagtctcataacccagtctcagaataaatagatagattaaaaattttaaaaaaacctcaaaatggataaatttgtgtgaaagtaacataactacctcctagaaagcgcttaccactaaagagagacaacaaaattgagcactctgcaatgtgaaattcaccatgtctgagtatcaataaaaattattatacagaatagtttatattttatacagaaaataaaatttatacagaaattttatttacttatataaaatgttcttttatacaaaaaaattatacagaataggaatctgaaaaatgcaatccatacctgggagaaaaatccattagtaacaaataaatctggaaatgacagagattatggaattatcagaaaagtgtatttaaaaagctattataaacatgctacatttgttcaaatgatttttaaaatgtggacacaatgaggggagaaatcgaagaaataaagaagaattgaatggaacttcaagcaatgaaaaatgcartagctgaaatgaaaaatatactgaattcaagagcccattaaacactgaaaaaagaaagatcagtgaacatgaagttatacagatgtaaatgatcccaaatgaaacagaaaaaaaaaacagacttgaaaaaataacagcatcagtgagttatgggacaatattaaacagtcaaacatatgtgcaattgcagctagaaggagagggagggggatcagaaaagatatttgaagaagtaatagccaaaacattttattccttgacaaaatctttaaacccacagatccaagaaattcagtaaaccccaagcaaaagaaacataacaaggctggttacaatggctcatgcctgtaattctagcactttgagaggccaacataggagtaggatctcttgagccctggagttcatgaccatcttgggcaaaataaggagactctgtctctataattttttttttcccccggagaccaagtctcactctattgcccagcacccaggctggagtacatggcacgatctcagctcactgtaacacctgcctcccaggttcaagcaattctcgtgcctcagcctcctgagtagcttggattacaggcatgcaccaccatacccagctacattttttttctttttggatttgtagtagagatggggtttcaccatgtttcccaggtgggtctcaaactcctgagcccaggcagttctgccgcggcctcccaaagtggtagaagtacaggtgtcrgccacctcacctggcccctattttttttttaattagctgtgcgtggtagttggttcctgtagtcttagctacttaggaggctgaggtgaaaggattgcttgagtctaggaagtcaaggctgcaatgagctgtggtcccatcacatcacaagggaaactgtctaaagaaaaaaaaagaaacaaaaaaccaggtttgttcatcataatcaaattgctgacaactagtgatgaagagaaacatctttaaaagcctccagacttctggtttctggttcagcatgtaaacagcttgaaagtcatcactccatcttaacaagtacaaagctgaacaagaggaatgagatcctgggaaaaccactgcctccaaagctggagagacagaggacaaaaacagagaatcacaactcaccagggcagaaacctgcaagcagaaccctctgctggaaccagtaccagggtaggagaacctaagctataattaacaaattgccggaagcttggtgtgcacaagtttgagatgggaaacagtttactcggagcctaagtaacctgggggaagggaaaccgacttcagcatattctagatgttctatcccacctgagcttggagataaaactgagaagctcttgtcaagttcacagcccaaaggctcactaagagactgagacctaatcatagaactatagaatgtttccccttttctcatgccttattgtcacataatwaaaggcctatttaccagaatttcttctacccagtatggcatgtttggctttcaacaaaaaattttgagacatactaaaaggcaaaaacagttcgaggagacagaaccagcatcataaccagacttaaatatggcaaggatgtcagaattattggaatttaaatcaattataatatgctgagggctctaatgtaaaaagtagaaatggtaaaaataaaaaacactaatagaaatgaagcatgtctttggtgtgctcattagtagactggacacagctgagggaagaatctctgagcttgcggttatatcagtagaaacttccaaaagtgaaaaagactaacaaatttgaaacagagtatcgaagaactttgggacaattacagaagktgtagcatatctataatggacataccagaaggaggaaagagaaagaacagaagaaacatttgaagcaataatggctgaaaatttcctcaaatgaatgtcagataccaaaccacacatctagaaagctcagagaacgccaaagataaatgcaaaaatcaaacaagcaaagaaatgayacctaggtatatcatatttaaagtactgaaaatwaagaattcttggaagaagcaagaggataaaaacagctatagatggacaaagataagaattacatcttttgcctcggaagctatgcaaccaagagaagagagtgcaatatttaaactgctatgagaaggaaacccaccaacctagagttttgtattttctgattttatcattcaaagctgccttagtcagtttgggctgctaaaacacattgttatagactagttggtttataaacaaaagaaatttatttttcacagttctggaggctggaaatccaacatcaggttgccagaatagtcatgttttggtgaggggcccttttccackttgcagatggccaacttcttgtatctacacagggaagtaagagagttaactagttctctggcctttctcataagggcactaatcccgttcatgaatgctccaccctcatgacctagttaactcccaaaagcaccatctctataaactattacattgaggttagagtttcaacatatgaattttgggaggtcacaaacattcagtccacaacaaaaagtgaagaagaaataaaggctttgtcagacaaataaaagttgagggaatttgttatcagtagaactgttttgcaagaaatgttagaagttttacagcgagaaggaaaatgatacatgtcagaaacttggatgtatataaggaaagaaagagcattagaaaagaagtaagtaaaaataaaagcatccagagtaaaaatacacattatatacagagaaataaagataaatatgacagtagactttttgagaacacatttaaaaatgacatctttacagagtgtatggaggggggtgattgaaagatctgtcaacctagagttctaaacctaatgaaaacatcattacaagatgaaggcaataaagactttcagacaaacaaatacagagaatcacaactcaccagagcagaaacctgcaagcagaaccctctgctggaaccagtaccagagtaggaaaacctaagctataattaacaaattgccagaagctcggtgtgtacaagtctgagatggggaacagtttagtcagagcctaactaacctggggtaagggaaactcgaagaaaattcattggtaccaggtctacgctagtaagcagtgttaaagggagctcttttggctgaagtgaaatggtttctgatggaaatttgaaaccacacacatactacacacacacacacacacasacasacacacacacwctctctctctctctctctctctctctctctctccctctccctctctccccctgccaaaataatgaaaagaactggaaatagcaaaacgtttgggtaaatattttaaaaatgctgtaatttttactgtcatggaaatgtaactattttaaacaaaaataataatagtgttttgtagagcttatagtataggttatagtaaatgtgtggaaataatagcacaaaagatgggaggagggaaatggaagtatactacttttataaatctttacaatataatatgacagtaggctgtgataagttgtagctatgcatgttaaaccttggcataaccgttaaaaataaatataaaaaagagatattgctaataaactaataatagagacaaaatggaattctaaaaacattcaattaataccaaaaaaggcaggaaaatagatgaagaagcaaagagtaaatgtgacaagtagaaaacaaagatgtggcatatataaacccaatcatattaataattaaatacaagttgtctgagcatgccagttaacagacagagattgtaagctgggcatggtagggcatgcctatagtcctagctattgggaggctaatgtgggaggatagcttgagtccaagaatttgaggccgcagtaagccataatctcaccactgtactccatcttgggtgacagagtgagtctctgtctctrttttcttttctttaaaaaggagtttataaaataaaaataataaccaactctttaacagtttacaaaaaccctttttccagtataaagacagagataggttaaaaacaagggaagagaaaatatttaccatataaacactaaccaagagaaatttagggtggtgtattagtctgttctcatgctactaataaagacatacctgagactgggtaatttataaaggaaagacgcttacttgactcacagttccacatggatggggaggcctcacagtcatggtggaaggtaaagaaggagcaaagacctgttttacatggcagcaggcaagagagcatgtgcaggggaactaccctttataaaaccatcagatcttgtgagacttggtcactgtcatgagaatgtcaagggaaagacctgcctccatgattcagttacttcccaccagtttccccttcatgacacatgggaattatgggaactacaattcaagatgagatttgggtgaggacacagccaaaccatattctgccccatcccctcccaaatctcatgtcctcccatttcaaatccattcatgcctttccaacagtcccctaaagtctgaacttattcaaagtctcatctgagacaaggcaggtcctttccgcctgtgagaatgtaagatcaaaagcaagttagttacttcccagatacagtgggggtacaggcattgggtaaatatacccattccaaacgggagaaattgaccaaaacagaggggctgtaggccacatgcaagtctgaaatccaatagagccatcattaaaccttaaattttcaaaatgatctcctttgactccatgtctcacatccaggtcatgctgatgcaagaggtgggcacccatggccttgggcagccctacctctgtgactttgcagggtaaagcccctctcctggctgctttcacaggctggcrttgagtgtctgtggcttttccaggtgcatgatgcaagctttcaktggatctaccattctggagtctggaggacagtagccctcttctcacagctccactaggcattgccccagtggggactttgtgtgggaactccaaccgcacatttcccgtccacactgtcctagcagagtttctccatgaggaccccacccctgcagcaaacttctgcttggacatwcaggcatttccatacatcccctgaaatctacgtagaggttcccaaaccttatttattgacttatatgtacccataggtctaaaaccatgtgtaagctgccgaggaayggtgcttgcaccctctgaagcaacagcctgagctgtacgttggccccttctagccgtggctacagctgaaacagctgggatacagggtaatgtttgaaggctgcatagagaagggggatcctaggcccagcccacaaaaccattttttcctcctggacgtccaggcctgtgatgggagaggctgccatgaaggtctctgacatgccctggagacattttccccattgtcttggtgattaacaacgggctccttgttacttatacaaattactgtagcagcttgaatttatccccagaaaaatggagtttccttttctatagtgtgatcaggctgtaaattttccaaacttttatgcgctgcttcctcttgaatactttgctgattagaaatttcttctgccggttacctcaaataatctctctcaagttcagagttccatgtatctctagggcaagggcaaaaagctgccagtctctttgctaaagcacagcaagagtcacctttgcttcagttcccaacaagttcctcatctccatctgagaacacgtcagcctggactttattgtccatgtcactatcagcattttggtcgaagccattcgacaagtctctaggaagttccaaactttgccacatcttcctctcttctgagtcctccaagtctctaggaagttccaaactttcccacatcttcctatctttttctgagccctgcaaactgttccaacctctgcctgttacccagttccaaattagcttccacattttcagttatctttataacaacaccctactctactggtaccaatttactgtattagtctgttttcacactgctaataaagacatacctgagactgggtaatttataaaggaaggcagttcaattggctcacagttccacatggctrgggaggcctcataatcatggcggaaagtgaaggaggagcaaaatcatgtcttacgtggttgcagcgcaggcaaaaaaacgtgtgcgggaggacttccccttatgaaaccatcagatcttgtgagacttagtcactttccctagaatagcatgggaaagacctgccctcatgattcagttacctcccactaggttccccccacaacacatggtaattatgggagctaaaattcaagatgagatttgggtggggacacagccaaaccatatcaggtggctatattaacataatacaaaataagtttcagatcaaggaatgtttacgggaataaagaaggcagctacataattataaggaagtcaaaatatcaacaaagaataacattgttacatgtgtatgcacctaattacagactttgaaaacacatgaagcaaaaactgatagaatggaaaagaaaaaagacaaatctgcagatagagttgaagatttcaattagtagaaccwgtagaccaaaaaataattgtcagtatataggagattcaagcaacactgtcaaccaacttgatatatttgccttaaagaatgtgctgacaaaaattagaaacatggagaaaaaagtttccaagattttatgtgtaaaaaataaaattataaaattacaagaagaaatcatgtgaaaataattatattttttaaattttagactagagaaaatctaactgtagtgcrtaagttaaggaacataataaaataatgtaaatataatcatatgaagttaaaaattccttcagggcaaaaatcataaagtcaaaagataagttaaaaagggaactatttgctactgcaatcatatatgaaacagataatcttattacataaagtgattcaacaaataaataaacggccttctagctccaaagagaaataaaccaagggtataaagaaatagctcctggaaaagttttctcccattctgtaggttgcctgttcactctgatggtggtttcttttgctgtgcagaagctctttagtttaattagatcccatttgtcaattttggcttttgttgccattgcttttggtgttttagacatgaagtccttgcccatgcctatgtcctgaatggtattgcctaggttttcttctagggtttttatggttttasgtctaacatgttaagcctttaatccatcttgaattaatttttgtataaggtgtaaggaagggatccagtttcagctttctacatatggctagccwgttttcccagcaccatttattaaatagggaatcctttccccatttgttgtttttgtcaggtttgtcaaagatcagatagttgtagatatgcagcattatttctgagggctctgttctgttccattgatgtatatcactgttttggtaccagtaccatgctgttttggttactgtaaccttgtagtatagtttgaagtcaggtagcgtgatgcctccagctttgttcttttggcttaggattgacttggcratgcaggctcttttttggttccatatgaactttaaagtagttttttccaattctatgaagaaagtcattggtagcttgatggggatggcattgaatctataaattaccttgggcagtatggccattttcacagtattgattcttcctacccatgagcatggamtgttcttccatttgtttgtatcctcttttatttcrttgagcagtggtttgtagttctccttgaagaggttcttcacatcagccaaaaaacacatgaaaaaatgctcatcatcactggccatcagagaaatacaaatcaaaaccacaatgagataccatctcacaccaattagaatggtgatcattaaaaagtcaggaaacaacaggtgctggagaggatgtggagaaataggaacacttttacactgttggtgggactataaactagttcaaccattgtgggagtcggtgtggcgattcctcagggatctagagctagaaataccatttgacccagccatcccattactgggtatatacccaaaggattataaatcatgctgctataaagacacatgcacacgtatgtttattgtggcactattcacaatagcaaagacttggaaccaacccaaatgtccaacartgatagactggagtaagaaaatgtggcacatatacatcatggaatactatgcagccataaaaaatgatgagttcatgtcctttttaaggacatggatgaagctggaaaccatcattctcagcaaacgatcgcaaggacaaaaaaccaaacaccacatgttcttacttataggtggggattgaacaatgagaacacatggacacaggaaggggaacatcacactctggggactgttgtcggtggggtggggagggatagcattaggagatatacctaatgctaaatgacgagttaatgggtgcagcacaccaacatggcacatgtatacatatgtaacaaacctgcacattgtgcacatgtaccctaaaacttaataataataataataataataatagcttctggaaaagaaatgtttttaaatatatgaaagaatactcagtctcatagacaatatcatttttgccaatcaaattgctaacaattaaaatgtttgcttatattctgcacagataaggatagtgtaaaacctgattgtggatgtttcttaccaactccccatacaatggcttcatgttgatttcttaaaatcagccatggtggctggatgcagtggctcacacttgtaatcccaacactttaggaggccgaggcgggtggatcacgaggtcaggagttggagaccagcctggtcaacatggtaaaaccccgtctctgctaaaaatacaaaaattaaccaggcgtagtgatgcacacctgtagtcccagctacttgggaggctgaggcaggagaattgcttgaacttgggaggtggaggttgcagtgagccgagatcatgccactgcactccagcctggacaacggagtgaagctctgtctcaaaaaaaaaaaaaaaaaaaaaaaaaaatcagtcatcgtaaatgtatttacatcatggaaattgacaaatgctacaaatcaggtccccctttctctctcccagaaagccagttgtcaattatttaccagtacatcagcggatgaaagtgtggaaatataggcactctcattctgttgtgattcttaatataaagcagcataatctccactcagcattttgttaatacctaacaaagttactgactacacacatcttttgcagtaacaaatctacttytagggatgcgaccttaatatttttgtatatatgtataataatacattttgcaatagcacaaatgtttgtcaatagaagattggtttgaaaaattgtagaacattttacacaatggaatgccaatcagctgttaaagtatatgagaacaaagggacatcgtcaagatggcaactagacttgcctggtgcttggtttgtgccccacgactgccatcaaaaaggaccaaaacaacaaataaacaactatatctcaattggagagtctgagactgtataccggggagcaccaggggagcagtcagatccctgtggagcatggaagtgtagcgtaacaccacagagaggggagcaaggcatcctacctctccaatactgtctaccctgccatgcttgtcctggagccaaggggacttcttatggggagatggtaagcaggagatccttggcagttccccatcaccaccacaaacactggcagcaattcctacaagagggtcctccagtcttcaaaggccacaaatcttgtgtagacagttgtcacacatgtacacagctgcattgccccagagaaggaacctctgggatagcccccacccctgtggcctaagctgccatggcacagtgccatcctgaaaactggaaccattgctggaacgtgtcctgccctgggagacagtaggtaccaaatcccccatccctgtgggcccactgtcatttcactatgtctacacaagtgcctgcaccacacatgccctgactgcctagaatctagacttgaaaaaattactaagaccctgatgttaaaacccaggagtcactctatcctccagggaaacaacatgacctacacagtgtgaaagcctcatgcaactgtcaagcacatgtgtacccacccccgtcrtcataggcagccagaaggcagctttgccccactagagaggatcctgtgcagccgttggcccactccccacccaacaaccaacccagagttgaccctgccctcctagagtgattcctgtgcagctgcccagtccacatgcccctgtccccagccgtacagctgtcccagagacacctttgccccatcagagagagccctgtgcatctagctgcctggtccacatgcacccatgcttagcctgacagccagctcattggtagccctggcctcccagacagcctgccacacagcctgctggcacccaacttgcactcagcctgacaacaaacccagcacccctgcaccatcaaaactgcactaccactgtcacaaactcccacagcctaggccactgagacaattgcaggtattgcagatgaaaattacagataatgaatctacaaagaccacaatactgagtccagccagaaccagagccaatgcaccattctcaacagacactctaaggaactatctaccaaaaaaaaaaaaaaaaaagccacttatttcaaaagctactttgtaaaattggaaaaggtgactatttcagtagaggttcagatgtcagtgtagaaacccaagatacatgaaaaagcaaggaaacatgacatctccaaaggaactaaataagactcccgtaacagaccctcaaaaaaggatatttataaaatgactgaaaagaattcaacatagtgatcttgaagaaactcagttcaatacacaagaatacaattcaatgaaattaataaaataacccatgatcttaattagaaattcaacaaagagatagatgtcacaaagaaccaaacagaaatcttggagctgaaaaatgaaatgaataaaattgaaaaatcaattgagaacttcaacaacagactgaataaagaagaaaaaatttcctgaaagggaagataggtcttttaagataacccagtcagagataaagaggaaataagaataaaaagaatgaagaaaggttacatgacttacaggacaccattagtgaaaaaaatatttgcattatagaagtgtcagagggaaaagaaatagaaaaagtcacagaaaacctatttaatgaaataatagctgaaaacttccaaagtctgaagaaagctgtggacatccaaatccaggaagctcaaagattctcagtgtgattcaataccccccaaattgtctctgagtcatattataataggattgtcaaaagtcactgacaaatggagaattctaaaagctacaagagaaaaacattgagtcacatatgagggaatctccattagactgtcaataaatttctcagcaaaaatcttgcagaccaggagagagtgcaaaaatacattcaaagcattgaaataaaaaactgtcagccaataatactatattcgttaaagctatacttcagaaatgacagagaaataaagaactttccggacaagcaaaaactgaggaaattcatcaatgctaaactggctttacaagaaatgcttcaggggttgctgactgggaataaaaagatgatgattactaccatggaagcatgtgaaagtataaaatatactcatctaggtaaatccataattatactcagaatatcccagtgcagtaatggtgctgtgtaaatcagtcctcatatatcagtgtctaaagtcaaaaaggtcaaaaacctcagctgctacaatgagtggctaaaaatactctagacgtttttctctccccattccacagtttgtattttggttgccttaatttatatctttagaaaattaagacaaccaaaatacaaattgtgggatgaggaaaggaaaaagtctagagtatttttatgcagccaaagttaagttgttatcagtctaaaatattctacctacgagactctttttttttattgttattattatactttaagttttagggtacatgtgcacaatgtgcaggttagttatgtatgtatacatgtgccatgctggtgcgctgcactcactaacttgtcatctagcattaggtatatctcccaatgctatccttccccccttcccccaccccacaacagtccccagagtgtgatgttccccttcccgtgtccatgtgttctcattgttcaattcccacctatgagtgagaatatgcggtgtttggttttttgttcttgcgatagtttactgagaatgatgatttccaatttcatccatgtccctacaaaggacatgaactcatcattttttatggctgcatagtattccatggtgtatatgtgccacattttcttaatccagtctttattttagccccatggtagccacaaagaaagaaaaagagtaggtacacaagtgataacatggccagatgtgtaagtatgtacctgtagtccaaatactcatgaggttgtggtgggaggatcactggaggccaggagtagaagggtgttgtagggtactatgataagacctgcagataactactacattccagcctgggcaacacagtaaggccctgtctctaaaaaaactaagcaaaacaataatgaaacccagctatatgttgcccagaacagaaccaccttactattaaagacaaatatagattgaaaatgaaaaaatggagaatgatatcgcatgcaaatggaaagcaaaagcaagcaggagttgccatacttacatcagataaattggactttaagtcaaaaattgttaaaaaaataaaaaaagacaaagaaggtgattatataatgataaatcaattcaacaagaggatataacaattctaaaaatatatacactcaacaccagagtacacaaacatataaagcatatattattagatctaaaaggagagacatcctgcaatataataagagtagaagtctttaacaccccactttcaacaatgaacagatcaactagatagaaaaccaacaaagaaacattggacttacaatgacatacaccaaatgaacctagcagaaatatacagaagattccgcccaacagctatggaatacacattctcctcaactgcacatgaaacatttttcaggatagatcgtatttcaggccacaaaataagtcttaacaaattgaagaagatagagataatttaagtatttttttaggccacaatggtatagaactagaaatcaatcataacaaaaacttcagtaaccttactaatacatgggaaattaaacaagatgctcccaagtaaccaaaaggccaaagaagaaattaaaaggaaaattaaacctttctttgagacaaatgtacatggaaatacatcatatcaaaccctataagacacaggaaaagctgttcagagaggacagtttataacaataaatgcctacatggaaaaaaaaaagaatttctaatgaacaccctaactatgcacctcaagaaaccaagaacaaagtaaaaccaaaattggtagaaggaaaacaatagtaaagctcaaagcagaaatgaacaaatagaagctaaagaaacaattcaaaagatcaacaaaaggaagagttgcttttttgaaaagataagcaaaataagaaacctttacctagactaagaagaaaaaagatccaaatcagtaaaatcagagatgaaaaaggagatactacagttgatgtcacagaaatacaaaagattgtaaaagaccattatcaacaactgtacaccaatacgcttgagtatataggagaaatgaataaattcctggatacatgcaacctaccaagattaaattatgaagaaatagaaaatgtatcgattctgaaaagaccaataagcagtgaggatattgaatcagtaataaggagtcatcttccactaaaaaacaaacaaaaaaccagcccaggacctgatggtttcactgctgaattcacctaaatatttaaacaaacactagtaccaattctccttaaactattccagaaaattaaggagggaatacttccaaactcattgtataaagccagcattactttgatttcaaaaccagacaaggacacagcagaaacaacaaagaaaactataagccaatattcc

SEQ ID NO: 94742 - DNA, 65633 bp, Homo sapiens
  misc_feature (1)...(65633): n = A,T,C or G
atggcttattacacagtgacaaccaaaacactgaaaaatctagtgttcaggttttttgttgttgttgttgttattgttgtttttgtttctttgcagtatgggaagagaatagaggaggcagagatggtgttgactgacaatgaagaatttaatgagaaagtcatatgtaagcatctgaagaaagtcagggagctaagcatgcagatatctgtaggaacagcatccctgaaagagagaatggtaaaggcaaaggtcttagttatgggtctgaagtgttcaagcacagccagaaggtcagtgtatttatagcagagggaaagaagaggggaagaatagatgaagtcataaaaataatatactggaggagttagatcatgtaaattctcacagatcaaaataacttcagcatttactctaagtgagggggaaagctactgcagagttttgaagatttaacagaatcactctagctgctgtgataaaaatatattgaagaagcaatatatttttaatcatgttaaaatggacttttcatggtaaaaactagtcctaagctatcaatacctttaagagaaaaaagttatttactacttatgcaaagtttggtgggagggaagttattctgtaggggagctgtcattgatgtggtgagttggtactctaggctatgtttagcttgaggttctatcacctcaatatgtggcctacatgatcactgttttcatacccaatcttccatgcaatactctggaattgacacatgttgctttcattaacaccccatctaccaaaatgaatcacatagtcccaactaacaacaagagagttgggaaatggaaaggaatatatgaaataattgttgagtcttactgtgtcgtccagacagaaagggcaaaagtaggagactagccatgaggctatgacaatattccagatagatcatggctgcttggacaaggatggtagaaacagtgggaacagtgaaaaatagtcaaattttgaatataatttgaaggtaagataaagggaatttgctgaatgtcaaggcatgagatataaaagatataaaggagtcacaggtaactgagatgggaaaaactgaaagaaaagttttgaatactatcaagagctcagttttaggcctgttagttttgagatgcttattacacaacattgagaaaatgtcaagtaagcagttcaatatatggattgggagtttagagaagaggttcaggctgaagatatgatttggtagtcatcaatgtgtggttcttaaagccataaaactgaatgagatgacttgtccagtacaagtagggcaaaatgagaaaagattgagcatgggaaactccagcctttggaggtcaaggagatgaagagcaatcagcaaaagaaacaaagagagtgatcagaatgataggagaaaaacttggcaagtttggtgttcagcaagccaaatgaagggagtttggtttattggttgtttgtagggtgttttttgtttgactgtttttagagcagagtaaacaactgtgtttggtgagcaatgcttatagatcaagtaggataagatctaagaaattaccactggatttagcaatgtgtagaggtcactgatgacctcgagaagggcaatttcagaaaaacaattgggatacaaatctgattggaatattctaaacagaatatgggagaagaaaattggagacaacaaatataaaccaccatttccaagagttctgctattaacagaaagaaatggaatggtagccaaagaggaaagtggaaagaagagagtttttaaaaattattttatttgcttttggcttttttaaacaaaagggtaaataattgcatttgtatacactgatgagaaaggctcagtaaagtacatgagaaggcaggagatttacttcccgagagaggttagcttaaccaagactcacagatacagttaggattaataggtatgggaatcctctataacttggttcactttttttccccaaatgagattaagaagcaaggtcaccatctaagaatgaaagtgggaaggattcaaggtgacaggaaataggagaaagcatggagtcaaagatttactagagtaaggcaatgagagaaagtgagatcgaacagtaggagaagtggtgtgttttggaaaccaagggaagatagcgtctcaacgaagaagtggtcaagtatgccaagcattgctgagaagctaaaatgagaactgaaaaggcctattagatttagtaactgggaggtaactagtgaccctaagaagaactaccttgtggactgatgggatcagaagtcaggagcacactttggagtgaatgggagatgaagaaataagaataattatgtctctctctttagaagcttggctatgaagggtgaggggaatgcttttggctagaagccaggacaaatattgggatcaacccttctccctattgtagttctccaaagcatgccagagataggacccagcagttttcctgtcttcatgcggaaaaatggggagtttgggggtaaaagggaagatgtaatagggaagtacaagtagccatgtggtcaagtgaggaaaactagggacataaaccaaaggaagcaaaaaaggtaattctgtctgagaaggtactcagtaacatggaggaactgatgaagatgaaaattaacccaagaaaaccaccacattagcggggacctccatcaacacacaaaacccctgagaataagaatgagataaagaaccaacaattgctcagtgaagtcagacactcccaagctccactacttttcccgcctcccattccccaacatagaaaatcaagactgaaaatgagttaaattcacagttctcaaactgtgctaaggtgccccaggtacccttgccaccttatagaggtactataggatattttaaatatttgagggaaacatagcaatactcactgtttaccagacactacctgaactaccagcttgagatgtttctcaatttgaacattagatactgtttaattccttttaagaatgtcatatatttgaaaagctgggtttttggctgttgctctcatataaaacaagtgcttcctggaaaaccagagtggaataggaaataaggtggcatcaaggggtgctagaaaaaactgctgggacaataaagctaccaataactgaaaaagtttgggaacttctgggctagacaaagaggagggaatgagaaaggtacttctcagatacgaccacacatacctacactcagacacagaaaagattagagtgtattacatattcctgcaatcctttaggtcaagcctgatatgaggggagtgtaagaagagacaccttaatggagtttggacttgacatctctaaccaactgtactgatagcaactgaaagtgactagaaaattatgacctctacctgagatattgtcaaggaaaggataaggtagatttcattgagtacaactaaaagcaattaagtagagagaaaataaaattctgtcatgtaactattccactcagtcatgatacctgaattacagtagataatgaccattaaactctgcctgatagcccctgtagtaattcctaaccgtaggaggcagtggtaaatataaaagtgaattccttcatgcattcattcattgaatagatatttacagaatgtgcactatgtctggaacattttactaaacataagagtcacagggaggatgtgacggtcattttgcatgacacctgtcaccaactgatcccaacagttgatttggctgatctggctaactagctgggttccccttccttcctaactgccccatatatgtctcttccaaagctgcccactcggctgaggaggatgacttacccccataaaggaggatgatttttctgtaagggcatacgtgtagcagtgctcccttgctagaagctccaaacaagtcttcaaagaacacacacaaaaaagccgctgaaggatagtgtttaaaatagcatgaccactccaatcggtttataacactaccctattttttccaaagcacttattattctctgaaaagaactttatttacatatttattctgtcttgattttagaaagtaagcattgagagggcaggaattgattgtcttcttcttcttccttgcctcaacttctcaacatctgcatgtcccatgactccattatgggcacaattctatctataccctttgtcattcttcagatataaataccatataggttgatgccatacctcgtggtaacctttcccaagaatgccaaacacacacattcaacttcctacttgaaacagggatactgaatagataccttaaacttaatatatgttcctctattcccaatgtcccactacagtttctaacctagctatacttggtcaatcttctcacattcagtaaatggcatcatcatctacagatggataatatctagcttaagccaaaaatccagaatttatccttgcttactattcttcatctgcaagttcctatcaactacttctaaaacatatctcaattccagttccttctctacatgtccactttcaccaaactattatggtagtgtttttctccagacttctacagtagtccaactggtctttctgcttctgttttttgcattgcaaccggagaaattttcatacctaaactttgattctctcccctcaacacacacctacttaaagaatttgtcagtttctaaatgttcctcaaataaaaagggctcctaacaaatctacagcgtctacgtggtctggctctacctatctgatattttggtgggtgtgtggggaaggttcttctcatgtttgtcttctagttttcattaatatctgtctctctccttttccccaaccaatgcgggatgacagcagattgctggtatactgcttactgctgtatctctaacatttatttaagtggcaaaaagaactgtaagaggaactctggttctccagactgtagcagctacatctagcataaaacctctctttagaatcctcaaggccctctctgtatggggtgaggggtacattcctgaccctccggggatgatccctgcctcactccattcagaatctaggcagaacagtggattagaatgtagacccccagtcagaacaccaagggtcaaaacttagttcttccactttctagctgtgtgatttaacctctttgtacatcagtgtcctcagctgtaaaatagggagaaaagtacctacacctacacacacacacacatacacacacacacacacacacccctacacacacacacatacacacacatgcaataatttatttattaggttacctctccctagaggctgccatttctgcgaaatgaaccctggcaggggcctatccgtctgctaaatgcctactgattcaagaaaaaagtctgaactctcaacgttttgccccttaaactgagttctcctccctacaatggtgtctaatgagttgacagaataactggctagctttatattttaccatctaaatactgtaagaacatacccggtatttccacacccaagttctcctccttgctattcaggccaattcactttcccaaggccagggattaagagccgcacggtcagctccagatagcgctcgccgccgtgcgcccnnnnnnnnnnnnnnnnnnnnnnnnnnnnnnnnnnnnnnnnnnnnnnnnnnnnnnnnnnnnnnnnnnnnnnnnnnnnnnnnnnnnnnnnnnnnnnnnnnnnnnnnnnnnnnnnnnnnnnnnnnnnnnnnnnnnnnnnnnnnnnnnnnnnnnnntgctccccgccccggccgtgcgccccgcccctccgtgcgccccgccccgccgtgcgccccgccccgccgtgcgccccgccccgccctgtgacggtcccagcccgcacatgcgcagtcgtgagtcctcttgtccttgagcgtcaaccttctttccctgaagtggctggggttcctgtttccttctttgattgacaacttgtgttaaccctcgcacatctctgggccaatttttgcttgtaagtctttccggagacccctggaatttaaatcattagcaccgcgcccttccccgaagagtcttcgaagggttgccgcttttcggtggcgcagttctcgcgagaaggtgactttctttctcggtatttcctggtttccagaatccttagcgcgaggcggaaaaaatatttctcccagcttgtgttgatgccgcgattttgactgagacttcttcccacgatttctgtttttgcttctccaaggaaaatggcagctcccgagcagccgcttgcgatatcaaggggatgcacgagctcctcctcgctttccccgcctcggggcgaccgaacccttctggtcaggcacctgccggctgagcttactgctgaggagaaagaggacttgctgaagtacttcggggctcagtctgtgcgggtcctgtcagataaggggcgactggtaagggcgcgcccctccggagtctcccgggaaggcatttgggaagtgaccggggagggggagcgctgacaagagtaaaatggaaacgagtgggraagatggacttgtgtgatgagagctcccccatcctacctcttttttatcaaaatatctgctctgcgaagtggagttttaatcggctcgagtctggattagtcatagcactgcagaaaagggcaagtgagaacgacaaagcagaagaatggaaattagcttagttatattgagttttcggatccatcctgagagcctcacaacttttttgaatttggggttatttctcctggactcaagagtattcttacaaatgtgcatcaagggattttttaaagtcctacttcatttataagccaatgttaaatcgttcattaaaatagaggagaagctacattggtgacttgcgtaaattaaatgcagaatttcaactagaaaaagaggcttttcataaaaatttcccgatgacatcttttagggaacaattttttagggctgttaagagtacctgtgtaggaatttacacaattactttgttttgctttatatccaaagatattttagatttctcttcattaaaataggaatagcgatggtgcaagactcagtggttttaaagtttccctaggtgattttaatgttaatgtgcagcccaagttgagagttactgaattagaagaaagaccaattttgatcagtttaaatgtcacttatgcctgcaaattaaaaaaaaaaaattatatatggctcaatttaagtacatcaggtcatcgtgtatcagattagacaaaattagaatgtgcgatataattattaaagtaacttttaataagcattgaccagagctcttccttagcatagtgattcttttactgttgatttgtgtttcttttctgatggtttttaaaatccgtataatttatgtttaaaaatagacttctcccattgaacattattacaaagataaagcacaaaggaaatatgcaccttgaagaacgatttctctgttggtgaatgtttttaaactacgcattgttatgtatagaggaaagtttaaaatctttagatctgtcataaatgaaggaaataaatttttagttggttaaaagtgaccctctgtgtagaacaggtctttaaacttttggtcttttgaactatttgcatgtgtaaaacgtgtgtctttatatgatagaggttgcatagctttcatctcaagtctgactcaaaaagtattgaaaaccactggactgaaattagtaatcagttaaatggtcttgagttttcatcctttcccgtgattttattaacatgtcacattactccactggtaaaaagtcagatttctttgtgagaaactgaaattatattggaagtaatttgtaccttaactctgtttcagaaacatacagcttttgccacattccctaatgaaaaagcagctataaaggtatgactttttcttgacgattaaagttgtcaacaggatcctcttatacaatcttggttcagataatgtttaactgtggtttttaagaagcaaaagcgtttgtattccaacagtttccccaacagactacatttgatttgtcagttggcagatcttgcccagtcctttagtagattatctataaagaaaaactaactgcgtatgtaattaaaataacaatttctaaatgatttagattgataaatatctctgtgactgttacaaggtaagatgtttcaagtgttaaaaggagaatatacatttctttataatgccagggaatcattcacaggaggtgatcttttagctagaagtctaatgattaattggattttttcagaaggaaacaagtggagatgggccttctgggcttgcagaacaccaaataaagctgtgagacattggaagttataagtggagcaggagctaagggttgagatggaaatggaacttgaaaaatagatttgagtctgggagagaggtattgagtttggtttagtaggtggacacttgatacttttgagctggctcataatatgatcaggcctgttaaagatatctggtatagttcatatcatggattggatgtgcagaattattagaggtaggagaccaaatggaaggctgttataatggccaaggcaagaataactatctgaagaagacagtaagaagacaaagggggaagtaaatatatattcaatagagattgagtttgtaggttttataatataggggttgagagagaatagttcaggatatttagattgaggattgagttatttgggttgttatattagctgacatgaggatccagaggatgtttgcaaaggcataggatgaattcacttgtcatctgttaacttggaggggtcattgggctacttttatggaaatatttaaaaatattartgagagctgaggcaaggtgaagaatggaaagattcttcaaccatgtgaatagatatgtttgcccaaaggataataagctaggagagaagaatgggaaggagcagttaaagtaggagaactagaaaggaaattatcactgatgcaaagagaagtgtgttttaagaagatgaaatcctgtgatgatgcaaaatgaggaatgaacacatctattaaagtctttttgccatgaaacaatagaaatgacccaaattctcatcggtaaaaggaagggaagccttaaatcacattatatccatatactggactgcarctgtctgagaatgatgtcaaatggtatgtgttaatatggaatgatagcccagatagagtacatgaataaagttgtgaaacattatatatgatgtaacctcagattttttgaaactaatagtatacatgttagcatatacacagaaaaaatatggcagaactatacaccaaaatgttaaaaacatctttctctgagagtaggattacagagggctttcatattatattaatatgtacttttataatggtaggtaattttttttcagaaaaaaagtatttttaaaaatatatcataatacattgtaaataaagtatggtaatgaaaaacgcattgttttagggtcaagaataacttggaggagaggacatggagccagtcattgtctttggaaatgtctgtagtgaaaggaagcagtaagaggttaacggcaatattgatagggcttttaggctagagagcatttggcctaattggaaagtgatagattaagaaaacaaagggagaaatgttcaagaatagagtaagtagccgagtcaggtaggaggagttaacattaaaaatgaaaaaccataaatctttgaaaataagaacatatgtgatacccatttgagaagaagaaagttggagtaagtcaggttagatgaccttcatttcagataatcaaggcttcactgataataaagaggtctaaagttcatttagggtcttgaaaattattgaaacattttaaaattaactttgtatgatgatgtaaggyagggatcctcaaaccctgggacacagactggtacccagccacggcctggtacctaaccaccacctgttagaacctgggccgcacagcaggaggtgactggcaggctgaggaagctttatctctattcagggcgactccgcctggctgcctgagctccacctccagtcagatcagcagtgccttggcccctgttgtgaactgcacatgcaagggatctaggttgcgctctcaatgagaatctgactaatgccttatgatccgagatgaatcagtttcatctcgaaaccatcttctccccacccsccaccccagcctgtggaaaaattgtcttgcacaaaaccggtctctggttaaggcttgtactttcatgtgttcaaaaatattaagtacctactatgtgctagatgctgatttaggttttgggattatatgtgaagacaaagatgattatagttcatattctcaaaaggggagacagacaataaataataaactttaatattttagaagatgataaatgctatggaaaaaggacaagtagagcaataagatcaggagtgctaagtggggagaggtcaggctgtagttagggttatatttgaacaacaatttgaaggatgcgaagggagttagctaatgaaatttctgggagaagtacctttgaattagaggaacagctggaacaggggctctaggatgtgaccatgcctgtcacgttgttcaaggaagccactgtgactggagcagacatagtgggagtgatctgtgggagcaggagtgggagtgatcattggatttgaagtcagagaagtcatagaatctatattatgtagattatagtaaggaacttagattgctgtcagtaaaatagggagccattggagcaagggggtgaccttggtatttcaaagaattgcttttgctgttgtgactagactgaagggagggaaaggtagaaacagggaaatccgttaaaatattgtggtaattcagtccagaattgatggttgccttgaccacaatggtagtggttagcggtgattagattctttatatattttgaaggtagaagcaaggatttcttactgtatttattccagtaggttttgggggaacaggtggtgtttagttacatgaataagttctttagtcgtgatttctgagattttgatgtacctgtcacccaagcaatatacactgtgcccattgtgaagtcttttatccctcacccccactcccaacactttctcctgagtcctcaaagtccattgtatcattcttatgcctttgggtcctcatagcttagctcctacttaggagtgagaacatacgatgtttggtttttgattcctgagttacttcacttagaataatggtctcccattccatctaggttgctgcaaatgccattattttgttcctttttatgactgagtagtattccatgttatatatatatataccataatttctttatccactcattgattgatgggcatttgggctggttccgtatttttgcaattgcaaattgtgctgctataaacgtgcatgtgcaactgtcttttttgtataatgacttattgtcctctgggtagatactcagtagtgggattgctggatgaaatggtaggtctacttttagttctttaaggaatctccacactatttttcatacttactgtactagtttacattaccaccagcagtgtgaaagtcactttcaccacatattctgccaacatctattatgttttgattttttcattatgaccattattgcaggagtaaggaggtattgcctcatgattttggtttgcatttccatgatcattagtgatgttgagcagtttttcatgtttgttggccatttgtgtatcttattttgagaattgtctattcatgtccttagcccatgggattgttttttttcttgctgatttgtttggattccttgtagattctggacattagtggtttttttggatgtatagattgcaaatattttctcccgctatgggttgtctgtttgttgattgtttcttttgctgtgcagaagctttttagtttaattaagtcccatctatttatctttgtttttgttgcatttgcttttgggttcttggtcatgacgtctttgcctaagccaatgtctagaagggtttttctgatgttatcttctagaatttttatggtttcaggtcttagatttaagtccttgatccatcttgagttgatttttgtataaggtgagagatgaggatccagtttcattcttctacatgcgacttgccaattatcccagcaccatttgttgaataaggtgtcttttccctactttatgtttttgtttgctttctggaagatcagtttcctgtaagtatttgggtttatttctgtgttctctattctgttccattggtctatgtgcctatttttataccagtaccatgctgttttgatgactatggccttatggtataggcaaacaggatttcttaatgacttggatatggaatgtaggaaagaagcattaaggatgattacaagatttttgacctgaataattggaagaatggagttgctatcaactgaaatagagatggctcctggtggagcacatttggggctgggggaaagattaagtgaaatgttgaatttgaaatgtttgttagatatctatggggcgctatccattatttgaatatgtgttccttgacttcaggacagaagtctgtgctgaaattataaattagtgaatcattagcatacagatttaaagttcggatgctggattaaatcaccaacataatatgttgagagagagaggaagaccaggacaagagctctggagcattctaacattaagaacgtgagagaaggcacaagtcaaagagatggaggagtacaaaccagcgagctaggaagaaaactaagaatgtatgaagtcttgaagccaagtgaatgacatgtatcmaggaaggagtgattaactatgttaaatgcaaccaagtgaagactaggagttgatcattagcccaacaatgcaaaatttgttgtctatgataagcagtctcagtaaacttattaaagcattaacctgattgaaataggtttgaaactgaataggcagagaggagttgtagatagagggtttagatagcttgtacagagttttactgcaaaactaataatacaaatttaggatgggagaaataggagcatgttttcatactgatacggataatccaatagaggacagtaaattaacagtataaataagatcaccctccacacccctcaccacacacaattccagagcatagctaagtaaagacccttgaggagatgagaggatggaatttagtatataagttaagcagctggatttagataggcatgtggatagttaatagatgataacagatagcatgcatatgctggtagatggggggttatagtgggagtctgatattctcatgtcatcaattctgttgtctcaaagtagaaaacaaggtgctaagctaacggaatacaagaaaaatattgtgaggttaaggaacaaggagaaagtacaaaatactctctgagatataggtggaaaaaatagactaagattgtaataagtaattttgtggcataattaaaaatcaccctgagatttgtggtagtttttataaattgaaagtgaggccagggaaatttgttagtttgttttctagccattttcagctgcctgggtataagcagagctggcataaagtgggatttagctagatttttattttcctaagttataggaagtagtcctttaataagtaataaaggcttgatagcctgagattaaaaataaattaggaaatagtcaaggaactgtttacagcattagcaaaaaaaaaaaaagtataaaaattggtctctaacgaatcatttttggtacaattgtgaaatgtttactcttgttcttttaactgaaggcattgacaagactccatcaactgaaacttttaggtcatactttagtcgttgaatttgcaaaagagcaagatcgagttcactccccatgtcccacttcaggytctgaaaaaaaaaaaaggtatgtagatcagtaratcatacatttttgttacatttttaaagtgtgtgtttttttwaatcagttatacagttattgtattgttttcagactagcaagtaattggaagaggaatgacagatttttccattaaacctagtacagtaaaacagtatgtttatttttgctgctaattgtgcattaggaaccagatttaatattatgggttaatcattgtgaagtggcaagggagtgggctgaaacgaattcatcttcaactttcaatggagggaaaataactagtatgaagtctttgtatcagagatataacagtgtcatgaaatcaagactggcattttgtttctggctgtgactcttcgtagtacagcttcacaaatttgctttacactagtggttctcaaagtgtggtccctagatcagctgtatcatctgtaaacttgatcaaaatacagaaccttgagctttaacccagtcttactgaatcagaaacttaactgagggatggaagggrtgggaaaatgttgtagaagtctatgagttttaataaactctccaagtgattatgacacacattaaagacatttgattaccactgttttataccatgtaaactttagttttatttttgttcagtgacaattatgccatcttcatagtcttgctgtgaagagtatatgaaaatgtgtagtgctcaatgtaataataatacagaaaggattcagtgaaggttacttttagttaattttagttcccttcccatttattggtgtttgcttgagaaatacttgaaagtttttttttttttttaatgaagctgtttttataatgacatgtttgaaaaggtaatttatcttttctgtgtgcagtttttcaccctttggaaagataagattaactttgattctgtatgtcccaggtctgatgaccctgtcgaagatgataaagaaaaaaaagaacttggttatttaacagtagaaaatggaattgcaccaaaccatgggttagcatttttgtttgcttttcttttgcttttgttctgtgttatatacagatgtacagatatcttactgctttttgcttattatatattgtaatatacagatatcttattgcttattgtatattgtgttatatacagatatcttattgcaaataagataattttaaaaacaaagatatttaatgtcatgcatatttttaatatgttgaataaacattttgagttgagtttgtcactgaattcagtgcagataaagcatctattaagatgttcagagctacaagataaacctctgccaagaaatgcagtagcttatttttctttttaaatgtactttggatcttttaggaacaaggtaaatctaatagtactgtatcatttgagcagtgtgtttgttatcaggttacctaaaatgagttactgatatgaaattatgaaaacataagcatcttaaatgttttttgttttataggctgacttttcctttaaattcatgcctcaagtatatgtacccaccaccttccagcacaatcctagcaaacattgtaaatgccttggcaagcgtgcctaagttctatgtacaggtaagtagaataaaacttttcctaaaaggacttgttgtatagcttgatactttatttttcatgctgattctcattaaaagtaatcagactaattctagacagccagtgatacagtattttaaatgtaattaaatattttctacttccaagtagagacttttataaggtatcgtataagtggatactaataaacagaagctagtttggggaaatgtaatttggggatannnnnnnnnnnnnnnnnnnnnnnnnnnnnnnnnnnnnnnnnnnnnnnnnnnnnnnnnnnnnnnnnnnnnnnnnnnnnnnnnnnnnnnnnnnnnnnnnnnnnnnnnnnnnnnnnnnnnnnnnnnnnnnnnnnnnnnnnnnnnnnnnnnnnnnnnnnnnnnnnnnnnnnnnnnnnnnnnnnnnnnnnnnnnnnnnnnnnnnnnnnnnnnnnnnnnnnnnnnnnnnnnnnnnnnnnnnnnnnnnnnnnnntcagtggtttttatattgcaagaacgttacattcttagcgatgggactaattgaacatgtagaattgacattttaggaaggttaatctgagatatactaatgccttgttttaccttatgcagagattttaaaggcaagagatgggcaggtcttcctttacactcaataaatagtgttatagcaaagtttcttagtacataaaatacaagatgtgagttgaatcattttatatgtgaatttaaatgtcttaccactttaaggtccttcatcttatgaataaaatgaatttgcccacaccttttggaccaattactgcgcgacctcccatggtaagaaaactcttagaattttcaagtcaaaatttctcttcctgaatgggattattgaggctgaattatacaggtgttgtagcaacctctgatgtacattgaaaataaggaacgggtataaagtaatatgatgataatagtagaactgagaactgttaagtgagtaaaagccrgaatatgaaagaaatgcttttgtcaataaaggctatcatttcatccagtgttgttaagttttttgagccaaaacattgtgccatcctataaggtagttatatttaactaaattacctaaagatttcatagttctggttttgtcacaaatagagctttttttgcaaaagacgaaaaagggagctgatatttttattagacttgactatgcaaatctgtcaataatttagaagtaggctatacctgctcttgaataattttagttattcttttgctgtagtactagtatatttatgaataatagcaatgcaaaattattaatactttgagtgttcatatatgaatagaagagaatgtggtttgggatttgtttcttttctaatgtatgtactattaactttaggatttgttttttttttctttttgtaaccccaacacctactcaatgcttgatatattactggagaattagttaaggttatactagctgctgttaacaaataaattcttagtcatttaatacaataaaagttatttttggttatgtcagatcctttccaaaagtagagcagagggatattttgttctactgagccacgaaaaacacctgaattgtttcgaccatgtgccttcccaggttgatgaagacattgctacacagtctgcagatcaggaaggaagaattgtatgtgggagtttttaatggtctcatttcattggctataactcagttacaaggagaaatataactgcagaggagctttgaaaatttagttcagctgagggtaaaggaagaagagacaaattttgtcatcagctagtgatctgccatacaaggtgttcccttaatatgtgtagaatgtgttaaaaaaaaaaaaagaccwtgtgatagaaatgagaatgaagtattcagatggagtttgttctataaatattttggactgccatagtatttttgttttattcttttaattagtatgaagactatatgccattgcatgcacctcttccacccacatctcctcagccacctgaggaacctcctttgccagacgaggatgaggaattatctagtgaagaatcagaatatgaaagcactgatgatgaggaccgacagaggtttgtaacatgaaaaatttgtttagtttccaagaaacatagaatgtaagaaagagactcttsctctccctagattttgtgtgtataatacttaatagtttggggtgattagaatttgtcctcagccccccagcacctcaggcatatatagcagctataaattaagacctgagaatagataacaagacctaagtgaaaatttttggattatgcataattttttagattgatgattatggtattataaagtacgttcgagccttgttatttgtggattccatatctgagaatttgcctatgtgctaaaatttatttgtgacttcaaaatcaataatcgacgtgctttttatttattattattattattattatttttgatacggagtttcgctcttattgcccaggctggagtgcaatggcgcgatctcagctcaccacagcctctgcctcccaggttcaagcgattttcctgcctcagcttcccgagtagctgggattacaggcatgtgccaccatgcctggataaatttttgtatttttggtagagatggggtttctccatgttggtcaggctggtctcgaactcccaacctcaggtgatccgcctgcctcagcctcccaaagtgctgggattacaggcattagccacgtgcctggcctcgatgtactttttaaagtttttttgtggaaatggacattgtaccatgtgatgaaaaatttgagtcagccaacacacacgttctgagatgaagtcaaataaagacaccctctgccttcttgtttcagttcttatactacaaacaagtatccttttcatagtctgttcagcactaccttttttcacatttttgagtttttttgttgtgactcttgtgtttaaaatggcccttgagcatggtgtygaagtgctctttagtgttcctgagctcaagaacgctatgtcaagcctgatggagaaaatacatggctttccttcaggccagagttacgatagtattgactgtgagtcaatgttaatgaatcaacagtgtatattaagtaaggtgttcttagacataaacacatatcaaacaaggtaatgtattgatcagatgacaagatgttgtaaacaaagacttccaagaacctaatgctgaattttcctagggacagtgatttagtgtttatggtaaccttagaacataacttagaacataacatacatcgaccatgttcatgttttgacagatgcttattcttctggactctacttacctcagaataatttctagagtaattctttaggatttcatacaaaactataattagtaactactgcagatgaattattctttttattgatagttcttgacaatctatgcattttatttaaggattctgacatagaatagtacattgttaataatggtcatgtatataatccacagcctggctcagaacaggaattgccaaactgtttctttataggtccaaagagtaaatatttttgactttgagagtcatgtggtctctgttgtggctactcagttctacccttgtagtaggaaagcatccatagatagtatacctaatgagttggtgtggccttattccaactagactttaattacaaaaacaggcagctagctggatttggtcattgagctgtagtttgtcaacccctgtctgcaggactctaatgggaaaatgatcaaaatcttaggtgactgtgcacggaagaagtggtatataggaggtgtgagtggttggcatgaggcagaacccaagcagactctgagcaacatatacaaataatcgcaatttgactgagtcagtgtccacccaagtagtggtacaatgtgcagtatattatctttctaagggaagagttaaaatcaaagcataggtggggctgaaactataaaatgggagtgaatacactatctgtcttaaaaagagacatttagggaaacaggcagtgcctgatagatggttactttaacttgttgagtgttaactgcggactaattacttaacctctgtgaacttcactttctttataaaaataatgatagtaattagaaatgctacagtaacctggccaaacccttttttgtttgtttacttaggtttccattaaaggatgtagtgaggaattctgccagtaattcatcttgagtcctgagagagaacatagcctttgagtgtaccaagctctagtttcatgcttctcttttatcttcaggaaatgtaacaagacctaaacaaaagaaaaatggtacaggttgagtatctctaaactaaatctgaaatccaaaatgcttcagactctgtaattttttgagtaccagtatgataccacatatggctggcttagtgacacctttgcttgttttctttctttcttttttctttttaagacagggtcttactctttcgccctaactggagtgcagtggtacagtcatggcttactgcatattcaacctcccgggctcaagcaatctgcccgcatcagtcccagtagctgggactaaaggcatgtgctaccacacctggttaatataatatttttcatatttttgtagagatagggtttcaccatgttgcacaggctggtctcaaaatcctgggctcaagtgacccgccctccttggcctcccaaagtgctgggattataggcgtgagccaccatgtccagccaacacttttgctttctgatgtttccatgtacacaaactttatttcatgtacaaaattattaagaatattgtataaaattatcttcagtcttttgtgtataagttgtatatgaaacttaaatgaatttcgtgtttaaatttgtgtctcatccccaagagatctcacgtatatgcaaatattacaaaactggtatacttctggttccagccattttggataaggggtgctcaacctgtactattcatttattcagccaataattactgaatatatgcctagcactcttgtagaggcttggtgtactttgggtcagcaatttataaatatggacatatactttgaataactaaattttttcataaagtttttggtaaaccatggttttttaaaagggtttaaattacagcatatgttttcatttttcctcagggaaaaaaggtttaaagcttatttgaacaatgccctccttcctctcttttgtattttgttgtgtgtgtattttacaaataccaccctgagaagtagagctgggactagcggtttccaagttcctgctctgtagatgatacagaaatgcctagacaagatctatctttaatattaaatattcatattcttaatagagaaaagctatgtacaggtgttgtcacttcctgaaactacttcagagcatagtacagtatttgaaaacagttctcaggtaatttaagttaccttatttatataatgatttgcaacagttattcacaaaatgcttttaaatgacatatttcagtccaggctccgtttaataattagaatatgaataaaaatgatttaagaacattaatattatatcgattttattattgtatcttgttcagccgtttggcatgaagtccagccattttatttyggcaactgcttatgatgaaacatacattttaaaaattgataatatgtaattaagtctatttttaattttttctaagtaagatgaaagctaagcaaggcaatttagtatttgagcttttatcaaattgattatctcttaattgatggtgttctatatatttgatgtaagtaaatcattttataatttaaattatacaccaaaatacaaatttaacgttaatagaaacagtggtaaatagctatgcttctagaaaggaaattttgtttatcatccctctcctcattgtagaatgaacaaattaatggaactagcaaatcttcagcccaaaagacctaaaacaataaagcagcgccatgtgagaaaaaagagaaaaataaaggatatgttgaatacacctttgtgtccttcacacaggtaattttatttgaactaagaaatgagggttgtctgtatgtactttgtttacttgcttaattcacatcattcttcattctggcatttgtttcctgtcagtgttcttggtttacattggcttcctagttaccaaatttacaaatattcataattctctcacagttgaccactactctcttctctgtcgtaagccttaaggtatttgcttccagcttcctgtctgcagactcagaatatcttataggcacttaagatattgtcgaaaacaaaattcatttactttccttttatcatttcttttctctttctcctcgtgcatttacagttttgttagtgacattactgtcactagtgtaatatattagtgaataatgtcactaatataaacatcagtgtgtttatatacagttatttagtttctcttaactccatcacctgatatcaaacattttttacttaaaaagtacccagcagataaaaattcacatatctttacttggcacacaggactaacccgagtgcctttaagtatttattgagtgtatggtaaggttttctgctaaatattgtgtgtagtttgaagcatgcttttaaagtttaatgctgtcttttcaaacagtgagttaatagtcttaagtataataagccaaatgcacagatgattattgcattagcaattataatacatgacataggaaatataaactaagaactaaaaggttgtgagaaaagagaggtcacagccagttgagaaatttgaaaaggttgtaagagagaggagatatttgagctggccctttaaggaggggagacaaaaattaggcagggaaactgtatcctatgtgagtggaagaataaaaggaaagtttccagaggtaggaaaatgtattgaataggaatagaaatgatgaaagggaaagctagaaggatgtgaaacctcccctaaatgttaggcgatggagtttgaatttattgaagaagccattggaatgccattgatatttttaaaaattaagaattccttttgcactactttatcttgtaataaacttcctaaataatttgcagatttgggataagggtcagaccgtagttatccaagaatgttagtagatataccttacctttccactgtgttttggacattttgttatagtccagaagttgccagtaaaatgatacttgttttatacatgtttgatttggagtattttacctttttttccctttgaatctttatagtgacactgaacagtagaaattaatgtgagccacattaaaattgtatgaaaacataatgtaaaatatcttgataactttttatattgattatatgctgaaataatattttggatataatgagaaataatacgttatattatcaatatttcatctgtttcttttcatggttttaatgtgactattgacaattttaagtcatcaaagtctaatattatatagatatgtttaaaatatcaaacatagaatgcactgttttgcatattaataaatatcctggtgtttagaatcaagagtcatcaaatcccttctctgtcatttacagaatgaccttatacaaattattgacatcgctgaacctcggtctttttatgtgtaaactaataatttagtagtacctatattagagcattaaagtttattaaactaataagtctaagtcactcactttattgaatatcaaaagtgtagtgagtcctttatcagtgttaacttttaaaatttaaaataaacttgaaataatattttactcaggattttatttgcaattacaaactaatgctatgattgtttttaaatagcagtttacatccagtgctgttaccttcagatgtatttgaccaaccacaacctgtaggtaacaaaagaattgaattccatatatctaccgacatgccagctgcatttaagaaagatttagaaaaggaacaaaattgtgaggaaaaaaatcatggtaaggatattctagttatttcacatgctgaaatcaacttattgtgttagaattaagttttacatataatgtttcgtattttagtatttgtcaactttatttaaaatatgcaattagtgtttcccaaaatcatggaataatatccgctttcaacttttttatataacagaaattgatggtaaacggtgagattgtcactgttaccctttgctaataatgacctctagaatgaaatttagtgctttttgctgatgtttacactaaaaatataatggagtttcttttattgactttttcatttcttgtttcatgccgtggcctatggttttattagtgtaactatattaatactggttagaaaacaagcaatgtgactattttgtgagttgtagacttaatgtaaaaatacatatatatattttttaatccaaaagacatggaagattgtttgccaagaatactattcttaagtttaaaacaaatgtattgaaattacagattttttttacttgttttaaccatgaacttgatgatataatggtgttcttttgttctttaagtctttattttgaaatttctgaaataatacaagttgatagaaatgtaaccaaaacaaagtaaaattgttaaaaagttaacacctcaaacctcactctcctgtgtcctactacctaaaggcaaatactgttagcaatttggtatgtgtatatacatacatgtgtgtgtgtttgtgtgtgtgtatgtatgtatccttccagaccttatcctgtatatgtatgaacacatttcactcttattttttaaatgaacataatgttttgacggtatttatcattcactcattaatgacttgttgaaagtttgttatctagcggcctccatggagaagtttgccatggtctcttttttgaagtttacaatctagttaggggtagcttactatgtcaaagcataaacatatactttacattttttggctgtataatagcccttaatataattttgtcaatattttatcatgcctttttcatagaagttgaggttgtttcccttcttttactattgcagaaaatactggaatatgtctttgcacatatatctttgagcacttgtgtgaatataggatagaattctagtaagtattgcaaacatagtgagtgaaaaactgtgactagttttaattcctatcttggatggtgagtgagaatgtagtgccttttcaggtagctcctttttagtgtgtttatttaacatttttctttttataaatttttcttatctcatggctagtcaccctttaacaaaattttttttttttactatttggacctttatagaaaatgtttgtgtatgcctcttttagtayattgagaaacaccaaagaattttagtgccagaagatatattattgaatataaaataggaggtggggacccaaaaactatttttaaaggagagattcttaatggttaatgttaatattgaactcttagatttacctgctactgaagttgatgcatccaatataggatttggaaaaatcttccccaaacctaatttggacatcacagaggagattaaagaagactctgatgaaatgccttcagaatgtatttctagaagggaattggaaaagggcagaatttctagagaaggtaatgtcaccgaaataaactaagcacatattccattttacatatctttgactctatagaaacaaaacaaatctgtcatgccatttaccttaatttaaggcacatactttaaaacatctctccaattaatgtttgtaatcacttcttctgttttttttaaatactcatactttatagtggagggaacgttcctttccatacagtgtttccagtctatatttaggaaaaaattttgttttcattcctaaaactttcatgtggcatttaaaataagtcagtgtgtcccacaagtctggagttatattttccaaatgcagctgatagactgtcacaaatactgtgtctgagatacatacaaagcgatttaaaaaaaaatggtgattagaaatacatgattttaggattttatatcctaacatgataattttctacttctcaaagacttttactgttttggtacattgtcagaaaatatttagaggctttagattgatgtgtagcacataatttttcctacggtaatgggaaatagacttctagctaggatttttacacaaaacatctatctgattttctagaacagattactgacattaaatgagaggagctatacaagggttcttaggccatggtttgtctgagatgcctgatactgtgtttacttcattcttgcatttaaatatggaggtggctgatggtttgggaaattcactttaagcaaaataagtacccaaatcaattaacatatatactttgctcttttttataacatgactcatcttaacggacctttaatagtagatattttattggacaaattgtagttactctagaagtctgaaatttttaaaacaaaagttatatatatataaagttttttatataatcaattcagattttcagtgagtatatttaaacccatttgtaatattgttactaattttgttactaattttatgtaatattgttactaattagttcatatgaaaatgaactaattttcattttatgttaaagtgaaaattttaacattttcataaagcttattttgtctatttaacaattaggtttcaaaattgtaattatctttaaaaacttgcttaaaatattttaattttatatctttgttttttgttttttaataagaaatggaaacactttcagttttcagaagttatgaaccgggtgaaccaaactgtagaatttatgtaaagaatttagctaaacatgttcaagaaaaggtaggtataaattgattttttttcatgtaaatgaaaataatttgaaggttttatagttgatgtgttaaagtctgtttgaaactacctttaagaatgtggttttcttactgtgcttcagggcatgacaaattattgtttagtattttcaggttaattttttattaaaataatactctcatagcttgggttctctggcagtaaatactgagacagagtttgtggtatgtattaatttcctagggctaagtggctgaaacaacagagatgtgttgtctcacagttctggaggcaaactgaagtcaaaagtgtggcaggattggttcattctgagggctttgagtgaaggatctgttctgtgcctctcccatagcttctgctggtatgcagaagctggcgaactttcaccttccttggcttgtggaagcatcaccacaatttctgcctttgtacatagcatactccctttgtgagtatctgtccaaatttccccttttgaaaggccaccagtcatattagattaaagcctaccttagtccagtatgacctcttctactgatgcattgatgtatttatttatttattaagtttttttcccctggctttgttatttgtctttttcttattgaaattctaggaccttaaatatatttttggaagatatgttgacttttcatcagaaacacagcggatcatgtaagtgacagtaaaatacaatcttcaattatattttgtttttatctattacaaatttaccactattttaatcccatcattttccttttagagataaaaattatatgaaaaagttsgtctattctgttgcacaattaatcttttagatgtctagaataggagttggcaaactttttctgtaaatgggcagatagtaaaaatttaatatttttattttattgcagaccatacagtgtctgttggaattactcagttttgtagttgtattgtgaaggcagccatgaaacctgaatgaatattcatggctgtgttctaataaaactctttacagaaacaggtcggtgatggattccgaccgtaatcttccctctaaatacatggttctcagactttaacattgcataagaatcacctggaaagcctggcaaaacagttttctgggcccacctgcagagagtctgattttctaggtttcatgggtaggactcatgaatttgtttctaaaaggctcctggatgatgctgaagcttctgatccaaagactatgctttgaaaaccattctttcaatgcatcatccaggaatatgaagcaatgagtcaaaactttttagattcttattctgacagtagattgtcatcttttaaaagaactgcattgagcaaggcttccagttttgtaaaagcaaaagagagggttgtgatttataaatgttataaaagctaatgtgttagtctgttttcacactgctgatagacatacccgagaatgggcaatttacaaaggaaagaggttaaatggaaaactcacagttccaccagggaagcctggatccaggcatttccatatatcctctgaaatccaggtggaggctcccaaaccccagttcttgacatctgtgcactggcaggcttatcaccatgtgggagctgccaaggcttgacgtttgcatcctctgaagccaccacccaagctctttgttggcccttttcagccacagctgccgtggctgggacacagagcaccaagtccctaggctgcacacagcacagggaccctgggcccggcccacaaaatcactttttcttcctagtcctcaggtgatgggaggggctgccatgagacctctaacatgccctggagacatattcctcattttcttggggattaacattgggctcatcattacttatgcagatttctacagctggcttgaatttctcctctttcttttctgttgcattgtcagactgcaaattttccgaacttttatgctgtgtttccttttaaaactgaatgtctttaacagcacccaagtcacctcttgaatgctttgctgcttagagatttcttccgacagataccctaaatcatctctctcaagttcaaaattccataaatctctaggtcaggggcaaaatgccaccagtctctttgccaaaacaaagagtttgctaaaacataacaagagtcgcctttgctccagttcccaacaagttccacatctccatctgagaccacctcagcctgtatttcattgtccatatcattatcagcattttggtcaaagccattcaacaagtctagcgagttccaaactttcccacattttcctgtcttcttctgagccctccaaactgttccaacgtctgcctgttacccagttccaaagttgcttccacatttttgggtatcttttcagcagtatcccactttactggtaccaatttactgtattagtctgttttcactctgctgataaatacatacctgagactgggcaatttacaaaggaaagaggtttaatggaaaactcaaagttccacgaggccagggaagcctcacaatcgtggcggagggcaaggaggagcaagtcacattttatatggctggcagcaggcaaaaagagagagctcgtgcgggcaaactgccattattttaaaaccatcaaaccttgtgagactcatgtactatcatgagaacacaggaaagacccacccctataattcaatcacctttcacagcgttcctcccatgacacatgggaattgtaggagttacaattcaaatgagatttggggacacagagccaaaccatatcagctaatgtttggagttagaatttcattctttacaataccgtatttgttaattccaaagtatgaaagactccctgtcatataaattaaaagtaagaagaagtagaaaaggtaagaggcttttgagtgcagataaaataaagaagtgactataactaaattttgttttaatcttcaagtgacaccaatactttacaaatcttatctggcctatgtatttttttagataggtatacacaaatggaaccgtgtttcacaattctctatttatatccattaggggcaaatacctcttcttaccagaatgccaaaatatattttttctgctggccatgcaaaatgctaggtctttttctttgttgccatctttgagtcatgattataaggaaaaaaaaattactttactgcattttttgatagttttttatgtattactttggtagtctcatagactaaatattaggtaatatttcagttgcaaattacaatctgatttttctaagtagcttttgactatgattttctctcaaaaatttcaaaaaatggatacatggaatagtagatcactatattaggaatttaaaaatttggtttgtgtttctgactttagatcttagctatctgctttgaagagtcactcactgtctctggacatcacctgtaaaattatggttttaattagataatcattgaggttcctttctactccgaagttctgtaattgcttataataatataatgaactctaggccaggtgtggtggttcatgcctgtaatcctagcacattgggaggccgaagcgggggggatcacttgaggtcaggagttcaagaccagcctggcctatatagtgaaaccccatctctactaaaaatacaaaaattagccaagcatggcggtagacggctgtaatcccagctacccggggggctgaggcaggagaatcgcttaaacccaggaggtggaggttgcactgagccaagatcacgccactgcactccagcctgggcaaccaagcaggactctgtctcaaaaataataataatcataataataataatataatgaattctataattgcttataactggctgttaatcctttctatttttccattcttggttatgtagtagtagttgtttttttaatcacttgagcagatagtgccagattgtaaggaacttaaaaaattgagataaatagtaatttaagaagtttgcagccagtgcggtggtccacgcctgtaatcccagcactttgggaggccgaggcrggcagatcacgaggtcacgaggtcaggagatcgagaccatcctgactaacacggtgaaaccccatctctactaaaaatacaaaaaattagccaggcgtggtggcggacacctggagccccagctacttgggaagctgaggtaggagaatggcgtgaacctgggagatggagcttgcagtgagcggagatcatgccactgcactccagcctgggtgacagagtgagactctgtctcaaaaaaaaaaaaaaaaaaaagaagtttggttttctagttgctaatagtataatttttaaatcacatacttttatgatagttgagaatagttaaaagtatatcttaaacaaatactacctacttgtagaatcaattttagtgcagaacatgaaatatatttttagaaaactgaataattgacgtgcctatcaaatagtgtagtcacttttatttgaaatagcaaaatgttagattattcaacacattttcattcacattgaaactgacattctttgaatcaaaactgtttcttccttctaggtttgatatacgtttgatgaaagaaggtcgtatgaaaggacaagctttcattggacttcctaatgaaaaagcagcagcaaaagccttaaaggaagctaatggatatgtgctttttggaaaacccatggtggttgtatcctttaaatccatctatttcaaaactatataatttttagaaggatataactgaaattaattttcatgttaccctttagaaatttccacaattggcattctagcagtagatattcattcgttacaattaaacccaccttactgagtcagatgacagtgttatttagatttttaataaaagagcttcagcagcatgaggttgttcaatttcagccaagtttaaatgtttcacttatgcagctcaaaagtacataggcatgctaagagactagagtatccagaagtacatttggagtcataaaagaactaattcattttatcattttattgtaatttatatttctacatgagaattttaataactagagtatatcattgattaaccatcttgcttttagtagtcaatgcagtttgcaaactagaaatcagcaagataggtaaagaagcaaaggcccaggtataaaaaataatgactgtaaaggaaaagttaattattaatttcctctcaagtcatgaagagaggcaggaggcactcaaggtaaattaaaaaaccatactcccaccatacactagaaagtttttgagaattatttagaaaagattacttgcatattcatgaaggaaaccttaattttaaattattagcagtttgctcgatctgctagaccaaaacaagatcctaaggaaggaaaaagaaagtgttaaaaattaataaaggtaagtgtgaataaaacataataaaaagacaagactaattcttgagataaaattaagaataaaagtttgacaaggtagtaattcaggtatctctttttttttttttttgaggaaatacctatctgtgcagttaagtcccattaaacgtcaaaactataactacagattaaaacccatttatatgtgaaaattaagtttggagaatgaatcttataaggggagtgtgcctgttactctttttttaactttttctgcctatagtaaagcaatggttcttaaaccctaatatgtatcatatcacttggagagcctaataaaacacagattcgtaggttccttccttccctgaaagagttgatttggtaggtctgatgtggggacctagggaaactgtttataccagttttccttttaatgaggggatttccaggatgctggacatttagtgctgaaatggggaatgtgtctggtaagccaagacaggtcggtcacccttgttggcacctgaaaatttgcgagattaatgaggtttcaggtaatgatgaggcatcttatccagagaccacagcttgaaaactcctggrataaacacttacagatacattttctaactcttaaaattaacctaaagtaaatgttaaaataaaagttaaaaaaaaaaagtcaaactgtcattaaaaataattctggctgagcacggtggctcacccctgtaatctcagcaatttgggaagtggaggtgggcggatcacaaggtccagagatcaagaccatcctggccaacatggtgaaaccgactctctactaaaaatacaaaaattagctgggtgtggtggcgcctacctgtagtcccagctacgtgggcggctgaggcaggagaatcgcctgaacctgcgaggtggaggttgcagtgagccgagatcaagatcacgccactgcactccacactggcaacagagcaagactccatctcaaaaaaaaaaaaaatctacagtgctgagtatataaaattattaacacatttcacaacaatatgtgtttgtggagttaaatattttttgtctttaaaacaggtaattttagtgcatacttaatttgatgattaaatatggtagaattaagcattttaaatgttaatgtttgttacattgttcaagaaataagtagaaatatattcctttgttttttatttaaatttttgttcctctgtaaactaaaagaacacgaagtaattggtcacaattactggtgtttaactgccaaatatgggtaaataagggaaaattttgtttaatatttagtccttctgagatggcttgaatatttgaattttgttgtacgtctatactgggtagtcacaagtcttataaacactttagaggaaagatggatttcagtctgtatttttaaacatcatttattttaaatctggtgctgaaaaataagaaaaaaattaaactgcattctgctgttcttctttagaagcattcctgcgtaaatactgctgtaatactgtcatgcaaagtgtatcctttcttgtcgtatcctttttggggcagtgtttttttgtttttttcctagaaatgtttgtccttcccccacctgttgatccaggttaaggaatacttttttacactttattcaaatgaaatatttctaaaattatttgtatagactgaacagatcttttatgtgtttttagatttgttgttgaattttctgtgctgtcctttatataattttttgagggaaagttagtgaatcaggtcaacttacttagagaatgtgttcatttactttaacccagaatacagtcttgtttcttctatttgtatgtttcctaaacctaattcaataacatatgctttctgttgtgtaatatatctggtttaggtatttataatgtgtttaaaatttgggcaaaggaaatgtttttcttttaaaaagtacttacattgaaaattaagatgtctggattactatgtaaattctagagagtagcagacctctcatctgaagtcttagtgaatctcttttgacatagatagcaatagaagtatctttcttctttcccctttctttttctaaacaagagaagaaaagcgtaatagaggggagaacacataatgcccactaagggtagtgcattaaggaaaaacagtcttggcaggtatataggaatagtggtttccagactggttgatgaccgtaatcaccaagaacagtggttctcagtcttggctgcacattgcagtgatctggaacttaaatactaattytaaaagggtgcagtggctcatacctgtaatcccagcactttgcaagtccgagatgggagaatcacttgagcccaggagtttgagaccagcctgggcaatgtagggagaccctgtccctacaaaaaatacaaaaattagccaagtgtggtggcttgcacctctggtctcagctacttgggatgctaaggcaggaggattacttgagccccagaggttgaggttgcagtgaaccatgatcacaccactgcattctagcctgggtgacagagtgagaccctctccctcctaaaaaaatccttaagaaatatattgatgcttggttcctttggtcagaattttgatttaaggtgttgggagtgtagcacagatgttggaataaacctctcaaactgattttaatatacaaacaaggtcgagaaccaccaaggaagagtttttatgcataaagattcctgtactctaccctagaactaatacatctgaatctctgggaatggagtataacaatcagatttgaaaaggtttctttagtaattttaaggactgaccagtttagacactgctttgttagagtaaaatgattaggtacctagtatcaacctagccatccaaccttatattaataactaggaaaataaagggttggagcctctgtgtttctttgttgaaaaatctgctactattattagatctgtgaaaacaattgaaaattcggttattatcaccttaaaagtacaaaacctatagattttgaaaatgtaattatttttctgtaggcatagttaaaaagattttgtaaatgttataaatcagtttctttataagcggtttatttagataaattttgttatactgacatgattcactaattttctaaatataaatggttcagctcttagttatttttaaactaatgacctgtgttatacttcctatttttaatgggcttttatgatgttttaggtttttttgaatcccgtgtccttcaagtgyttkctaactttgagaggaagaaattgaccmcctggactatggaactgtgcgtaacagctttgaaagtgtatttaaaaattaaatctatatgcctttaaatcagtgaattggaaacatattacatgtattttaatgattttcctcaaatataataaattgtttcctttccaataaaatagtgtttgtattttttctttatctggtttaacacatctaggaaaacataatattataaaaaatatatataatttgtaatataatttttttatgattacaaatactgccttttaaaaattcttacctggataccaaagcactttcacattttttttattgtaatcttgttttttgtaattattttatatttgtctggctttgagttttactgggcttttggttttttggaaatgggggtttatcccaatttagaaatttgtatccttgctgtaatacagtcttccatttttgttcccccaaatctttcatctgtcagaacgtcactcaaaggtgaaaatatttcccacataaaattattctgttcctttaatgaaatgagtttcagctgtatatacgtaggaaaacattcttttttgtcaacttgacgttgacaaacttggtggatgtcaggagtaagggtattcaagagaattttgaagaagaatttaatatagtgagtatcgaagacaactcttaaagagtcttgcgttcaaggggttgtgagaaatgggttgttaatggagggcaatgtagtatcaaaaagctgtttaagattgatgatatagcaggtttgtatgctaatcagactgattcagtagagagaaaaaacataatgccggaaagagagggatattgctgaagccatagacctggtatacaaatagaagggttcgttttaaagataggcacacaaacagctcattagtaacggtaggatgaagggcagattatggagttctagatgtcggtagttcagtaaataggagcatgtcaaatttttgttatattttctcagagaaataggaaacaaggtcataaagagggaggaagtcatgaaggattaaggaaggaaaaggagatgtaaaatgggtatccaggaatgtaggaaagtaaacatactcttaggcaatctgtggtttatttaagtggtatcagtcaatgtggttttgtgtttttctccagttgagttcagcataggtgctatcactgaaaaagtacagaattcaatttaactaaagttgagatttccctaggtgaataagacagtgatgagatgttgttacatttaagagaaagataataaaagagagatatggaaagtaatctgggttaaggagtgaagtgagaaaataaagaaggttgagacagtggaaaatggtatcatcaattgtagattgcagtgtggttgaagatgcattggagttcttgaggtacaaactagaaatttgggagatttaaataagagtggggtggctgaaattgaaattagagtataataatatataatagtactaagtatagtatactaagtatagtataatagtactaagtatagtatactaagtatagtataatagtactaagtatatagtacttagtgattataagttttaggatgtgaggatgggagtagcatakaggcaaggtgatggaaggagatgaattcaagaaattgggaacctaggagattgaaagcattatctaaatgaattttgaaatctcaacaagaactgtgctgagtgctttttgtaattattttatctttactaccctgtgagaagacagcacttccttttgtgagtaatggaaagctctttaatgtgtcaactgtaagatactttattacatttaattatctttagtaattcatgctaacaaataatgacctcagtaggattattcagtagatatgtgagctaaccccctgtgtcagacacctaagagatacaactgatgattttcaagaagaatagagttctcatcccaagtacttaagctgcaaaatgtcccaccctatattttctgaaaacaaacggtatatagagcgtccatttaaaagctaataggaaatcttaaagcgtgcgcgcgcgcacacacacacacacacacacatacatacatacatacatacacacaaaacattgaataagcatcaggaaatatataccctgtacccaacatgcacraggtctaagcaatgaagaaaaagccaggatatcaagtaagactggaacatctgtgactaatatataaagacttgaggtggttgtatctatttaaaaggttatcaattagaaattaagaaagaggccaggtgcagtggctcacggctgtaatcccagcactttgggaggccaacgcaggtggatcaacgtgaggtcaggattttgagaccagcctggccaacacgatgagacctcgtctctactaaaaatacaaaaaaaattgctgggcatggtggctcatgcctgtggtcccagctactcgggaggctgaggcaggagaatcatttgaacccgaaggtggaggttgcagtgagccgagattgggccactgcactccagcttcagtgatggagttagattaaaaaaaaaaaaagtattttacataagaaattttaattttttgtaaattataaaatagcacttaatatggtatttgtataccgtgatctttgaatatccaaaatttaagaagatgtgagcagttttatgaaacttttcaaagcttagaaaaaggtaactacataaaattccattatatgttatttatgggaacattagatgaagtaagtcataaaaacatgcatagaaatgatcatacaaacttggaagaaattgaatgtcttgctatcgaaggaaaggatggaggtgagaagctctatatattgtatttttctttatatatttaaactcgcatttcttatttttcaaatgttcactccaatgaaaattcttttatttttcctgttagtttttatttctgatctcatatatgcaatatactattgttcataaatattagtgatccgccctgcaaatgaaatactcccatcctgttgaatttgggaatgtccatgtgatttgttttggctgtgaaatgtgagcagaaagattgttttactttggggagttcccgattgctaaagcatgtgtcaaaatgaagtttttgtgacattacaaagggactaataagagtgcctttgttgatcctagttgaacatgagaaacttggttattgtaagccactgaaaaattttagtttcttttattactgcagaataacctattctgtcctgattgatacagccacaacatttccttaagctctttgattttcatatttccattaggatgtagaaagtcaagagaagaataaatcataggatcagagaatattaacagtgaaagagactattggaatgaacttgttcaatggtccagactttgggttctaaataatcagtaatatttcaaaaaaaagtattaaaagatatttcagtataaaaaatgatgacatttaactttgtaaacaacaacaacaaaaacctaccattgctgggcataattagtcatgcttgtaatcccaacaacttgggaggctgaggagggaggaccacttaagctcaggaatttgaggctgcagtgaaccgtgattgcatctctgcactccagcctgggtgacatagggagaccccaactgaaaaaaaaaaaaaaaaagctgtcattaatacatttttcctctgtctctcttcccatcctccttaccacttagtctttaatcttattaaacaagatctaaggataagacaagagaaaggatggttgcatctatactgaacatgtattgagtttttttcgtcattattttgtaaacaacataatataacaagttttgacatggcatttacgttgcattagttattataagtaatctgagatgatgtaaaagttacatgcaaatactacattgtatataaaagactcgagcagttgttgctttaagtatccatggtgggtcctggaaccaattcctcatggatatggagggacgaggaaccactgtagttaaacaaataatcactttaaaacttaaaaccttttgcatggtgaatacagtcgtgcaccgcatatatgatggtggtccagttaagtttattatgccatatttttatcggaagtttcctatgtttaaatatatttaggtacacaagtacactgtgttacagttgcctataatattcagtacaataacatgccttacaggtttgtagcctaggaggaataggctatgccatctacgtttatggaagtccattctatgacatttgcacagtggcttaattacctaagggctttctcttcagaacatactcctgtcattaagcaatgcatgactgtagttggacaaaaaataataatacaggcatacctttggcactgtcctaattcataccagcattcatgattacttagatttacactgggaagccttcaaaaagcagtgatatattaggaaaatatatttgcaatacatgacaaacgataataacataagaactggaaacattcaataagaaaaataataaaagcaaaagaagatggaaaaaggaagcaaatttcaagagaaaactcaaaaggccaaaaaatgtgaaatgatgttcagtcttgctagtaattgggaaaagcacaaatcatttttaatctattaggcaaaaatcagagcgataatatttttggtgggagtgtgacaaaaggtactataatatattgctactagagagtaaaaactgacaggtttgtaagggcaattttgcataatatgaaaatataaaaatgtgcttcaagtttcactacgtttagtctacagaattacctatgtgtaaacatgtatacagatgttcattataacacttcttataacaacaaaatatttggaaatgttcatattaacaagtgcatactatatgatcttagtccaattagaatattcttttttatttcaatcctttaaaagactcaacttctgactgtatatagacaattaaaaaaataatgtgttctccgtatgtgcatttggtcaggttaattaaaacttgttgaaatctgcctgctcttaataaggttgttaaaactctctcataattgtagatttccctattattgtactgtcaatatttttgctttagtaattttaaacatgttataaggtgagtaaacatatatttgttgaatttctagtcagagagtcaaacatttttaattataaatgtacaaccattttactgtggtattaattttgccttagatctttgtccaatactaataaagcctcactgtctttcctttggttagaatttacatcatttatttggytctagctttacctttaccttttttctatctgtttttaaaaaatctgtctaaaaatgcatttagcagaaacatttaatcaatttacattgaattttttttaccctataccacaggaattaggcacattttctgttttgttaatgattagcactgattatacccatgcatattctcacagtccaaagttaatgcctatgtccattgccaaagacaataatgtgaccttagaatacttgaacactgttttattccagtttgcagttgtttttatttttgaaattacttctgtatttttaatcctccaagacattatttttgcagaattttttctactgttaatcttttaaaaattaatcagattaagcagaactcaggttttaaaatattttcatataatattttatttgatttttctaacaatccaatgaaagggaatataagactgattagtaggtaagagctcactgtggagttaggcttcttggctttgaaattcagtcccaacatgtactacaatttgaccattaataaatcccattatttaattttttagtgtttttttctcattttaaaaatgaggataatcatatttctatcatgtagggtacgcgtgtgtgataagtaaaagtgataatgcatagaaatggcacatagtaactatatgttgttagtggttattttatttttatatttatcaacaatatcttcatttcctaattgagaacctagtatgaaatccatagactttaatttttttctaaggttcatacagaaaaaaatgtacatggtgaagcatctagtagatggtgatgcatggagttaatttttttttggttttttgtttgttttgagacggagtctcattcttgttgcccaggctggagtgcagtggcgcagtctcggctcactgcaacctccacctcctgggttcaagcaattctcctgcctctgcctcctaagtagctgggattacaggtgccagataccatgcccagctaatttttgtagttttagtagagacagggttttgctatgttggccaggctggtctcaaagagttaaatttttgatttagtgacactgcttacattctagtctcatttaactaatttaacccagccctatgccaatcgggtctttaaggttattttattttatatggttattttatttttaaggttattttattaagattattttattccctatatgtttattatctatatattccctatatattataaatataaatggttcagggaaaagaaatagagattgcgagaggatattgtagaaaaaggaaggaagacagaaagcagacgagatatagtgtagtaagaagaggtggcagggcagcaaactgagcagaggagagaagacagtggtttgcttaggaaacaggagtgtggtgatcaacctgttgtaatactggagttcagagaagattccttgtacaaatctgatttggagaattggagtaggactctagggccacatattgaaagtaagaggttatagaaaatctataagattctaaattcagcaattttttttccaactgaagaaaaagcaaaaccagaactgtgagatttttattttatgattgtaaaacactcaactgtgggtttgggagattgctgattgagagaagttaatgtggtaagttgttttaatgttttttgagtattatgtaagtcctcctccaactttttgtcttgaaataagtggtttctgtcacatgatttgatatagagtttcacaatctattttcagtttgttgacaaatcatgtttcagtgctgtgcagtacaaaatgtactatttatattgaaaatgtgtcttagccttggctcaaaaggtttctctgatttcagagatctgttaggcaaacttgattatctgtgctttcttttctctaacctttacattgcaacttatcctgagttcaggtttattttctttcttattttattttcaaaagaaaaacagaaaactgttgggggaagggctggtggttgaaggtttactattttgagaaaattgtacctaatttattgcaaaactcagaggaattaagactttattttttagtaagagaaacaactaacttgatcaagttcataaatgtgacattaaggtatttcagttgtaatttttaatcacacttaaattacttccaaagatatttataaggcatctaggctaagaactacgaatgacattaatagataacttgtcttttttttttttttttttgtcaatgttaattcatttgcatgttaaaaaactataatatctggtataaatgtgaggctactttggatagggggaaagaacttgtaaataactgatagttatataagtagaaagggagctctagaaagacaagttatttggaagttgctactttctgcttaacaatagagctctttcattttatttaagtcaaggctttggtgtgatttaagtaggctttgagctaaatgattaaatttatggtacttgatgtgtcaagagggatactgagtttacactagagccgtttccctataatgccatttatattatggatgtcaaaatagatacctcatatatgatattgattgaaaaaatacttttgagaccctcagaaactggctaattttgagttaattcttgataccggatatattttattttttatatgagcccaaatgagaagagagaatatgttttgacactccaaatataaatctttagtgactattgctttgtcgtcaggatattatcaaatgtcctatttcatattcttagggaattcccaagatatgtcatttggcacatgatagtaaccgttagagctttagagtaaagggaagttttctctttgtagagcattctaggaagtacaaaatatgggcaataatgccgtatattactaataactgaatagcttctctaaggataactcttttagaataactatttcagaaagtagatataacaactattttaaatccttatttttgtgtttttgatgccgaagatgctaagaattgtttgtgcagatttttatttcagaagacataaatatactttaattgttttaatgcttctcctatggggtatatagctcttcagattgcttgtttgaggtgaaaattaagatcaaatgagaaaatatatgataatgcctgactcttagtagaagcttattatatgtgtgtctaactctacctttcatgcagtgctaaattccctaaattatatctgcaaattatccctttttttttaccaacattccaaatgcattgtgaaaaatgctgatttgctattacaagaacagagttcattgatctggcattgttgaaaagtatatttcaaaactaccatggatctgccagaaatcctaagcgaataagcaagaagaatactgtgagggaaggaaggaaaaaattgcaggtagaaaatattggtgattctttttcatctctgtccattcctttactggaaatgaaaatacttctgagaagtagaaagtattagaagttaagaagggtagaatgggaagacagaatggccaagtgttagtagagcgaaggcggaaagacagtatgagttgataggatttttaataggaccaggtaaaaatatcaatacaaaaataacattatcaaccatattgagcttttaccatatccatacattgggataacagctttatttgcattattcgtttaatcacaataactctatgaggtaaacattactttttctagttaatagatacatttagagaagttattttccagcatcacacaggttataaatggaaaagtcaggatttatagtttgtcttaactcctaataattgcgttttcacatttggaaccttgagtcaagcatgaagttcaaatggtgcccctcttctctgtcaactctttacaccatcagccctgtatcactatctagtcagtcttctatttaaattctgatactcacccgtatccagttagtttgttgtactccctgcaaattttccttccctatttgyttttaaaaatcatctcgggtaataaaactccctttgctactttgaaggcacctctttattatctccttcctactccctgtaccccatcatttataaagcttggtgacttcatccaatatcttttttggtattttgtcagccctcaagggtacaactctccaggcctgataattcagccagtgtacactgccctctgtatagtagttgcttagggatagcatctgttctgttcagtgtctgtgttaaatcagttaagtattttttgttccatttcttagactgtcattgctttgttgaaaactaccaattctctgcttctttcttcatatctttttttaattgtttttatatacccatttgttttaaaaatggtacctctaattcaatatgtccccatattcatcggtttctctaaaccaaatctgcctttagattgcactatcagtcataaagacattgccattctaatattcacccaaagtttaaatcacagagtccccatttgactctttatattctctattctcttatatctgattaaccaccattttctgtacagtctccaccaagtctgttatatctcccctctctgttttacataaacatttcccctctattccaggggtatatgttccaagacccccagcaggtgcctgaaaccacagatagtaccaagccttttgcagtcatctctccagtatctgtgggggattggttccaggacctcccatggataccaaaatctacagatgctcaagtgccttatataaaatagcatagtatttgcatataaccaatgcacatcctcctgtatactttaaatcatctctatattgctagagatgtaatatctactgtaatataaatgctatgcagatagttacattgtttagggaataatgacagaaaagtctatatgttcagtacagatgcaactatccttctttaaaaatatgttcttccacagttggttgaatctggcgatgtggaacccatggatatggagggctgactatatacaccatgttttttcctggcacatcactcaactactattagctggcgagtcaactcacgttgttggaatgactagggacaactagacttcaagtgatctttcatcccaggtaggctcacaacacaatgtatgatctcagagttccaagagatcaaactcccttctgcaaaccccagtcaaactttgcttgtgtcttgtttgctgatatcccatcggataaaacaaatatcaagctaattccatagtctttgtagagagagactttatataggtatggatactgggaagtgtcattcattggatgccctttaatataactatcacacttccctaattttcattcttactgctgtaatcctaattcagatttctgtcactgctctgcttactaatgttcctatctctttgttttctgrtccatctgatataattaaaagtttttattattactttcctgtttaaaacaaccaaaaaaccttctgaggtaagtacttttttcttctccctgattttgagtgtccccaatatacctttccaaatttaactgtcatgtctccctcacacttgacttgtttctaaaacactgtattgacttcttgccattttccttgctcttctacatgtttttcttacttaaaagcaattttacctatctcttttcattgatgtcaaacccattcttcaagtcaattttatctccccttattcccatctgtcagaaagaacttttcctaccaattaaatcctgaagcacttaatcgtaaccctcttaaaactatgttcatatctttcactttattgtttgtttttgtgtatggacatatcccttctctaactgaacataacttctagaacagctctgtctaatacaaatagaatgtaaatcatatatgtaatttaacgtattttactaactgcattaaaagaaaccaaaagacactagggaaattaatattaatggtaaattctgtttagcctaatgtatcacagtatgttatttcaacctgtaaacatcataaaaatatatttttttactttttattttcacactatccgagtgtgttttacacttactactcatctctgttgaaaccacatacatttcaactggttagtagccaattgtttctagtggctaccatattagacatcacaactctagaattctaggagaaacattagtgtagtacagagaatgttgacttgcaatcagacttattatcaaatcctgtctttgtcacttaccatatgagcctggacaatttacccagtctgtctgggccttagttccaacatgtgtacaacacttttgctaggattagagtcaagtttattgcacaatttctaatatagagttcattgatttttagaaaatcaatgaggacataacccatgttatgccaatgttttgcacaatacctggaacctagagttttcatgttatagccatttattgagcacataagacaatgtcaatcattttactaggatttggaaatactagatatgaagtctaacttcaagaagcttggtccagaatgacagacaagtaaattgttaattataatatacttacaaaagaagtcaaatatagcttaatgtcatataaattaaaaagctttcatacaacagaggagctaactatgcttgagaatatgagggtaagcttcataaagttgtggtttcaacttaatgtggaaggaaaagtagttgcttccacactaagttggatgtggaaggggatgatatgggaaacaaaaccactaggaaattcatgaaggtatgatatttcatataaaatatgaggaacttctagttttgcaatgaacagagttcacaggattggctggsggaaggaccaaagggcagcatcaggatcgacagtggaatagttaagatccacagctctcctgatacccttcgtcaaagctggtacttcctcattttgtctcatgttaaaaaatggtatcatccccaaatacctatatctttaatatttttcctcatccttcagctctaatctattcataaatctactgcctgtttacctctgaaatataccttgtctatgccctagtccaagccactcacctctttcctggaccactgtaaaagtcttctaacatctacccctttccactcttatcctcctataatctggtttcttcccagaagcagggtgattttcttttaaagtttattagtctttcagttccccatgtcacagccttaacagctctctctttcttcatgttctacaaggttctacatgatctggcctacctctctgatctcatctcattttatcccaccctttatcacatgtgctctagccacactgatttctttttaatgtgtcttatgtactagctttttcctttcttgggacattactnnnnnnnnnnnnnnnnnnnnnnnnnnnnnnnnnnnnnnnnnnnnnnnnnnnnnnnnnnnnnnnnnnnnnnnnnnnnnnnnnnnnnnnnnnnnnnnnnnnnnnnnnnnnnnnnnnnnnnnnnnnnnnnnnnnnnnnnnnnnnnnnnnnnnnnnnnnnnnnnnnnnncttgttgaatggatggatgaagtttttcctacctgtactattactccctttcatagcatttcacttacattacattaagaaggaaaaattacacaaatttatttatttagcattttgtcaggtacaagaaatatttgcctacagggagaaaaccaccaccaccaccaatcctactactatatgcactatattaagcacatgagttgatcaaggggaaaaaagttagtttctccaattcatgggctttgagattttaaacgttttcttaaatcattaatggagaaatttaaataaccaaaactttgaattaaggatgggaaacagggctgattttaaaaatggaaatatcacataatatgtctgtttgaaatggaaacatgacaaaaatttgaaaatagttaaatattttgagaattcagttggcttcaattgttattttctattagtgacggatatcacaaacaaaagacagtccttatttgttattaggatttatatatatacacacatatataaagactatatagactatatatatatacactgcattatatatatatggaatatatatatgtttgtgtatatatatatgtttgtatgtatgtgtgtgtatatatatatgtttgttctcatgctgctataaagaagtgtccaagactgagtaatatataaaggaaaaagattcaatccactcacagttccacatgactgaggaagcctcaggaaatgtacaatcatggtggaaggggaagcaaacccatccttcttcacttgatggcaggaaggagaaattctgagcaaaagggggaaaagccccttatgcaaccatgaggtcttgggagaactcactcactatcatgaaaacatctgtatgggattaccgcccccatgattcaatttcagttacctcctaccaggtccctctcataacacatgggggttatgggaactacattcaagatgagatttgggtggggacacagccaaaccatacatatatacatatatacacacacgcacacacacacagagtctatatatacatacacacacacacataaggactgtgtagatatgtgtgtgtttgtgtatatatatatataaatacagtccttatgtgtttaaatatatatttactgtccttatttatgtgggtttgtgtgtgtgtgtgtgtgtgtgtgtgtgtgtgtgtgkacactgccagaggtttaaaaaggttaagattttatcagtaagaaaaaaccagtcacctctgccagcccatgcaccatgttgtcctgccgctccactgtcccactcctccaccagtcgcaatggaagaagagattgccgtactggtgattgacaatggctccagcatgtgcaaagctggctttgctggggacgacaacccccagccatgtttccttccatcatcggtgcccccggcaccagggcatgatggtgggcatgggccagagggactcctatgtgggctacatggctgagagcaagcacagtatcctgaccctgaagtacccccattaagcatggtatcatgaccaactgggatgacatagagaagatctggcatcacaccttctacaagggactgcacrtggccttggaggagcacctggtgctgctgaccgaggaccccctgaacctcaaggccaacagagagaagatgactcagatcatgtttgataccttcaacaccctggccatgtacgtggccatccaggctaggctgtccctctacacctgtggttgcacactggcattgtcatgggctttggagatggggtcacccacatggtgcccatctataagggctacgccctccctgacaccattctgcatctggacctggctggccaggacctgaccaactacctcatgaagatccttaccaaggttggctatagcttcagcaccactgccgagcgggagatcagacactacgtcaaggagaaactgtgctatgttgccctggactttgagcagtagatggccactgccacatcctcctcctccctggagaagagatatgagctgcctgatggccatgtcatcaccatcggcaatgaggttgcagtgtcccgagacgctgttccagccttccttcctggacatggaatcttgtggcatccacccagaccatcttcaactccatcatgaagtgtgacgtggacatccgcaaagacctgtaggccaacacggtgctatctggtggcaacatgtacccaggcatcaccgacaggatgcagaaggagatcaccacccgggcacctagcaccatgaagatcaagatgatygcatccccagagcacaagtactccgtgtggatcagcggctccatcctggcctcactgtcagccttccagcagatgtggattagcaagcaatagtacaatgacttggccccctccatcgtccaccgcaaatgcttctaaatggactgtgagcagatggctagcaattgcttcatgggttaattcagaagtaaaaatttgcccctggcaaatgcatacacctcatgctagcctcaccaaactggaataagccttagaaaataagttgtctttaaagcttgtatctgatatcagcactggattgtagaacttgttcctgattttgacattgtattcaagttaactgttccccttggtatctgtacatatctttgatttcagtcyttagtacatgtggcttggtcacttcatggctaaaaacgtacttgtggaagacaagtctggcttggtgagtctgcatggccagcagtctctgatctgtgcagggtattaatgtgtcaggactgagtgttctgggatttgtctacaggctggtaagggctccttaaccagttgtttctgtcctgtcggtctgtcagggttggaaagtccaagccataggacccagtttcctttcttagcttctgttgtctgccagaacaccatgggctgttactcgccttgagttggaagcggtttgcatttatacctataaatgtattcatccttttaatttatgtaaagtttttttgtatgcaattctcgatctttaaagagatgacaacaaattttggttttctactgttacgtgagaacattaggccccagcaatatatcattgtgtatggaaaaataaaagtgctgccagaaccaaaaaaacattaatttctaaaaggtcatttagatgatttccatgagagactttttaatgttcttctcctgttaggattattattgataatccttttcagattatgagtaaacagtttgccctcaagtatttattcatgctaatatttactttgtaaaatgtgcttcttacaggaatataaatagtttctggaaaggacactgacaacttcaaagcaaaatgaagttctttctgttgcttttcaccattgggttctgctgggctcagtattccccaaatacacaacaaggacggacatctattgttcatctgtttgaatggcgatgggttgatattgctcttgaatgtgagcgatatttagctcccaagggatttggaggggttcaggtgggtatgattcatagtatcaattgcagaattcactatgcttgtagtaaatagtattctgatcttatccgtgaagcttaggcaacattttacttcacaggtaagtattctaagtaagagttttctgaggaaaaaacaatgtagtattcttgrcaactttatattttgtttctgagataatctttcttcaacaagagccctccaatgtgctgttaatattttcaagagatagctgcatataccaagattcaagaattttttatattattgattagtttctagaacattcaatgatatagagtaagaatttggtagttatgaagactgtttaatttgtaggtctctccaccaaatgaaaatgttgcaattcacaaccctttcagaccttggtgggaaagataccaaccagttagctataaattatgcacaagatctggaaatgaagatgaatttagaaacatggtgactagatgtaacaatgttggggtaagtgaattctagtttccttgaaaaataacagataggaaaatgatttctctctcttctttcttgctccttttcagcagaaagttttccatattttatttttttaattttacttcatactttaaaactcaaaattaaccgttgccttatgttcagcttttgtaaatatttgtgtatgtgctctctatctaccaaagaaacaagtttaaagcagaatttacttctaaagcaaaacatcaaattttaacttttatacctatctatatttcctggaaagagttttctggttaagagttataattccagttacaatatttgctatcatttttaggtgacttgtatctccatccataattcctgggtttttcgtggtgactagctagcttctctatttaatgaggagcataatttgagactaatagctcccttatttgtcttcaaaagcttagtagagagtacaggctttctcctggtgaccgactgtaatttccaaaacagtaacctttccagtctcatctgagttttgtctccccgaaatgggctttttgcatttcctcctatttatggtagtttctggttctctcaatttaccattactataaatatttgaccaagtgtctagaaggcatgtaggtgtttagttcacattacttcttcacagttgatttttgatcttgtaggaaaatagttataagatatcatgaaatattttggagttttattaacatactataaacttgaatcaataatgctttaaatttctgcctctctgtaagtcacactgaagtagaaactttgctttctaggttcgtatttatgtggatgctgtaattaatcatatgtctggtaatgctgtgagtgcaggaacaagcastacctgtggaagttacttcaaccctggaagtagggactytccagcagtcccatattctggatgggatttyaatgatggtaaatgtaaaactggaagtggagatatcgagaactacaatgatgctactcaggtaaatttttttatgagagtcatctgaataaggrgtgatatatgccttttcttgtagacatgtagctaattgaacttcattttaaatacgaatttagatctcttagggacacaggttaacargtttgactactttaagaaactcaaatccatatttraaaacttaaatatagatttaagatttttaatcaatacacatttgcccacttttaaaaagctcccaaccaattaaaaagctcgtcgactttatttcctaaattctctattttctattagaaaatatttccaagatacatctatagtagaatgtgagcatccccagcgcccaatgcaaggaagtcactatagaatatctcttgaggaatcatggaataaatgaataatcaaatggattctcatgtgaaaaatgaggttttatgaatcaatcataacatttttacctcaacaggtcagagattgtcgtctggttggtcttcttgatcttgcactggagaaagattaygtgcgttccaagattgccgaatatatgaatcatctcattgacattggtgttgcagggttcagacttgatgcttccaagcacatgtggcctggagacataaaggcaattttggacaaactgcataatctaaacagtaactggttccctgcaggaagtaaacctttcatttaccaggaggtacatcaatacatatatgcatataaaatatcatcttattcattagaaaataatggcagatttaattaaaaatgcaatttctataggataaggactgagtcatttatataaaatggtgttctttaacctcctcttcacatacagcatatctaattctttatcacaaacaaaacaaaacaagacaaaaagaaataataaatagcttaatttattaataaataacaaatagcttaaagctatcttttatataatattaacttattggttaaaatgctttaaagtccttatgcaaaatgttactttttcctaattttctactaggtaattgatctgggtggtgagccaattaaaagcagtgactactttggwaatggccgggtgacagaattcaagtatggtgcaaaactcggcacagttattcgcaagtggaatggagagaagatgtcttacctaaagtaaataaatacaacttttcccctgaagtatttcatagatttattagtcatagtaccccagtgtgagttatcttctggaacattctttttcagacaactatcaaggagtcaattgttaatgataagtattctagtgccctaaactctaatcaatcatcttttgtatttagagtgtctatcacaagtgagtatgyctaggaacgctaaacatatcctaggagtttccgtctaagtacgagatgaatatactggatttgactgatgtttgcatataatcttttaaagccaggttattattaaaatgatcctatcatttataaagtatgtacaaagtttccatactgtagaatttacatatattatatgaattaaaaatataaaaatatttatattataacaatacagtattgaagccttattttaacctagtttgacattccgtaaaatgtgatatggatattgatccttctggagtgcctctaaatgataatgtgctgaaacctctgaaaggaccttttttaataacaaaaatcttatatttgtaatatgaatataagtattccatacttgtatatacgaatatagactacatatgtagattacacacgtgtgtgtatatggtgtgtgtgtgtatatatatttgagtgtgtgtttgtgtgtgtgtatgtatatatatatatatatatatatcttacagaataaccatttaattagagaaagaatttaatcttcagatgccatgccatgcagaaagagatgcacagttaagttactcgcaaactattgtgaaatgatacatcaacatatatcttatttttcaaaaataggaactggggagaaggttggggtttcatgccttctgacagagcrcttgtctttgtggataaccatgacaatcaacgaggacatggggctggaggagcctctattcttaccttctgggatgctaggtaraaaaccaagttctctattttttttaacacatcttttaatgatggtaatgatattctgatattctgtgataatataattatgtaactttcaggctgtataaaatggcagttggatttatgcttgctcatccttayggwtttacacgagtaatgtcaagctaccgttggccaagacagtttcaaaatggaaacgtaagttttgaaattgttcaaactatccttttctcaagaaacagaaggcaatcttgttctaacttaatatgacaactattaattatatattcaacaaataattgattagaaacctgatatagggctgcgattttagtaatgcaggttatattaaaggagtaaaatatatattttccattgacaaagagtatgcaagccttttcagacatatgataaacatccccctagcccacaggaaaaaaaaaaaaaccacttaaaaataagagctaggcacagggattaaaatatatacttcgaataagtacctacctcagggttaataggaagattatacatgccaacacttttagagaacttaaaacatcatctgcccacagtaagaacaatataaatgttcgttaaatatttttaaaaagttatatggaatacaaaaaaatgattcagttgagctgagttaaatagggaraagtatctaataagaggaaggaaattatatgtactaaagaatggaaatttagagagtattccaagaaaggtaagaatgagaaaaatatttgggagtatggtaaasacatttatctgatgagtagtttcaaaaaggaacagagaaataagagtgtacagatatttggaaagmtagtagaaggttttctttaaactaaagggttcagaaacagcatcagagacttcagatctaaagcagaaattcctccttcctctgagtcacrcagatatctagctagctttttttagaytcctttcagtttgagaagtctgttactttgtatagcaactkattctattgttaaacagctttaatatttaggtgtacttttatattgagccaacttatcatgatttctactaattggtcttatttctgatgttaagggtcacagagtatttttattttttctatcactataacttttccactttccaggactgctgcatgctaaaaactcttagttttgttcacttttcaccatatgacataattctaaggtcaacactgaaaaacttcctagggttactctggtttttttaattaagattttttaaagtgccaatcagaaaaacataatattaaaactggtgtcaatttataaaaaatgttctgatgtattgttttgtacaattatctaaacagaagcatgatggactctaatatttattgagcacatgtcacgttcaaggcattttcacatatattacttaatttttatagcaaaaaaacaatattcccattttacaaatgaggaaactgagacacagagaaattawgtatgttgattaaattttcttagctactgttaatagagcctatgttttaatcctggtgtttctggtactaatgcccttcccatttcaaygacattgcatggcttacagtgatgttaagaagcccttgcaggccaggtgctgtggctcacacctgtaatcccagcacttggcgagtccaggcgagaagatcagctgacctgaggagttcaagacctatctgggcaagctagcaagacctcgtctttactgaaaattttttaaaaattagctggktgcggtggtgcacaccaacagycttagctacttrggaggctgagatrggaggatcgcttgagcctgggagatcaaggctgcagtgagctatgattatgccactgtactccagcctgggtgacagagcaaagaagcctttgcagttccttggaatgaaaaggagaggataacaatttgttacctttgtttgaaatatggcaaaagagaaccagaggatagagagatgatraagacccagtaaagggctataaaaattattgaaggcattggattctagataaagtcattgaatgcagagacacaagtaacaggataggttgggtttggtttaaaggagaaggaagaggyaaatatatgtatgttaaaatttggcttttymccccctaattaaggatgttaaygattgggttgggccaccaaataataatggagtaaytaaagaagttactattaatccagacactacttgtggcaatgactgggtctgtgaacatcgatggcgccaaataaggtgagaatatgtatttagacatgtcctctaatagtaaactttccaytgcaytttatttaaaacagttgaagtttaagaatatcaacgttttatatggtattgtgtttttaggaacatggttawtttccgcaatgtagtggatggccagccttttacaaactggtatgataatgggagcaaccaagtggcttttgggagaggaaacagaggattcattgttttcaacaatgatgactggtaagtacatatcaattaaaaataatattttgtaccwgtatgctcttggtttattcctttttttctgttcattgacatttatcatatctgaaaaatcatgtagtcagtggagcaagaagacaatagacatcaaaattgggcagaagtaaaaagatgatggctgttactccttcattctcytkttttattaagkgctttctgttgtaagcagagtcctttctgtgcacccttgcaatatcttatgcatatattgaatgcacatacatatgctcacctacacatgccacaaaatacacaaagtagttaatatgaggattgtgaaatcattaaaagaacatgtcttatattcctgtttttttaatcatggaaaaatgctgcctgagtactaatatatctttatttctaactctttttctcaatgactgctctatgtagttttttggtatactttcttcacttctctgtctccttgtgacaaataatatttttaaagcatatgcataaataatatgtatcttgtggttaatgattggcttcaggggatttgagttttagttccgaaacttctcattattggcctttcatctgtgattcttatatcctttactgaagtataaatgattrcctaacctatagctcagaagacctcgttgcaaacagttgaattgtctctgtccaaagccaactgatactcatacttagctcattctagtataaattatatttcackgatgaaaaataaataaatacataartacataaatctagttgatctctttcctgccaaaaaagcccatgtctagttctttaatttctttcttttgtggatgaaaataccaaaataaatttttgtgagaaagctttatatttcaaactatcacttcttcatagaaatgctagattgtttctatgtatgccccaaattcttttttaccttatggggaaaaaaggagattaaaaaaataaaaccctttaaaaatttttttttaaattatactttaaattttagggtacggggaggggggagggatagcattgggagatatacctaatgctagatgacgagttagtgggtgcagcgcaccagcatggcacatgtatacttatgtaaccctttaaatttttaaaagtaatttgtattaagttcagttgagaacaaatttgattttaacaagctagcacttttatcaaagtgtgaccattcctgccaatcttcagtgatattcttcaactttgattttttggtaatattttcactacggaccagggaactgctacattttctgtaaggttacttttggtcctagaaagctatttacaactactagggaggcatatgggttttcttcttaatgagacttcactgcttagggttctacaacataaagttatgctgtttagttgtgttagcctgtattcttgattttcagtgtattgaagttaaatctgaaattttattttacaggacattttctttaactttgcaaactggtcttcctgctggcacatactgtgatgtcatttctggagataaaattaatggcaaytgcacaggcattaaaatytacgtttctgaygatggcaaagctcatttttctattagtaactctgctgargatccatttattgcaattcatgctgaatctaaattataaaatttaaaattaaatgcatatcctcaaaacaatagccaagtgtgtttcttttcttacatatacagtaatacttatatttcattaatttttagtaaaagctctaattagtaatcaacttgtaaaattcacaaaaaaaccaatagtattaaaatcccacttaattgttgaataagtgtaagataataatagtcagcaagttgttatgctttagaagactgactttaacctatttaagctatgaactcagaaaagcatctcaaccaatatgtttgttgccattagcatcatttaccgagctgtgtacctttaatttctgccattctataatccttccaaggagtgtttttatcagttagttagggatagctggtttaatgctgattcccatgcaaagttagcccggttgtatgctttttataatatgcaagtacttctggtgttaataaggttaaaaaatagaagaaacctaaattatacaatctacagttatcagttctattgagctcactggaatcttctcctactttatagacttccttctttttcatttttttcctaattgcttagacttgttgtatatgactttttgttctttttcttattctacaatctggatatttatttagggctttcatgacaccttgtagtctgggttttcttcccaattctctacctattcattcttcttcatcttgactttacatatggaattcattagggctctcatctaggtttccttataactctcagttgttttgtttatgcttaaatgagaacatagaggccataactcagaaactgtctattcttcacctataaattgtccctgccacaaagcagattcactgtgcattggtaccacttcggctcactgcatcttgggctgcagtttctactacttaagattgagtccagtgatttagaacatacacacaaaaagttgcatgaagcaggcttattgcttatagataggcatcaagtgacacagaagcccggcgttcaggaggagccagcctcccaagactcagaccgtttgcccagggtgttgaagactcatttgcacatgccctatttgtaccacagctgagggacccttgaaagaagcctgccccgtgttttataacccaggcatcccatgatacactgggctaaagcacttaaggaaatgttctaagaggcacagtaagagagtctgagacttatctcaggatgttgcattcccagctcattctacagctattcttgagatgcacaagttatagaggaggaaaacctgggttgctccaaggccacttggagagttgtcctgcatttcctctagcattttccttttttttctcctattacaataaagaaagtacatgtcattctaagaaaggccattttctctgcttaagttaatgataccattccatttttatcttttggaggactttagattatcctccctcttttgatttagcagtctttccctttcttctgcattagtcatcctagattacatgtattacagtcttccaattaaaaacatcaatgaccatcctcagatattcttctgggtatattactttgctcatttccttgctccctctcctaattaaacatctctttttatcacactgtctccacatcctcagcctccgtcattattcatctctctactgtccagttttcaccattatcacttcattcagtctgctcttgtcaacatcatgagtgacatttatgttaccagtccaatatatttctctgtcctcaccttaaaccacttcatagcagtattaatgatggtgggtcactttctctttctatcttccttttttcgtgttattctactctcctggttgccttctgtctcattgattgctctgtttcaggtttttgtttttttttttatcttattcttaggtggatcatcttattctgttccacctaagtcctaacttttatctatttctcttctttatcttctcttctctaggtgattggaatcatttccatggattttaaacaaatattttctgtggacacctaggtatcttcaattcagaacttggacttcagcctcatacttccatcagatgcttgttatcaccacttccatgttccacagacatctcataattaacatatttaaaatggaaccctcattttttttccttgcataaaccttttactacattattttcttactgcttagaaacccaggatattttctgatttatctctcttagctcaacaactttatctcttcatataaaccttagcatgaactattaattgtatcttcaaaatatctcttcatttattgcacttcttttgtatcttctatcacccctttatccagctcacaattatctgttctctgcattccaaaacaactctgcaactggtctcctatttccattattttactgtctccctttattttactaaagaccacaacattatattcatacaatttaaatccaattaaaatgttaatgcttaaaactcttaaatttttattgcattcagaataattctaaccactcatggtagcctacaaaatcacaccttatcagacatgaacctcagttctattcttttcccttgacaatcccatagccttaggtattctggtctttcgtcattttattaaatatgccatgtatttttattttatgttgtggactttttgtatgtgtttctccactcttttggaatcctcttaactgagttcttagcatggttggctcctgtttttataagtactcccaaacacaggaactagcattaccattttttcagtcctgcagttcagaaatctggggcttacgtttgaaaccctcttctcttacatttcccagaacaaataaagcactgaatactttagatttttgcattctatttcttcactatattattttctctttctacttctactatctagtaacccttttcttcaatgaccaaaatctattttacttccagcaatatggtgaaaagactatcgactcttaatttaaagccagactttattgtttataacaaatgcattgcagaatgtaaacagagaatgtaatcacaagccaggggctgggagcacttcatattagtttcttaacatgtcagaaccacattctttcatttttataagagagtaaccagagagccactttaagaatttttagtggttagcagaggagtagaggagagtgcccttgatacacaggtagtggtgaacatgtatctttacccccagcaggagagaaaagataaacattagagacataagctagcaagcttcaaaaaggatatttgaaaggggttttgtaatgggatatcagtttttgtacaagggaatttatttgtacaagaggttacggagcttttctcggagaataaaacaagcctgtctattacttgaaattttaacttttagaatagcttacgtgcacttatgctgattattgaggggttgactgcagcatcagcgtccacttcagtcctttctccaaccattccattatctaccatgcgatcagagtgatcttttcaaatcagataaccaccaccacttaccttaggataaaaagccaaaattcttatcagggcttgtaaccctgtgcttgaagtcttacctcactcaattctcctctttaatttctgatctctaaccatgctaatcttttagttactgcaactcaacaagatctttttagttctttaatttcaattcaagagacattctgctctttctgcttggaatgctcttttcttacctcttctcctaattaactcctgttcatcattcaaatcttaattcaaatgctgatcctgcatgaatatttattcagtattaggtcaagtcccctgatgactgttagcaatctctgtacttcttatcactcagcatagtactgtgggaaatatctgcattgttctttattgaatccttagtctcaggacattatccagaatgtcttacgaagagatcaataattatttgtaaaatgaattgagataataataaaagagaaaaataagagaaaaaatgtatctatttttgagaaggagaacatttttaatgaagatgtggccctggaatacagatgtttctctcatttttttcctatttcttcccaaatttaattaatttctggttaaccctgatttctcagatcataaaaatcatggggaaatcaactactttggcaataacccatcatgttttcaggatttgtaagccataacaacagtaaattctttggtgagctatactctcagtaagtaaatgaagaataattcaaatattattgggaaaatgatgccacattcatctgaatataataaatgtgaaattcattttactatgttcttagaactttgtaatactaatttataatagcagtttcatcctttagatatttcattttatctacggatctaattcttcctgtgaaattactgagctatttctctattcttagaagagaaaataactctttgtgataaaaatcattactatgtataattagacttccgtttacaagtcaaactgaaccaacgaacttacaatcatagaatgtgactagtcacagggaatggttggggcattagctcagtacctgtccaaagtgagctcattattatgattattagtatcaccattatcaatcagcttccacataaagtgtacctaaatgctagatctatatgatagcttccaaaatgacactgatttttaataatccaaatctttaaagagatcactttccattttagaaaaatgagatttttttttttttggaaaagatagaaaaacctctaagcattttaaccaagggttttagaacactttatttttatgaatatatcaaagcaaattccttctttattttgaaagtgactggaaacaatttcacggtcttactaagggctagtttaagtgagtctcaatttttcttctgttttgtttgctcttacaactttcctcacacacacacacacacaaagggagatataaaaaaatctagatataacagatgcaacttacaattttttggtaagaaatcataaagttttagaaaaaatcatttaggagtgtcaataaaaacgatatttaagaaaacagtaggaaaagtgatatattaaaagacttttaaacacctttcacaagaaattgaacagatgtgcaaatacacattatacgttatctatttgctcattttatcctgtccttaaacataaactttgaagataaaagaaagaagtgtggctcagggtcactcatgtaatctgtttttaggcagaaacaggtgtgttgaaaggtttttaggtaaaacaaccaccacttagacttcaataaagtagtatttattattttcctataattgcaaatttaccaaatgtaactcactattttttctttaatattttcaaagatatttttgagtaattattatattttcacaatcaattcagtagacatttttgaaaaacttatctgaacctagttttctcatctgtgaaatggaaacaatatatactctctcagtttgttgtgtcaaatgagaaaccatatatgatatactaaccactggttctggctaaatgcatacctcctcatcttttcagtaaagacatgactgttggccaggcacggtggctcacgcctgtcataccagcattttgggaggctgaggcgggcgaatcacttgatgtcaggagttcaagaccagccggaccaacatggcaataccccatctctgctaaaaatactaaaattagccgggagtggtggtgcatgctggtagtcccagtcccagctactcgggaggctgaggcaggagaatggcttgaatggcgctgggagattgcagtgagccaagatcatgccactgcactccagccttggcaacagagtaagactccatcccaaaaaaaaaaaaaaaaaaaaaaaagtaactgttattctcagtactttgggccagcacagtactgatactctcctaaaatctaactcaaagagaaaaatcacaaagcattgga

SEQ ID NO: 94743 - DNA, 269189 bp, Homo sapiens
  misc_feature (1)...(269189): n = A,T,C or G
caaatgaaaaatatattattaataaatattaagaacagaatagcaaattaattaaaattgcttcccagaaaattttaatttcttttagctttaaaacatgttgaggaaaagaaatctgattacagaggaataacttccttgaaaacaaatgagttacaaatctagaaagtaagagggtttagaagttttggaaaagtgatgcctttaaagaaattgcccagaatttcagtgaccatcacccattcttatcaaccaatcttgacagggaaaccagttctggtttgtcctcacagctcttaaaggaccttgagccatgaattctggaaaattgaactttccttgagatccagattgtttcattccttaaagatgtttacaaacattccatctccaaagggatcagacacacaatatggtcctgaatgaggtgcctaagaaccagggcattatccccaccaggaggcaaggatttcagaagctgtaatttcacaagtcagcagattctggaatgcatccacaaggggctaagacttgaaaacaactcattatattcattcaagactatgcagtatcctatcagaggagaacataaaataaaacaagcactttttcttcaagggttagaaggttaaaaacgaatcaaagacccttaattccaaatggtcccctagagattattaccagtgtttctcaatcttgactgcacagttgagtggagtgaaagttgagggagattggagggggccacctaggagttattcatccccgtccccaaatgccaaagattctgttttaattggtcttgagtagaacccaggcatcaatacttattgttaagtctttcaggtagttttaatgtgcagccagggtggagaagcactaatctagagcaataattcctaaatgctggcagctgcaatagaatcttgtcaccagtgtcaaaaatagagattgttaaattctaatgcagatgctctgaaytgactccctcagaggtgaatgtaaaaatacagacatagaggtaagtctcatgctcagccaagtctggcacactttgatccagtgccttgctactcaaagtatgggccagcatcacctgggagtttattggcaatgcagaacctgggacgcaccccagaccttctgagttagaacctgcattttaacaagatcctcaggtgaccccaaaatgcacccatcttctgcttttcctttcttttagggatgggaaaacagaccaggaaaattaaagactcatccaatataggaaaagagtatctagtagggggaaaagagtatctagtaggggaaaaagacaggaccaggcctccctgtctaagactttctattctgtcagactatatttctgaactgctaagtttttgttttattttgttttaatataaggaggcacttcctctttatagagcaatttattcagacaacaggaaaataactacacttaggttaatactactacatattaattcctaaaggagttcatacacaaatcatgggatcaataatcctggctgataaaaaattctggacaaaggaaggttatattcagtcaataaaggcaatataagagcatgtgggatgtttcctccctttctatagcaattccaggagaaaaaaaatgatttcctcgagctgctccaacatgatcggactggtttttgttttgtttttatgaaaatcatatccttctcggatccagaaatctcatgtacattaacaagggtggtggggaggggaaggaaatgggagaaatcaaaggatacaagctggcagttatgtaggataaataagtctagggatctaatgcacaacatgaggactacagttactaatattgtacttactaatattgtattgtatgttgaaaatttgctaagagagattttagctcttaccacacacatacaaaagggtaaatatggaagatgatgaataggttaatttgctggactgtataatcatttcactatttatatgtatataaaaacaatgttacaggccttatatatatacaatttttaagacgtgtagaaaaaaagggtggaacagctttttagggggttaagcctctggctccctctcctttttaccttttttatgcaaattacccccagagagaaatatttcagaggactagcagtttttaagtattttaagtaataataataagacacacaaattttagagtactgaggaacaaagaaaatggagaggagttgagaagaaaaaggacttcacaaaaaaaaaaaaaaaactttcactaatttatagatttgccaagatccaggacggcatgtgaagaaagtcagctgcgttttccctctgactgtattcatgtagttctaactttggagaaggacaccacccagaaaccacagctctcgctctcaaagccctcaaaccccggaacacacagctcttccaacagaaacgaagtgcaggcaagactacaaacccagataagggctatttcaagctgctcttccagatcactggggcttcagtgaggaagaatcagtgcaggcagtcgcagcttcaagtatcgacccacccttcacagtgctcccattcaaagaacacacattccaaaaatcgatgcctatgaaggaaaatctgaagcaaaagtgacccattaaaaccatgtagcaatcactaactttttctaaaaggagttggctgcagaggccttttcaacaatgcttattgtcaaatatttattataaagttaggtttagtttggggtttgggttttattcaaaagtttacttagtttcttatccaaatcagtttcttatcaaaatctgaaactacatgtttctaatccacaagaatgaccagactgtccaagctaattacccggatcttttctgaactctgcaaatggaatgcagaaatcacatctgtacacacttatattgagctaagctgtctttggctgcattattcttttcttcaagggaatgaaaagggagctagatgacagcgatgatgcagatggtctttagagtttcattccaagcgtggccttcttccagtttttcccatctcaaggatatcttccctacctccatctgcacgcaaatgcttgggccaaaaccttgggagtcatccttcacacctcatccatgtcatccaatccattactagatcctaataatgctaccaacaaaacatatctgatacatccatttctccccatttccactactaccatcccaggccagaccaccatcatatcttgcgtcgactaccgcaagaccagacctaactggtctcccactctttctcctcctcccctcaacctttacggaagtagcttttgggactatgaggtttttccactgcactaggaataaaacacaaaatctttcccctgaacagccaggcccctaactgtcactcgcccttatctcctgtctttcttctggtttcacccaaggcaatctagctgcgctagtgtttaagcttcacaaacttagccattcattttctttttctccttaggaatgttcacatgctttctctttgcctgaaatattcttcttcccacttatcctcttgttacctctcactgtaggtatcaatttaacactacttctttagaaaggcctcccaattggaattagatcccaatgcacacgatcatcaaaccctccccttttcatccaaaatgcttaccacaatttgtaattatatatttgatgtaggcttggtgaacgcctgcctcccctaccagactctgagttccatgaggtcaggggccgtgtctatttgttcattactgtacactcacaaatgttttatgaatatatcaaataaaaaattctgcttcctatttaaagtcatacagtcagtcaataaatagttataaagcaattcttagacattgttaagaaggtagataaggaccatggcaggtatttttttttttcaaggaattggcaataagttaaagaaaaaaaaggagggggtgggtgttgctaagcagatattcccccgctttgaatggcctctagaaacttgtgaatttaaatcatgcagtctgtattatttttgtttgtttgttttttgctttgagacagaatcttgctctgtcaccaggttggagtgcagtggcgcaatctcagttcactgcaatctccaccttctgggttcaagtgattcccctgcctcagcctccggagtagctgggactacaggcatgcaccaccaaacccggctaattttttgtattttagtagaggcggggttttaccatgttggtcaggctggtctcgatctcctgacctcgtgatccgcctgcctcggccttccaaagtgctgggattacaggtatgagccacggcacccagcctgtattattttttaaatgtgtcttctggatgaatgatacctatagatctatttaagtttcatagaacagtaatagtggaaaaatctgaagcatatatagcaattgtatttgggttaaataaaatcttggtacagatggctaaacaaaagcacaatcatgcccacatccacaatgttgatttgttgtatgtgcactgcccatttctatgtcaatgacagaatgtaaggctggtctccttcatgttcttacaaaatacacctgtatcctacaacaatcctctagcaatatagcaaatgtgcagacatacttcgtaccttccacaatgacactaattattacccaataatattggcaacattaagcagaccatcactgyaggagtttgaaatatgcaaaaatatctgttaatttattcaaacttgttcaggtgtcatgaaagataaaaatatgcttccactttctatctccttcacgatcaaaggkacattttttaagtgtctgtgtttctttgatggcattaacttcattttttcatccagctacagtggttcaaaatgcatgagatactttaacatatatttctgaaattctagtggtaggaataatagcaactttgctattaaaaaagatttctccacaaaatgtttaacaattcaatgtttctacttttaatagttggtgttttgttcatgaaaaaatgagtttctaaaatgtaaactggtcagaatcattagaagcaaaatataattgcaataatggcctatttgatgcataacatcataatacaacagaaaactttcaccctgatataatgataacattttactaaattatattgcaatgaaatttcttaaaatacctgaagctataagacttatgctagttacataatcttggggaataaaagctaaatcagtcaagatgtatttataagaggaaaaaagtatatatttaatgtttaagcatcattttaaatcctacaaataaagatttttgcaaatggactgcatcttttctgaggagattatatattttctttgaagttaccctttaatggcaattaaacactaatggcaagataaatgatgaaaaacttcaattaaaaagctggtccaacctgcacacatgatagaaaaacacaaagaggcttttctgaatgcattcacaatccagttaattttctaaggctttctcctgtatgtttttaaatttctacactctatgtaacaggagctaattgttcaagaaagagttacagagctacaaattcaattcatttctcctttggcaggatttcactaggatggttataagaagaggctgatgtttctgctttattcctcagtttgtccaagaattatcaggtattgaagtaagcagaactgatacttcttttgctctaggcagtaggtttttgtttggggcgaggatggacagaggtgtgttgtttgtttgggtttagtattctctccaaggtaagcccttagtaaattgaactcaaatgcttttaagctcagatccaccagtttctgctgggaaattctcaactacttaatttcttgctttcttcaggttaaaaaaaatctcccctaccttaccttatctagagtaagtccttactgagatgatccactacatctggggcttcaccaaatcttctgagcaaccctgtaaggtaggtgtcctaattctggagagcctcagtgtgtcaccaggagtaagggctagacaggagtctgtgttgtcaagaactcaacacctttgctctttccatcccagcactgtgcctgatagcacagttgagagcactgctctgtgagccttggaaatgccctcatagagttccagaaagattaccagttaccttgatgatgtttgctctagtacagacagaagctgttttaggaacgagcaaggggaatatgtcacncatgtcattcctccctcttggagacctttagtttctgaggtcagttaatgaggcagctctttccttctgacctgtagttctttctttggtccatcacagttagagacactggctgtatatgatgtcagttatgaacatgcttcatgtcttaagatgagtcagtatagtaaatgggcatgaattaacttactctgcacacagcacttacaggagacacaaaagaaagctaaggactgataatctagttggaaagtaagactaacattatactgaatggaaagtcaaagatgaccctaacacttctagagtaaaaaacaaaaatactaaagacactttgaatagaaacgggagatacaaaaaaaaaaaagtcaatctgagrccaaaagcaaataaattctattctgcctacactgagttttagatgacttttgagtagtacaagaagagaaatcctgtatacctttggaaatacagacctggggcacagagaagataaagtttaaattatggcagaagacaaactttccctgaaaagtaggatggagatgcaagaaagaaagttgaagggagaacttgtgggactactcaactcattctttaggaaggaaaaggagaggagggaggaggagaggaacaaaaagggaagccagtagaaagggcagcagggcttgtaagctcatgatagctataagatgaatggtggagagggtaggggaatatagtttcaaaccttgcaaagtcagaaaaaatatggaccaagaaaagatcttaagatttacgagaagaatgcgcactcataattttctaggaattttcagcattatggaggaggcggaaattagttgaaaagaggtgcagaaggaaatggtgactaagaattaaaaacatcaactatagaaagtgcattcaaatatttaaacaactaaatgataataataactactggcatgatataatgcttatttatgtgccaggcaccgttctccrtacttacatgtactgcctaacttaatcctcactctaaccccataaactaggtactattattacttgtattttatagataaggaaactaggtacaagtaagttaagtcaccgagctagtaagtrtcagagccaggactctaatacaggcctctagaaacttataaatatgcacatgccctccacagaaaaacaggagaaacattgtttttgtcactgtgttcattatgaatccctagtgctagatccctgcctagcacatagtaggtactcaataaaatggtgttgcattaatggataattaactagaaagggcatgagagccaagcaaaaggatcagcgttgtatttcggagtctttattctgagactctttaacccccattgaggaactcctctattttttcaatgcttgtaaatgtataaaaataaamtcattgtgctttaattttcccccaaatttaaaaaataaaaataaatgccagcagaccaaaaagggcttacagaaaagatcaggacaaaggttaacttttcccctcaatccaagtgagttgttcgatttttagttagatatggcaacctgaggctggccctgcagtctctaaaaatctaaaactcattttcctcttctgctgcatactgcacagggctgtaagctgctccccaaggcaaaactcactcagaaggtacttaagcaggtaaggattgattcccagggataaaactcaccatcaataactgctaactgcaaagttgttaaaataatttagttagaatctacaaatttttaagcagttctttctggtattaaatagtccagctttcaagctcttgacaactgaaacaaaaatggtagaaaatatttcagccgcacctcaatttggaataggaagtgaacatgggatccatttcatattcctttctcatcctctcagaagtaccatctgatttgccctatgcagtgtggtttctgttttcagatatatgcattgattaactaaatagtttaaactatgtaattacttattcaagctcacttaatagatttaatcagcattggcttggggaaagaattaattatggtcttggttactttaggagacaaaaatcaaaaaagcatttattcaacgaatacttactgctatgtgctctgcacagtggaggacataaaagtctttttaagatatgacccatatcctcagggagcttagttcatataccaaaattttcatgacttcccaattatatgtccttatatctacaagctgttatgattatgcacataagctcagatctcaaattgcgtatcttttgagatccatatgactttgtacttaatagttatatttctgtaatgggaccagacccaaagagagagggaaatctattttcaataaaatttccaatagctttctaaccacactttctttctaaattactgtgctcattaattttcctcttttttcttttgtcaacctaatatatcacaaaactactatctagaatgtatataaatatgtctctttactaggtaatagtatccacatataaccaaacactaaaatgatgtctaaaatacacactgatctatgtgacaatagttattactgcctccatttgatcaaatatatttcaagactcagcctttctaatatattagtttctatattatataaaataggaatatttaaatgattctttttaattatctttaaatgatgaaaaggactcatgtcatgtattataaagctagactatttagtggaaaatgctgaggatttttttacattctgctttgctattggtaaaggaatttgtttcataaatgtccattttctagaatactttctagaacactactttctttgacctcaatttccacaacaataattgccactggttttggattgtgakttgttatccatgtttatctgattcacaacacgtctcttgtatttataaaagtactttaagacatgtttcaatttttcccattaaaaccaaaattgtgtggaacatttcaaagtatctcttgctatatggtttctaacccaccaaaaagaaaaaagaattgccttaaaccaaaattcagatttactgactaagaggaaacaaaacctcttaaaacagtctactcccaatcctgtcttttggagtttaataatttaaaaaactttgaaaatattatttaataattttaaacaatttagctctgtatttaatttttaaaatttgggtaaaaataaaatactaggattacataacatcctgaggaagtaactataaatctgtaaactatcttttgataaaattaaagcactgttatgaactgattctacttcaccaattcaatataaattatataaagatgtctcatagagaaaaaatctgttgaagtggctcaatatgaagcattatgtacaggtcatttttctgcaagactttatatttcatatactgtatgtatatgaaatgctgaaattgcgtattaccataaaattttatctgctaaagaaaatgctctattagtctaaaatgtatttaaatccatctctttacagaaacaatttttatcagtatcactttcgtgtagttataaaatgttgatcactgtcaactaaaataaattctaataattaatataatacataccttttttcatttaactttcctgcatgtcttacattttagatattttcttccaagagcaccaactaactacattgactccctcccagtcaaatttggggggtggcaagcaaggtgggggaagggggaggtgggagaacaraaaaagagaaaaatattaactacttggttcacctgtgacagaacccagagtgacctcttgtggtaaatactaactacagtactttggtgaacagcacaaccttttcctaggctacactctggagaatgcagaagcattgttcctccaagctaagaaactcggctgtgactcacaaggaaagaaaaagataaacactgactaaactaaagggcttctttaggaaatctactcagtcgctatcaattaaaataatcataactacgcccttctattaaaaataatgtttatatgatccttttagtaagtcagttacaaggtgcctaggtagatggatgtcttacacatcctacttctggaatcaagcaaaagataaacaaagagggcaatttctagtgaagataacagtatcttagaataagcatccctctatcagcaatgtgctgcattcattatataacacagtgtgggaatctaatgcaagggacaatcttgtggcttatgtataaatataatttaggaagtggtcagtataatttcaacctctttgatattttaaatgttaaagtggtacattataagacctgagtaaaccagtgcttcaaaaacactgtgtggttttatcagtatttcctgaatagtgtcttagatattaaagaaaacctttcaagaaaaaatgtcaataactttataacaacaacaaccaaaataatgtccatttgttttccattatttcttttaaattggctaattgtaaaagttattattccttttttgttttgtttacagatcactagttctgcttcctctcttataggtttcttttaagacctcagtttgtacaaatgtcaattcagcatgaaaataattttggacttttctacaagtaagagatagctgagtaaaaaaagtgcttgtgcaaccagctatctcaagcagaatgaaaaattgaggatactgagtttcttctcttgaaaggtaagtggttcataaaatactaccttctctgttttcttctttcctgaaccccttttttccccaaaaagaaaaacacttctagttttccacaaaactaaaataaacttccaatttgtcataaagcttaaaatattaaataataataatttctagttaaaaggtattaatttgtagttaaaattttcaaaatagcaacctagcttactgtcactcaaactaatcatgtctgcctatttgctaaggaattgaagacaacatatgagtaaaatgtgctgcccaaagacaaaatcaggttgaaggtctttgaaatattttttgtcttttgaatctaaattttaacctaaaagtcctaaaaacagttacyttcttccagatacttaacctctacccacaagtttattgctccctagagcccaatttagattaatagtttgcataaataattgaaatttaaataaaggaaggtatcctaataatgttctagacacaaatctagtctgtaagcccttgaggcaggggccttctgggagacattgctcagctgtaatgaactcaccacatagtcctctaaaccttcccttactaatggcttattttgatcgtactagccaaaagtttgtctaagccgtcctatagcatttatactttaaactttacaacttcttagagtaataatgttctctatatttactagaatcacatgctaagaattattataattccttttgtctagaaatgatcttatcttttatctttaaactaaaaagaattccttgcttcttttgagatttggctataaagkgtgtgtgtatccatcctactcaatggccctcattattttattttatagactttgaatcaccagtaacaacttgcaatgctcgcttataacagactgagtcaactaaataaggaaaataaaaatccagtctcaagaggtgtgaaataatagcataggttatagttgccactctggagtacagaatacagtgctggtattctgggaaactgcatctgaggagtttggaactttattaagaaatcctcaggtataaaattgatattcaaatatgccacacttcttgcttttttgtttcacatcatcaaaaaaatgttctggtaaatttgtaactggctgagatttcagttcattggtgatacccatggacaaataaatgtctgacattttctctttgtgtccatttcccttgcatgtcccataatctctctctctctctctcccaccccacccctttctctctgctctgtgtgttttgttttgttttgtttcctacatctctgttttgctccttgtgtgcaagacagagaaaaagagttagattgcttcctctctgtctgtagggtggtggacacactttacagacaaatcctaaaaaagaagaagtaggatattcctcttttcagttttctgggtggatgcctgaccagctgagtgtttacctatgtgactgtgtattatctgggtatctctctatatctatgtctatgtttggctgactctcactgtaagatctgaccttttcataagaagaaaatgrtattgtatcagaaagagcttttcttggggttcaggtaaaaagacaaggccagcctctgtttcttcaattgttaaatagattgggagtgctgggtgctattctttctcttcctgctaaacctctgccaacacttcactttcaatgttgttaagttagtgaataatgaaaccttcaaagtgacaaacctgatccatctgtgagaatcctgaagggaattttctattagtctcaattaaacaatttctcaggataaatttttctatttctctgccaaatcatatagaaatgacaactgcgggatattcccccgtgaatgtgtagaccaatttaataccataattctcaatttctgaggttctgcctataaaagaggtactgagacttttcagtatttatcacacacacctgcatatatactcactacaactatctaacacacttcaaacagttcagggtctttgagtagtggtattcaaagttagccataggcrattagaggtggcatttaagtgccaaaacagataaattttcattttcacttggtattgtccaggaaagaaacatttaaccaatgaaacgattatgaacatgaagtgtaaaaaagataaaatactcattaatttgagtggtagatacaaaatggaggcaacagaaacagacatttctaagccacctaaggtaaatctttatttcatagtatatctacaatttttaaaaattcaaaaaactatctcatagtttcatagtctgcataagaagcttcaaccacagttgctatattaataaagtttagtcaagggattctcatgttctttctctttataaagcagagcaatcgtaaccctgcagattttatgttttaaggccttctctgaaaagttctctcatagaccaaattgcgtgaagttgaaataacccaagaggatgagaaagctgaaagaagacttgtatacttaactaattccaataatccacacattttccccaaactgttttaagagtaatatccccttgtattataggtttagtataatcttaatacaagaaggtaatctataagaataaaaattgcctaccattatgaatttatataactaaaaaatatacaggtatttaaaagaatattaggccagaccctattcrctattttttccgacccaaatacaacactactgctttagacttttattgtttcaggcattggccaaaacgaagaaataaagtttaaaacctcaaattaaaaacaaataacaagtcagatatttggggaaaatactttgaaacacttaaatacagttagtctcaaaatcagaggaaatatttacaagcctagtcttaaaagagattctaatctaagaattagtataatctaatctaccatttagggaaagcattatttatttaattatttgatatttcagtgtacctctgtctttccctgtgcctccaactaggcaaggagcctcttaagaagaggggatgtgtattaattacttttttttaatcccaagaaaccacagagtatctgtggtataaggcacccaaataaatattgtttcaatgaatgaataaacaaggcactatggaactgcatagagtatttccattgctttgttccaagctctactgtactccatatacagaaatgtctttctcattattctccaagcaagagatgtcaaaataacagcctctgaaggaaaaacttaaaaagatattcaacatatcttacttatgaagtttaaaattatacaaaagaattaaaaacaagtagaaaacgcagatttcagtaagatgcaaagtttataaggtcttaaaatgtggaaatatataaccattcccatccaaaatatcttgtaggaaatgaatgtataaatggatggtattttaaagacacactaaggcaagaaaactttaacgccagtagcaaggtaggatggcatctttttgatttttttctagttgcattaaaagcacaatagttactgcttcacttctacgtttctcatgtttaagtcaaacgaaatatatagatgaatgtacagtgaaaaacatagcaagaagaaacttgaagcaccaatttgtccacagtaattggcttcccattttgcaagcactgaactctttcttaggttcaacctcaactactctccccggcacaaagcacctttcccngtgaccacgagggccaaaagcctttccagagatttaaatcttgttaagtagccactttcgcagccattcccaacttgagggaaacctttccactgagattaactcagaatttggtcagtccctgctgctcactttggggaaaaatgtgggagaaggaagaacaagaaagataaaagcaaaactcaactctatgttccagatgtacctacaccctatccaacccctttctttcctccagttctgggctctggacaggtgggagggggtgagtctgtctggtaggaaggggatgcaactaactttcccccaccatctcattgccaccccaccccaccccaaatccagcccaactggtaaatgaaaccaccaggtaaggctgcctgcatcctcctccccccttgggagagggatgggatggggaggatggggggcgcgtgtgggcgggatggaggtgggggtgttctgaactacaactctccttaccactggagcgcctgacgatgttctccaaaaatgtgttctgcggtgccaccagccctctcttgccccccggcatcctgggtctggagagcagcggccaggatccgcggcgggggagggggggatgcaggcaaagaaggtggaggaagaggaggaaaaggtggaagagaagattgagccgaaagaagagggggcgcggcggcggcgacggggtcccctgactgtgtctccagcccgacccggatgagcagctctggggaggaggaccaggcagttcatggtagtagcgctcccccggccgccgctgcccagactgtggcggtgccgcacacggggctcgggaactgcaggctccgcggggcacagtgcgcctgcgccgcccccgctgtcgctgtcccgccggtgctgatgctgaggctgctgctgaggctgctaccgcggcggccggcgcctgggcgcgggctctgcatctctccccctgctggggagcgcaagcgggaactcaagcccccaccctcccaatccccctcagctcagaccgagaccccttccccgcgccttcgtctcccggtctcctcgtccaccccctcgcgcagcgagctccgggctgaacagcgtagcccaacttctgggctgtgcgcctggtggttgctcctctccccggagatcgaggcaagcgatcgctgtccaatcgggccggtggaatgggagaagagggtgccagagagagcagtggccagtcggaggctcacatctcggcgtctcccgctcgggtcccgaatccgggctgctggcgcggacgcggctcccggggcggaggtgcgggcaggctccagctccagccccagccgaggctgagagcagggcagggactggctgggcggcgcgcggggacgcagagcagccacctgacgctgctaccgcccccctccgggctccggcgcctgaaaccttcctgaacactggcgctttccgcaccgcccttaccccaccccggagcgggagcgcgagccctgaagtccgagcgcacagccggcgcccggaatggcccctgcgacccgggccgggcttggcgtctgggggagcgtgcggccgcccaggggagtttcccccaggaccgctgagcgcaggaggcgatccgcgagcccgccaccgctgcaaagttgcgggaaaggttgcacttgatgtgaagagtaggggaagagggtgaataattcacacccgagagagggggagtgaggagggcagtgttagcgatggaaaaacggtaaaggctgtgggggcgaagatgcgccagggtggrgcagggcacgaatcacctctaacaaaccccccaatttccaggcgttgagaacggacagcagcggcaccgttacaaacagtccaaaagcctgaatgtgtcacagagaaaggaaaatggcataaatgcgaaaggggtggagagagatggaaaggaaagaggagcccgcactgaggcaccttccttgatctaaggcagtggttctcaaagtggcctggacgggcagcatccgcatctgcaccacctaagaacttgtttataatgcaaattagtggattctaccccagagttagggaaccaggaactctgaggattgggttgactcatctgtttaaacaagccctccaggtaaatatgatacatgtaaggcttcctcttttctctgggggctgcacctgggcctgtcgagaaaggacgattgtgcaaacagggtcaaagagtgggggaccaaaagtgcactgccgcggcgtcagcggttggtggtagagcgaagtcttcagtgttgaaggcgaaaagatagttggatgggtgcgtccccttttgctggggtcagaatgtgctagaggagaggtaattgcgttagaaattatcaaggtcagattaccagaagcagggagaatccccaggcaggggtggaagtacacatctcagcacctgtccccttttggaaccccctagattactaatcactgacctcaagacaggatctctctctctctgtctgtctctgtctctctctctctccctccttgcctcccctcccctcccctcccctcccctcccctccctctctctctccccttctctctcccctttctctctcttcccacctctctctctccccccacctctctctccctttctctcctctccccaactgggtaagcctactgcttgaagcagctaaatgcaaaaccaggatccagcctttaccttggggtcattttttccctctctgaaattttcagagaccaggcagctgagcaaacccagaaggttgacacgaggcaattttattccgctaaaaatctttatgcaaaaaaaaaaaaaaaaaaatcaagagactcggtggaataacactaggctattctagctttccacaggaagtgctgctggccatggagcttatccccttacagttaaaatgtcttttaaatacatcaggtgtgtttagttaaataacaagagactcaggtgcagattggatccgtagtgagcttgccacagcagcactcaagagatacggccaggttacaactccctccctgcagttggtgggaagaactgaaaccaccatcaccacagcagccttaaacacataattgaatttcccactctagcgattcttttgtgacctgtgttcaaatgatcctaaactaatcagtcattcattggctgggttggtgaatagacagacttattttttaaacatgtataattcattgattgctattctagacttctagcatgctataataattccatcatcattaacagagaatatttcaaatctatatgttcttttgcacatcgtcagctgcccacatctcgcctatgggtattgatttaaaatctcaggttctcagcatttcccatctagtatatatattcttgttcctaatcattcctcygtgggtgtattaactcacatttcccaaagaggaaattcttttggactccattaagacacaatcacaaaattactggtagaactttcttattcccatctgcagattcaattaaatgacatttatcctttcttctttgtttctaataactccatagcattrtaacgtttggattattttaatgatcataaaaaatgtagctgtgtagtgtcaaaaggttacacacttttcttaatcttctagtttaaattttcattttataaaggaagaaaccaagacccagagagatgaaatatcctgtcccagatgacacagtgctttagaacagtctgcactgagactaaaatcaggtctcctgaccctgtagccagagctccttgtaaataatagaaaataacctaatcttaggctagtgtggtaacaaccagcaacatcaaggatctctattgccatcgatgattttgcagcccatgaaagaagagaaacccttggcaacaacttgcaactgttcccaatcaaaatagagtcaaggaaaatagagtagcagcatcatatagattgactggccctaaggaatatgctggccagttgcaacaaggtgctaatacagcattttaaaagtgtgttacagactccgtatgtggggaacaaacctcaagatktaacagatgagagagataggaattagaaagcttcaatgtcacacaaagacaaagcttcgttttgttatattgtcaaaagtccattttaaaacagaatcatttgttcttttcttctgtccctccaggtatggtaattagaccttgtctgtgataaccaagaattccaatccccagaagtgttcactgactcctaaatcacagcagaatggaagctggctgagtgaactgcaggtgtgttctagtctaaccgaaaccaatataaacgagaaggcttagaaaactgatgtaggaagtgatgatttggaattactactgattcactgaaggactcttttatcaaatacccctcctctgaagattttctaatatagtttacttgacagtagctgtaattatatgtaaattttcaaaaatgcattacaaataggtacagttggacttactctttgatcccttttgtgcaaatgatccaascactactttctcgggaaatttttatcctgtttcctgctttctgtttctgagcaaacctcagtacagctccaagttacaacctgtatgtagatgctaaatgggtggctctgatggagggatgggaagaaggaaaaaaggaaaggggcaaaagtgattccctatcatggcctccaaggttggcctcactagcagcagcatcactccattccatttttaactccctaaacttcactgcgtgcctttccacaaagccctatcccagctctagcagtgaagcatacaaacatcactaaatttctttgcatgcaccaaatctcacatttacacccatatcttctacctttcctcctttctgctccccccaactcaggatcgaagttgagagaaagcagactagagagacctagtgcttggactgtggacccagactacctagaatttaatcttgcctctcccacttactagctatatgacccagggcaggttatttaagcacaacatccctttctataaaatggggataataattacctatttaatagtgctgatatggagattaagttagttcctacttgaaagcaatgcagacaatatctgacaggtaataagcactatgtaagtgtttgaaagtaaatacatgagccttttcctccccttcaactttcatttacagtgaaggctctagatagtggtcactactaaggttcaccaatatccagttgccttttcctgctccttgaaatcagtgtggctatgcaactaatgctggtcaatgaaataggaatggagggaaagggtgttacttccaagtgagcatctaagaaccaggacttattttctcatcttcctcttcccctgcctcagtgactagggaatgccaagaaatacaaggagaacacctgcccaaaagtgttacctagacctcagtagacattatataagcaggaaataaacctttgttgtgtcaagatactgacaatccagcactatttgttactgtgccataacctagtctatctatcctggctggtacaggttattaacttgctttgggaacaggagatcagaggaacaataattctccatcctgactgcacattacagtcacctggagactttgtaagaatcccaaagccacagcccagaccaagtaaatcaaaattccaaaggatgagacacaggcattactatttttttttaaagttccccaggtgatttctttttttcttcttctttttttttttttaaatggagtcttgttctgtcaccaggctggagtgcagtggtgcaatctcggctcactgcaacttccgcctcttgggttcaagcaattctcctgcctcagcctcccaagtagctgggactataggtgcccaccaccaaacccagctaatttttgtatttttagtacaattggggtttcaccatgttggccaggatggtcttgatctcttgacctcatgatcagcccgcctcggcctcccaaagtgctggcattacaggcatgagccactgcacgcggccgtgatttctatatgtatcaaggtttagaaccactgacctagaacaaggctgcatcctatgggaatctctggggtttcaatactgtatgaaaatcctcagctcccaaggatcataccttcagtttcacctctcccacaaaggctctattacatgcagctgtgagtttctgtgtacttgtatctgctgagcagcccagaagagaaccacaaaacctcccagactaatgcaccataaattgaaggcctcctaactcaacttgaccttctcaatacagcccaatccttctgtacatcctgatcagctgcattttccattatctgctgtagctttctcaaagcatcttgtctcttttcacacctcagtcatcactttttcacctcccagtctcagaagatcactcgtagaaaacaggtcatgatgtcaattcttagacttcctgccattgctctctcttccttttcttctttcttccaaacaaatagaaagcaatttctctcaccatccctccatcactgatctggatcctattcatttgggcctctggagacctcattttgctgactgtcccctcatttctcactttgacatttaacatgctttaaaaatgctttcttaacttgttatttccctcaagatttggctctgtctctcctatctcttcatggtcaatcttctgagaagtctgtgataggtgtctccactttcttgcctcctattcactccttaacccccaacaaattggcctcctttcaactgttttcctgaagttgcctccccaaaggtaatttttaaattgcgaaatccagtgaggcaatttcattgctaatctactttacccacctatgacgtttgagcctattactaatcctttcttcttgaaacattctcctaccttagactgacttgttttgaatactgatgctgtaatctcagcatgcattttcattaacctatctgtgcctcagggttttttttctgtaaaaaaaattaataatgcctaccacatatggttgatgtaagaattaaatgagatagtacaggtggagaatcttgcatccagctttctgaaatagaaaactctgatatcctacgggtttttttcataaattttttacaaactcatttgccaataaaacctgacctgaactgttaggtggctatttgtactcttttttttatcccatctgctgtggatattgaccatgtcttgctgcacagatattcatgtgtttgaaaacagagattgctgcccctaaccccagtgagacagatacaaatacatagaaatccacaaatatctgaatyccaaaacacagatctttttcctgcaactgtagatacccatacccatggactgactggcaattccacgggaatctctaacatattcaaaacaaatgaatcatcttgcagcctgcccaaactctctccccctccagtgtttcttatctcaggagctacctctatccacccagttatccaagttagtaacatcaacacttctctaccccygactccacatccagtcctattcattcaacctcccagatatctctttaaactatccacctctcactctctctgttggctctgctccaggtcaggccccgtcattttttacttggatttccacatcagccttccaactggtctcccttcttcctgtgttttccggccatacatagtcctctctattttcttctccaagctccaccacagttcatttttccccctgcactatagctaaagtgatctttctaatgcataaatctgttatgtcatttccctgtgtaaacacttctaagtctctttgcccccaggtgaaagctcaaagcccttacctggcctttttatatccttccctatctgactcctgcttatctatccaggatcaactctcatcattccccattccaaccctccaccttcatacttcctccctccctatgtccctttgtattccttgtgcttactatgctgtctctttcttcctccaccaatgtcctgcatcactagccactagccaccttacttcagacactatatgagatgtcattgcctycaagaggccttctttgactctccatgacctggtaaacagcccttccttcctgtaagttcttctaataccactctatgcttcctctgttgcaacattgtacctcactctttgcatctcaatgttgttaagacaaaaataataataataaaaaagaaaagattgcaaatacagttgaaatcttatgtatctcttcaccagaactgccactagtgcttttggcatcttcgtgagaattaggaaaagaagtcccttctggccagtcatagggccaagtcacagcacaccgattgatgagatatttgtgggctggatttcagcctctattttttcccttaatgggtgtgcttggtgggaagaaggagggagctttctagctgacagaactagmaaaaaggaaaatcataatgataagaaagcttgtgatatgtgactaacagtagacaaaatgaacctttaaatggaagatagaattggaggcagttaggggctcatcaggccaacttaaggggtttggactttattctgtaggcaatgaaagacatattttgagtaaatatgtgacatggtatttgaggagaaaaaatcagtttctgattgaagatgctttagggagagaaaagtccaggattgaaaaaactacttaagagacccctatatacaagaagctgatatttttgaaatattaaattattcccaagccccatatttactgtcaccctcttgctttcattgtatcatcattcctcaccacagctcacctcttcctggcttttgaatttcaagtctaagcattagaacagaaatacaatgagaaaagtgttataataaaggctctatacattcttaccyggtgttagtcactgttctaaatactttacacgaatggtctcatttaatctcatttaattttaatagagcaaaattgaatttaattcaattcaacaaatatttattatgcatctatacaccaggcaccatagtaggtatttacattatcctcattgaaccaaaaagaaactgagaaacagagaagttcagtaactggcacaaggtcacaaaggtagtatgtgatggagtcaggattatgtcctcaggtactctgtcttcaaagcccaaatgcttagccatctatttcaccattgcactacactgtcacccaaaagattttgaaaatatctaagaaccagctgtctcatatgctccacatccaccctaaatgagaaaaaaattcccctgtgctaagggaaggaagacaagttggagaagaagagtaaggaggaccttctcctgccacaatgcagggagagctgtggatctccaaggaaaataacacaaacctcagatgtaaatttggagacacaaatatttaaaccatagcaacattgtgaaaaataaaaattttaggaaatattcttctaatattaaaaaactactatcaaatgacacataattacaattagataagagaaataaacttcaagggatctcattgtacagcaatgtgactatagttaatggtgatatattgtagtcttgaaaaatgtaaagtgaatggatgttaagtgttcttaccacagaaatgacaactatgtgaggtaatgcacttgttaattagccagatttaatcatcccacaatgtatatgtacttcaaaacatgttgtacaccacaaaaatatacaatgttagctgtcattttaaaaaagattttttaactatcaaatttaacaaagaagtcacacacaacattgacaaatgtataaatttttagaatatatcttcattgttccattttcatcattaagataaaggaaaataccaaccaatgttcctgttggaactaccttatcatcaattgtaaccataggttggctacagatgcaagagtgaggcaaaaaccggtgaaagtatcctgtgagaatgagtaggtcacatggaatttgcaaaaagagagatgactattttaatagtatttgaaaattatgtgctacatatccttttatcagtagaatttataataaatttaaatatgtatatatgtgtgtgtatgtatatatatatgcgtacatatatatatatacatgcatgtttttctcttgagagccacctgttaaacctttaccctcacgtcactgtgcaatttgccacttcaaagtttagcaatcccagtgcaaagataaatttctctctccctaacatccaaatatcagtccagaggaagcccttgatttgccctaccaggatcacatgtctacatgctagtatctgcaccaagaatgggtgcggaggggctgtattactrtaactgaccaagcctggcatatgctctatcctggctgctgagcaatgcagcatttggtagtctcactaactatggagatagacacagttctctagaaggaataatgttgcagagcaaacaaaaacaatacacactcattatagtaggtcctcaataagtggtagccactatgatctctaacctttttttttttgagacagagtctcgctctgtcgcccaggctggagtgcagtggcacgatctcggctcactgcaacctctgcctcctgggttccaacaattctcctgcctcagcctcccgagtagctgggactacaggcatgcatcaccacgcccggctaattggtttttttttttttttttggattttcagtagagacggggtttcaccatgttggccaggatggatctctaactatttaatctctagaaagaaaattagcaacaatgtacttatttagtagtacatgtgacattttaagatttaaaaatccccaactcatttaaatgttctcctttctccaaggcctctatagggttctgaccattagctgttcatgcattgcttctttctcttaactagcacttcctaagtccctaatctgttcaaggaactgggctaggtgctgtggatctgcttcagtttactctatatttgataagtggcaatctagcctgatcacaagcccatctgttgtgtcacaaacatcctgtcctgaatatgctaccacttcttaaaaaaacagcttatgctacctcagcttcagtagactaattgaaccaaacatgttcaaagaagcaaactctaagaataaatccccaaatgtcaacgctgtctaggaggaatgaagaaacatatgggatcccaggcattcttcaaattrtgcatgccaaagtgttggaggggctgggctccaacagcagttttatgccttccagaaaagttgtgtggtcatgtagttctaattgtaaccttgaaaacaaataaatagggcatttaaacagtcgttgcaaataagattyttatcacaaagggccattctgttgcattctatttgtagtataaagcactgttacatacagctttaaaattggtcaraaaagtcctctattgtaagaacatcctctgcatgtgaatttaatgaatgctgttcaccctctataccatctttggagaaatcaggtcagcatcttctctggttatgactatagggttctttggggaaaaaaagaaaaaaaaaaaaaaaaaaaaaccatggcatgcatctcacttacttccaaaagtgaacaaatggctcttatgccagaaagaaatagatcaaagtggctcagatgtgtaaaccagaagcagttaaaagagttttggtttaaaggatatgtatggaccaaaaagaaaacaaaaacttaagaagtgaaaggagacagctcagctcacatcaagagagaaagaacagtctaaaatagtccagaggactctatagacacaggccagaacctgcaccattggcggatgagataggagaaagaaactaggaatagggctggagctggcaggtgggaggcttgagtgacagctctgtgctaggctctgctttaggtatgggtcaaaggcaatcaccaagactcacttttcaagacaggtattatttgccatcgcattacagatgagaaagccaagactcaaagaagtccataacttgcccaaggtcacacagctgatmagtggcagaaccaaaattcaaattcaggcctgtttagctccaaagccctcttcctataggccagcccagtgaaactggacagcaagcatccaaatcccaacatccaaagagatagtggtgaacttsactrtaatgtcggctgtcactcatacccggaggtggagcatggcaaaaagcttagaaggtggcaatattttcagccaggtgggtggaacaggtagggaagggtggaaagctaaatagaggagaacaatctgtctgattaaaggcaacatctcagccaatggctagggatggaatcaggaacaaatcaggcttcagcaagaggggctggtatggctgtagtcacgaaaccacaagtcctagcctccaacttgagttcaaacctaaactaggggcagaggccccatcatatggaacagaaggtcacagaagggggagatgcgagagaaaggggcagggtcttgggatgaaagttacagttcagtaggttgcaagccccttagcaactcatcccagagtaactggaccttaggcttaacgcaagaccacacctggcagggacatacatacttaggtactaagatgcctcagcctctgagtgggttaagcctgcaggtttaaaggtcttcagcactgggatccaagcatggctgtgcaagaaagccacagaaacaacaaaatcatcagattatttgttgagagcctactctgtgcctggttctgtgctgcagtccagggatgcattggtgaataagacagacacagccctgccctcatggagcctaccttctagtagaggagacagacaaagaacaagaaaccaacaaataagtaaaatatttgcaagtcaaaaaagttctaataaaggaaaaaacaagaggcagaaataaaagaaaaaagtaagtgggtagatgggtacatacaggtgatccttaatcatcatggatttgaactgtagggatccacttgtacacagatttttttcaatagatgtcttggaaaatgttttgaagattcacatttcaaaaaaaaatctttcaaatgaaccacatagcctagaaatatcaaaaccaagaaaagttacatatgtcataaatgcataaaatatatggagatgctagcctattttatcatttaccaccataaaatatacataaatctaccataagaagttaaaatttatcaaaatttacacacgcaaacacttacaggccttacatggtgccattcacagtcaagagaaatgtaaacaaatgtaaagatgcaatattaaatcayaactgcataaaattaactgtagtacatactgatgactgtaatcatttcttagccacctcctgttgctatttaaaatgccatgtgacgctaatcatctccacgtaagcagttcctctctccagtaaattgcagatctcagtgaaaagtgatctcatggttctcacatatctttcatcatatttgattcaataccataaaccttgataacaagaaaacccacayaaagtgccactagtggtgctggaagtgctcccaataagcagagaaaagtcatgatattacaagaaaaagtcaaattgyttgatatatactgtagattgaggtctgcagctgcgataacccaccatttcagatagccattcctcttgtaaacagatggcttaaacttatgtcattgataaatacagtacagtactgtcaatgtatttttttcttaccttatgatttttctttatcacattttctttagtgtaagaatacagtatataatgcatacaacatacaaaatatgtgttaatcaactgcctatgttatctgtatggcttccagtcaacagtagactgttggtaattaaattattgggggttcaaaagttatacaggtgtcagcaccactaacccccatgctgttcaagggtcaactatactttaaatgttcagtgaaaatctctctgtatacagcacatttacgttgcaaactaggggaaggaaagaagttaagcccaaaagaaatagaaggaatggcaggccaggcagaggaagcagcatgactgtgtaactgaccttaggtggaaaaaagttggggatgttcaagaaactgtaagaaaggggcactggagcagagggagtaagacagagagagctgcaaagagatgctgggaggcaaataaatgccatagcattcagggtttgtagaccaaagcaaggaattaaaactttcccttgaagtcaaagtaaaaggggaaccactgagatattttaaggtagcctataggcatgatcattaatggggggcctcatcrtcttctttattagtaagcaattgatccaaacaattacattacaaatgggtattattattaaacataaagagtaaattttattattagcaatgcattaacttttcatttttgtagcttcaagtgccaagaaaccttgttcacataaataacaagataygaatgaaagaaattttgttataacagtatcagtccatctttgtatgacatgatcacctctgcagctgtgtggcagaagtccagaggaaagagtgggagaaagtgagaaggctgttaccatcctataggcaaggaacaaaacagacagtggaaacagatagaagatggcaggtcagagatacattttgaagataaaatcagcatggactcaccratggaatgggtgtagaaagtgaggatatgggaggaggcagggatagctcttcccttcttgcctgcagcaactggaagaacagtggtgctgttgactgagatggggaagaccagttggcaaaagatgtgtttcaaaagagagctgcgttttggacattttgaatttgatatgccaagtagaggcatcaagcaggcaatttgatggttgagtctggagctcacaggaaaggttgtggatcccgggagcagaagatgtcccaaccaacagaactctgcaaggatttcgtctttgggcatctgcattacctccatgtccacattaccttttctacaatttcccaaatatgttaaaatgtgctgtttaatagctgtcttgtcttcagtaaagagattagaagtagaaagagataataatgagacaagagctacaacaaagagtccaaatgctcacagcactatttatattaggaaaacatgaggagcaacccaactatccattagtacagactagactaaatagtctctactcataggctaaatagcctctactcataggctaaatattgcacattccttaaatgaaatctagttcagccaccttggaattgctactatatatctacatttattttattttctattatgaaaagatatccacaatatattatgcagggggaaaaatcatattataaaaacaacatatgctgtataaatcatgccttttttcrttagagagaaattgataaccatattgatatggyccccaaatatgcttcccttaggtatatttttccctgagcaaaatgtatacaccaaaatttgaatcattgttgctttgggtggggaacttctgggtgagttttactttcttgttcacactttaatgcgttaccagataatttttacaatgagcacacatttctatgcatgtatgcttttacctctgcttttataatcagaatgagccaaaaaaaaaagaaaaaagccattttcacttaggaagaactagacamacaacagtctagaaactttaggtggtagccggaaagagccaggctggcagccagctgctctgccactgccgtgatcaaaacacagtttgtgtttattcagttaaattcaacaaacatttcccatacacctactctgggccaggctctgcttagatgatgaggaagcatagatgaatccaatcttagtcctaggcctctataaactcacaaggaaataacctggctttaaacacagttatagaagaytgtattcgtttgctgagctgccatagcaaaataccacagactgggtggcttaaacaacaaaaatgtattccctcatagctggaagctggaagtccaagatcaaggtctcagcagggtttgtttcttccgagccctctgtccttgtcttgcagatggccactttgtcttgtggcttctcatggcctttactctatacatgtctatgtcctaatctcctctttttaggagggcatcagtcagacaggattagagcctgatatggtttggctgtgtccccacccaaatctcatcttgaattcccatgtattttgggagggacctgatgggaggtaattgaatcatggggcaggtctttctcatgctgttctcatgacagtgaataagtctcacgaaatctgatggttttgaaaaacaggagtctccctgcacaagctctctcttcgcctgctgccatccatgtaaaatgtgacttgctcctccttgccttccaccatgattgtgaggcttccccaaccacatggaactgtaagtccaattaaacctctttcttttgtaaattgcccagtctttggtatgtctttgtcagcggtgtgaaaacaaactaatacagggcacacactgagaatgtcattttaagttaattacctccttaaaggccctgtttcaacatgcaaatttcgtggaggacacaattcaaattataacaaatatccacatacttagatcttcagtgataatattcctatttattttgtgatttactactgatgtctcttaaattttctttgtaaaatcagagatattcaaaagtaacttacaattaattaaaaaagcatataaataaagacaattactgtcatcttgtaaaatgattaggtgcwatatgacaatttcatttttatgatttacattcaagataggaaaaaattgagcaaagtgcagtgacgaaatgaatttttttcattcaggtaactaggcaatttagaaaaggagcacttagaatgaaatttctagggaatgatttcatatttattaacataatagagcttagtaatctatcagtaactcttcacataaccttgtcrtatgtgtaacaaggtgaatcaggaggctgcagtgagttatgatggtaccactgcactctggcctggttgaaagagcaagaccctgtctctaaaataaataataaaataaaatgtaaaaaggttaattaggcttgaataaaatcagggttaaagtgctgaaccacccacaagatttaaagaatatttttctatatctcatgtttgtaaaatccactcactttgttcaggaatgctcaaaatccattctgttttaaactatattctgtatgtgaggaaacagaaagcacctcctaactggagaaaagggtgctttccaagggacttcattgaccaaaaatccaacacaaagtagctgcccatggtcacaaaaattaaatggaaaaaaagactattttaaattgaaagcaagctcatttcttctcagcaatattcaggataatgctagcaacatatcctccttagcagacatgaaaaaacaaaaaaacctcctcacacaccctctgcattctcttttgtctaagattctacttgaaaaactagaagagagctagcagagctgtcacacacacacacacacacacacacacacacacacacacacacacaaaatagcagagcatccaaaaaaaaaaaaaaatagtggccaggcgcrgtggctcaggcttgtaatcccagcactttgggaggccgaggtgggtggatcacaaggtcaggagttcaagaccagcctggccaagatggtgaaaccctgtctctactaaaaatacaaaaattagccacgcattgtggcaggtgtgcctgtaatcccagctactcgggaggctgaggcagagaattgcttgaaccctgtggggcggaggttgcagtgagccgagatcatgctactgcacttcagcctgggtgacagagtgagactctgtccacctcccccccaccgaccaaaaaaagcaacatttatcatcacagtgccaggtatagagtagacagtcaacagatgtatagtggatgattgtttgctccttctttgaaatgtgtttccctgttagctcttgtcctttctcaactgtacccaaagttcttttggcaacatccatctcccaatttcagccaaatggcatagattgccttatcctggctacaccaggagagggtgtctatttggaccaaagtcaatcagcatttcctatccactttgtcaaccatgtttggtttaaagatgagcacaccacttcaaactaaagaaaagtgcaaagattttattgaacattcttgggaaggagaagctttctctctctcttctggttgatggattatgaagtctagaattaaagcagccatttagttgtctaaaaagatgaacctaatggatcaatagatgtagcttcacatccttggcatctagatattgttagagtgacttattgttctctcgattgcttaaactattggaattatgttttctgtcacttgcaaccaaaaaaattataactagttgcagtaaaaaattgaatgaaaaaagtgataaaccaggcatccaaccacagcacatggataaggaaacattgctatagatacattccatatgcaaacactatgagcaaagttgtaatgtgtcacataacaacaaagggaaaaattactacccattccctacaaaagataaaattagggaaaatctgtccagaagttttgattcctatctcttctcttgaatggtcaattttcaagcaacatgtggatgattcgctttataaattcacagtagaaaagatccaattccaggaaaactttgttrtcctttctcatmccatgatctgatttgctgtatttgattatttttataaaattgagcacatattttgtaaatcttgggaatggaactactttatctagaagaaaaataagttatgcattaaggactttatatatgtaatctcatcaagctgcataataactctgtggggaagattataaagtcttcactttataagtgacaaaataaaaggagcttcagaaaggttatgtagattgtgtaaggttacacagaaattaaattgtagagttgagatttcagcccaggtctaagtactagagctgtgcttttgagttattcattaatttattcaataattttggcatgccactgtgataactgatggaaatgcaaaagagaattattgaaaagttctccccacaaagagtttataggcttggggagaagaaataaataaatatgtatgtatgtataatatatgtatatatgtataatatataatatacatataatatataatatatatgtgcatgtttatatatgtgtgtgtgtgtgtgtgtgcagttgaatcaccacaatacacaaaaaatgtttttacagagcaatgaaccaagttggatggaaacatagaagataaagcccgggagtaaaagaaaggcttcataaagcggaatgatactgagaatcaaaaaatgattaaggagagatgaaagaaatatcaaagaagaagccacaacactgaggagaaagagagagtgagaaraaagagaaggggaaggagaaagggagggtgagggggaagaaggaaggcaaaaaggaaggagagaaaaagaaagagtggggaaggaaggagaagagacagaaagcgattggaaggagaggagagtagaggagcgggagggcaggggaggggaagggaggggagaaagaaaggaaagaaagacaagaaagacagggcgggccgcggtggctcacgcctgtaatcccaacactttgggaggccgaggcgggtggatcacgaggtcaggagatcaagaccatcctggctaacacggtgaaaccccatctctactaaaaaatacaaaaacaaaaaattagccgggtgtggtggcgggcgcctgtagtcccatctacttcggaggctgagacaggagaatggcttgaacccgggaggcggagcttgcagtgagccaagttcgtgccactgctctccagcctgggtgacagagcaagactccctctcagaaaaaaaaaaaaaaaaaaaaagacagacagaaggaaggaaggaagggagggagggagggagggagggaaggagggagggagggacaaactagcctggaaggcgctggacaccaaggatttggataagggtgtgggcaaggaaggagagaaatcgaaaattaaattggagaggcccactacataatagagtgggaaaggaaatactgatattaatatacattttgcctctttttaagtaggtttgggcctaaactggagacatttttaagctgtattatcacttttgctgtagttgtttaagaggaatcatgacaatgagatagcaaccaaacaaataaccatgttctcattagaaactttagtgctacggaagacaccaggctttctgctctacgatctatgctacagtggcatattgccaaggagaagagaacgtactgctgtttgcaaaggagaagagagagcaaacgatcatactgtatataccttatttaaaacttggaaagcaaactgcatggttttggaaaacaccgttgaagctgaaagttttcaggaatattcagcaattactggaaattttcaaatacaagggtttctgccaaccataaaagtgtctacctctgatgtattaggtggcagaataatgattcatttaatttaatggcagtagaaatagccaggtgttaatccacccatgcaggcacagctttaaatatatacatatataacagttgcagggtagaaagaactagcacagtgcttcctgtgttttgccgccgcttacatagtgaatctcttctctttagtatgctaagcycaatgatgcactttcctaatatatacagtgacaatagtgaatttacagaaaataaaattattattcactctgcttgctgcctccactgttgaaagatagtattgtaatttcagccaccaatatttaacagtgtttatcttggtgagatttaaattttcagacatagtgaaagtaagttatgtgactaataaatgtcacttgtgcatattttaaaattaagacaatgtagttttggaaagtaattatatgagaaaaccttagctcaagaaataagtcaaaamtaatgttcaatatttttggaatatgaatttcctgcagtagtctccagttaaccctttaacaacatggtgggttttttcttttgagctttcatttgcttagtatttatttatttatttttagattttgaatacaatttgttgttttcgtttttaatttttatgggtacatagtaaatatatatatttatggggtacatgagatgttttggtacacaatgggaaataagcacatcagccagaaaaaaaggagcatggggtgtccatcccctcaagcatttatcttttgagttacaaacaatccaattatactctttaagttaatggaaaacaattttgacaaatgaatttttaaaamcttatcctattrgtttagggtgtgtgtgtgtgtgtgtgtgtgtgtgtgtgtgtgtgtgtgtgtgtttagagacagagtcttgctatgttgcccggacgcaaactcctgggctcaagcaatcttcccaagtagctgagaatacaggcatgcaccaccatgcctggctttactgatttgggtgttttttttttttttcagtaggttttggggaacaggtggtgtttgtttatgtgaataagttcttaagcggtgatttctgagattttagtgcacccatcacccaagcagtgtacactgtaatgtgtagtcttttatccctcaccccctcccaccctttcccccaagtccccaaagtccattgtatcattttatgcctttgagtcctcatagcttagatcccactaataagtgaaaattacaatatttggttttccattccycagttacttcacttagaataatgggctccaattccatccaggttgctgcaaatgccattatttcattcctttttatggctgagtagtattccatggtgtgtgtatatacacacttgcattaaatgacttcttttctgctgggtagatgcccaggggtgggattcctggatcaaatggtagatctatttttagttccttaaggactctccacactgttttccatagtggttgtactagtttacattcccaccaagagtgtaaaagtgtttccatttcaccacatccatgccaacacctattattttttgattttttgattatggacattcttgcaggagtaagggggtatcaccttgtggttttgatttgcatttccctgatcattagagatgttgagctttttttcacttttattggccatttgtctatcttcttttgagaattgtctattcatgtccttagcccattttttgatggaattgtttttttcctgctgatttgtttgagttcctggtagattctggatattagtcatttgtcagatgtatagattgtgaagattttcccacactctgtgggttgtctgtttactctgctgattatttcttttgctgtgccaatgctctttagtttaatctagtcccatctatttatctttttgttgcatttgctttggggttcttggtcatgaagtctttgcctaagccaatttctagaagggtttttccaatattaccttctagaatttttatggtttcaggtcttagatttaagtctttgattcatcttcagttgatttttgtataaagtgaaagatgaggatccagtttcactcttctacatgtggcttgccaattataccagcaccattttttgaatagggtgtcctttcctcacttcctgtttttgtttgctttgtcaaacatcagttgactataagtattcaggtttatttctgggttctccattctgttccattggtctatatacctgtttttataccagtagcatcctattttggtgactatggccttatagtatagtttgaagttgggtaatgtaatgcctccagatttgttatttttgcttagtcttgctttggctcttttttgattccatatgaattttagtgttttttttcctagttctgtgaagaatgatggtggtattttaatagaaattgcactgaatttgtagatcgcttttggcagtatggtcattttcacaataataattctacctatccatgagcataggatgtatttccatttgcttgtatcatctatgatttcttttagcagtgttttgtggttttctttgtagaggtctttcacctccttggttaagtatattcctgagtattttattttattttattttattttttattttattttattttattttatttttgaagctattgtaaaaggggttaagttcttgatttgattctcagcttggttgctgttggtatatagcagagctactgatttgtgtacattaattttgtatcctgaaactttgctgaattatttaccagttctaggaacttttttgatgagtcttttgggctttctaaatatacaatcatgtcatcagcaaacagcgacagtttgacttcctctttaccaatttgtatgccctttatttccttctcttgtctgattgctctggctaggacttccagtactacgttgaataaaagtggtgaaagtgggcattcttgtcatgttccagttctcagggggaatgtgttcamcttttcagtataatgttggctgtgggtttctcatagatgctttttattaccttaagccatgtcccttctatgccaattttgctaaaggttttaatcatgaagtgatgctggattttgtcaaatgcttttactgcatctattgagataactatgtgatttttttttaattctgtttatgtggtgtatcacatttattgatttgtgtatgttaagccatcccagcatccctagtatgaaacccacttaatcatggtagattatcyttttgatatgctgttggatttcgttagctagtattttgtagaggatttttgcatcctatgttcatcagggatattggtctttactttcctttttttattatatcttttactggttttggtatttgtatgatactggcttcatagaatgatttagggaggattctctctttctctatcttgtggaatagtgtcaataggattggtaccaattcttctttgaatgtctgatataattcatctgtgaatctatctggttctggacttttttgtgttggtaactttttaattgccatttcaatctcactgcttgtattgggtctgttcagagtttctatttcttcctggtttaatctaggagggttgtatatttccataaatttagtttatgcaygtaaaagtattcatagtagccttgaatgatcttttatatttctgtggtatcggttgtaatatctcccatttcatttctaattgagtttatttggatcttcttgcttcttggtttatcttgctaatggtctatcaattgtatttatcttttcaagaaacccgctttttgtttcatttatttttggtattttttgtttgtttcaatttcatttggttctcctctgatcttggttatttcttttcttctgctgagtttgggtttgttcttttttctctagtctttagattgtctgtttgtgctctttcagattttttgatgtacgcatttaatgctatgaccttttctcttaacaccacctttgctgtataccagaggttttgatatgttgtgtcactatcattcagttcaaatacttttctaattttcctcttggtttcattgttgagccaatgatcattcaggaggaggtcatttaatttccatgtatttgcatagctttgagggttccttttggagttgatttctcattttattccactgtgatctgagaaagtacttgctataatttcaattttcttaaatttgttgagacttgttttgtggcctatcatatggtctatctcggagaatgttccatgtgctgattaatataatttttattctgcggttgtcaggtagaatgttctgtaagtatctgttaagtacatttgttctagggtacagtttatgtccattgtttctttgttgaccttctcttgatgacttgtctagtgctgtcagtggagtactgaagtcccccactattactgtgttgctgtctatgtcattccttaggtctagtagtgattgttttataaatttgggagctccagtgttaggtgtatatatatttaggattgtgacatttttctgatggacaagtcctttctttttttttttttttttttttttttgagacagagtcttgctctgtcgcccaggctggagtgtagtcgcacsatctcggctcactgcaagctccrcctcccgggttcacaccattctcctgcctcagcgtcccgagtagctgggactacaggcacctgccaccatgcccagctaattttttgtatttttagtgagatggggtttcaccatgttagccaggatggtctcgatctcctgacctcgtgatcctcccgcctcggcttcccaaagtgctgggattacaggcatgagccaccgtgcctggccgacaagtcctttcatcattatataatgttcctctgtcttttttaactgctgttgctttaaagtttgttttgtctgatataagaatagctacccctgcttgcttttgatgtccattacatggaatatcttttttcacccctttaagtttatgtgagtccttatgtgtcaggtgagtctcttgaagacagccaatacttggttggtgaattcttattcattctgccattctgtatcacttaagtggagcatttaggccatttacattcaacatcagtattgggatgtgaagtaccattctacatatagtgctatttgttgccttaataccttgggtttttttcattgtgttgttgtttttcaggtcctgtgagatttatgctttaaggagattctattttggtgtatttcaagggtttgtttcaagatttagagctccttttagcagttcttgtagttctggcttggtagtggtgaattctctcagcatttgtttatctaaaaagactatatcctaccttcatttatgaggcttagttttgctggatacaaagttcttggctgataattattttgtttaaggaggctaaagctaggaccatcaacccttctaggttgtcctagttgtagagtttctgctgagaaactgctgttaatctgacaggttttcctttataggttacctgatgcatttgcctcacaactcttaagattctttccttcatcttgactttagataacctgatgactacatgcctaggcaatgatgtttttgtgatgaatttcccagttgttctttgagctgctagatctctatcaagacttggggagttttccttgattattccctcaaatatattttccaaacttttagatttctcttcctcctcaggaacaccaattattcttaggtttggtcatttaacataatcccaaacttcttggaggctttgttcattttttttttttttaattcttttttctttgtgtttgttggattggattaatctgaaagcctgaagttctytcttttacttgttttattctattcctgacaccttccagtgcattttgcaattctctaggtgtgtccttcatttccagaagttttgattgttttttatttatgctatctatatggagatttttccatttatatcctatatcatttttttttatttctattaagttggacttcacctttctctggagcctccttgattggcttaatagttgaccttctgaattctttttctggcaattcaaaaatttttatctgtggtttggatatattgctggtgggctggtgtgatcttttgggggtgttaaagaaccttgttttgtcatattatccaagttgtttttctggttccttctcatttgggtagactacgtcagaaggaagatctgaggttcaagggctgctgttcagattcttttgtcccatagggtactcccttgatgtagtgctccccctttcccctaaggatggggcttcctgacagctgaacatcgttagttctcttctggatctagctatccagtggaattaccaggctctgggcaggtactggggagtgtcagcaaagagtcctgtgatgtgaaccatcttcaggtctctcagccatggataccagcacctgctccagtggaggcagcaagggagtgaagtggactctgtgagggtcctttgttgtatttttaggtgcgctggttttgtgttggttggcctccagcctggaggtgacactttcaagagcacatcagttgtggtagtatagggaggatccggcagtgggcgagccatagaactcccaagagattctgtcctttgtcttcagctactagggcagatagagaaagactatcaggttggggcagggttaagcatgtctgagctcaggctctctttgagcagggcttgctgcggctgctgcaggggatggtggggtggttcccaggccaatggagttatgttcctagggggattatggttgtctctgctgtatcacaggtcatcagggaagtgggggaaagccagcagccacaggcctcacccagctcccatggagcccacagctggaaagactggtctcacacccaccatgctcccccaacagcactgagtttatttccaggcagctggtgagcagggcttagaacttgcaccaggctacaagcctcccagctgagaaagcaattagactcacagttccttggctgtcccaccragtctgcagcagccatccacctccctcaaagggactgtgaattctctctgctttcctggtatgttcctgtggtagttcttggagcaacaattcgaaacgtgggtctccattcactgctctgtctgtccgagtaggagctgcaagttagtcctgcctgctatctgccattttcccagcactctcccagcatgggttttaactgcacaggtttatcatatacttggattttcttccacctctgccactcctgagacagcaaaaccaacccctcctcctcatcctccttctcagcctactcaatgtgaaggtgacaaagatgaagaccttatgataatcacttctayttagtgaataacaaatatgttttctcttccttatgattttcttaatattttcttttctctggcttactttattataagaatacagtatataatacctatacaaaatatgtgttaatcatttatattattaataaggcttccagtcaacagtaggctattagtagttaagttttaggggagtcaaaagttacacatggatttttgactgtggaggttatgaagcagtgaagagtgtggaacatgggcccagactatgcagctgaattccagttctgttgcttgctggctaagtggctataggtatattccttatctataaaattaaaataataacagtaattactacatagggttttgtgaggattaaatgagattttacatacaagcaatgcttcatgaatatatcattcaatacatatacatatattccctcgatccatgaaaggccttaaactctgtggaagacaaatgaacacaacatggtctctaattatgaagacttcaccagttaataggaatgccaaaacatgagcagagacaacaatcattcatttcaataaatatgtatcacctttgttatatacacaagctgttgtcccaggtgctgagggaaagcactgtatatcatcttaatttataactcctcaccttattgcatatatgataataagacacgttcaatataaagtgcgtttgaaacacagagttagaagttattgccagtaggtgaagggagatcgtaactagatacaagataatccagatgccaaagattggcaggattttagcatgttaaatacaatgcatgtgcagtaatgggttaactcaacaggcctgggttattcaaaccctacacattacaaaraaaaggctgacccttggctagttccttggagaaaagctctaagccattggaatgtcccacttgatcagattgtcttggtatgtctggggccttgggccatgggccatgccatggagtttatgctagcaatgtgatttacagtgggggtctgggccatgctgtatcagactttcctctgaatgacctgaagactaaataaccaaggttggccacatgggtgccccacacctacgtaacagacctacaatcaaaactctgtaaacctaggctaaggtgaactttcctggttgacaatactccatcacattgtcacatatcaatgctgggaaaaataagcactgtccatacaactccactgcaagaagacaactggaagcttgtgcctggtttctcctgaactctgccctatgcactgtttttctttttttattccaatttgtatcatttgactgtaataaactgcaaccatgactataacagcttctctgagttctgtgagtacttctggtgaattatggaactcgagtggggtcttgaggacccctgacacagggtgtccaataaccagcaccataaaagatgggtaggatgtcagcatctcaaatatggggcaaaaagcaattttggagacatgagagttgcaccacaaaaaaagctttaaatatttctatgtcaatgcagtctcaagactggaaatgatttttaagcatctgagacatatagacatatagatctataagtagtattaccaatcagcaatcaacaaatcaatttctaccaggaacagatatattccacaattttttatttatttaagaatcattctataatattttcattcagcttcttagatctcagaccttctttttactattaaatacaaatcataaagtatttttctataattctcattttaaagctagtgatttcttctgttacatgtagggttaaatccttttgctaaatcaccagaataattattttcaaacattgatagatgtttattcactaaattcaaaaaaactgatttgcaacaaaattttttttttttttgagacagagtctcgttctgtcacaccccgtctctactaaaaaaatacaaaaaaattagccgggcgtggtggcgggtgcctgtagtcccagctacttaggaggccaagtcaggagaatggagtgaacctgggaggtggagctagcagtgagcccagatcacaacaaagatttttataacatgtattaaaatactttttccccaaattagatctatattgcaactcaatatgaataagttcagcaataagttaactcaatatgaataagttatattcgagggcactaacgtatgccctcgaatataacatttatgatccttgctttttgatactatcctagtatttatgatactagtgccttgctaacagaaatttgatcaggtatggtgaaagaaaattttagcacggtgttttgctttcagtgaactcgtcaaatgtttactgaatgaatgagtatatatataaaatggaggaaaagaaggaaatgattagaaatatactttggaaagaaagaatgtcagctgggcgcagtggttcacgcctgtaatcccagcactttgggaggctgaggcaggcggatcacctgaggtcaggagtttgagaccaggatggccaacatggtgaaaccccgtctctactaaaaatacaaaaattagctggacgtggtggcgggcacctgtaataccagctacttgggaggctgaggcaggagaatygcttgaacctgggaggcagaggtttcagtgagccgagacygcgccattgcactccagcctgggcaacaagagcaaagctctatctcaaaaaaaaaaaagaaagaaagaaagaatgtgaaatttaatgtagggactcaaaatgggatgattgtcagcaaaaataataaaatatgtaatggaaaataattagtctaaaggttatatgacaactaaataaaacaaatatttggagtctaagttttcttaattattgtgcttcataawaatattaaaataattcacatatatcctagttatagaaaaaatatatttacatcctaaaattcatatggaatctcaagagatcacaaatagcttcactggacccgatggcttcattggtgaattctacaaaactgaaataatgaatgcatacaataaaacatagatggttatttgtaatcttgaatttgaaaaaactttctgagcctgaaaacaaaaacagttcattaaggaactagttggtatatctggctacaaaaaaattacaaatgtctgtattttggaacactatttaaaatgttttcatttacaagctaaatattgtgtgcaaatatataatagaccagtgattcatatctctaatatatgtaaaatgttcttacaaatcagtagaaaggtatgaacacttattaatgagaaggataatcaacatgatcaattcacaacagaagtttttttatctaataaatatgaaaaaattcaactgtactagttattaactaaattcaaattatcaatatttccacctggtttaattcatcatattggcaaagatatctttagtttataaaaacccatgttttttcagaatgtagaaatggtcctcaccatatttctggtgatatctaccctgggtaataattttccaatacatcaaaatcatttttgtcagcttgtatatccagttgcaaggattattattaaagtttggagcatatcccacatatctcatcaactatttggaccttctttagataaacaatggcattccctttgagtatgagttgttcaattttatagtatttgaaaaattagtcacatgtgatagttggcaaggataaggagtttgggagtattgtgactaaagaacagggttgcctcctaatatcctttttcataaagggaagacagcaacaaagagtataacaaacaaaattatgcaaagaagctcatggtaatcagtggctcttagaatcarggaatcttgtgccaatgatcttgcctacttcatattgtttttgcttctgaagccaactgttacaaattctgactcagtcacctggcagtagtgatgatgtcagtgatacctgtaagtgtattttctatattatctgtttcacttgctgtgttccagaactaaaatcaattttggctactatcacggcataaccaatttttccaaaatttagtggcttaaaacaacatttaatttgctcatagagttgcaacccaagcaggaattgtcaagccagcttatctctgctttactaggtatcgactgggacagcctgaaggatggggtttgcaatcatctgaaagtttgctcattcacgtgtctgatggttaatgctggccttaggtggagaccttagctggagatgcaggtcagaacaccttgtacacgacccagcttcctcacagcatagtaagagagagatactattacagttccttacttagattcttttaatattccttccagaacacacattccagagcttaatcttaaatcacaggccattaggtgaatgtaaatgttgtctatacttgtatatttcaaaatagctaaaagaaaggattttaaatgttttcatcacaaagaaataaatacttgaggtgatacgtatattaattagcctgattttatcattccacaatgtatacaggtattgaaacatcacattgtaccccgtaaatatatacaattataatttgtcacataaaaataaaacaaagtaaaaaagaagcaaaaatccctgtggataataaaactaaaggctctggttaatttattataacaataacaacagcagaatgaaagagaacaaaaccctctactgagctgtaacatataatcaattttataaagatttagtcactgattatgctggcagaaagattatcttatgaaaagtaacaaaattgacaaacctctaggcccttaatttatttcataaattgtattrtgattgtttctgattgacaagagcatttaaacctagaactaaacctttctgaagatattatgatagtttattttaatatgaaggatacacagtcattgaaatatattcatactaacattttatttatacataaataccctaggaaggctgaaattctcttttgatgtattgatatgctgtattgtttccttattctaagtttggtaaacaaaagtactctcactatagctttgaattaactaaaatgtagagaatgccaagcaagcataattattcctatagtctttctcttacaaggataaagaagaaaatctctgtgtttcatggtggcctttccaggaagctcaaagaaattttaaacataaacgtcatcccaacagttttattattataaattttggacctgatttgggaaatcaaaaagacttggcagagaagacaagaacataagtcacaagtatccaaagaaaagaaatagttacatgcaataattttaaataagtaaccatgactattaatatttttagccttaaaaagtaagtaatccttttccaaagtaatttaaaagtattcaaaaagaacagagttaacagaacaatttattaataaaagaaatatctgttgtctagacacaataactttgctacataaatgaaagcaaaacaaaaaccccaaattctagtgttagtttttgtttatgcagtccatatagcaacttgcaataaagtatttgtaaccttttctttctttatatagaaatgaacacaaatttctcaaaaatttcaacatatttcctcatagcttttcaactcattagttgcaaacattataatcctatactatgtatggcctcaaatttttcttttatagctttatcaagacacatatctctcacgaacatagttgcaaaactcctcaaaaaatactagcaaataaaatctaggcaaacataaaaagaaaaatattgcacaaccaagtgaaatttaccctagaaatacaagtttgatttaacatgcaaaaatcaattgatgcaattcatcatgccaaaagaatgaaggagaaaaatcacaatcatttaacagatgcagaaaaagcatttaacaaagttcaacagccatgtataataactctctgcaaattagaaacagaagggactttttttaacctaataaattacatctaagcaagacctacagttaacatcatgcataattgtgaaatagtgaatgctttctttctaagatcaaggacaaaacaagcatgtccactctcaccatttctattcaaccagtgcaattggcataaatagtaaatataaaagataaagattaagaagaaagaagtaaaacagtttctcttcacagattacatgacagttttggtagaaaatcctaatgattctaaatgaatttagcaaggtctggggatagaaactcaatatacaaaaataaagtgaatatactgtagtaaaccattggaaaatgatttttgatgtcatttacaataacatcaaaaatagtaaataattaggaatgtactgaattaacaaagacatatgagatataaacaacgaaaactaggctgggcgcggtggctcacgcctgtaatcccagcactttgggaggctgaggtggacagatcatgaggtcaggagatcgagaccatcctggctaacacggtgaaaccccgtctctactaaaaaaaaatacaaaaaaattagccgggcgtagtggygggcgcctgtagtcccagctactcaggaggctgaggcaggagaatggcgtgaacccgggaggcggagcttgcagtgagccgagatcayggcactgctctccagcctgggtgacagagtgagactccgtctcaaaaaaaagaaaactattaagtactgctgttattaaagaagacctaaataaatggaccaatataccatgttcatattttagaaataatattgttaaggtgtcagttatttccaaaccaatctagcaattcaacacaaattcaattatattctcagctggcattttgtaaaaactggtgagctctctctaaaatctacatgaaaaagcaaagatcctagaatacctaaattgttttggaaatgaagaaaagttgaaggactcaaactacctgaaattaagatctatgctatggtttggctgtgtccccacccaaatctcatcttgaattgtactcccataattcccccatgttgtgcaagggacccagtgggagataattgaatcatgggggcagttccccccatactgttctcatggtaatgaatacgtctcatgagatctgatgattgtataaggggtttcccctttagcttggctttcattctctcgtctgccactatgtaacacatgcctttcaccttctgtcataactgtgaggccttcccagccatgtggaactgtgagtccattaaatttctttttccttataaatcaccaagtctcgagtatacctttatgtataacacacacatatatacacacacacaccacacacatatttctttataaaaatattaagcctcaaaattaatttgagatggattgtagacttaaaggtaaaagctaaaaaacttcacttaaaaagatttagctacaaagctgctaaaagaaaaaaaatgggagaatatctttgagatatgaagataggcaaaagtttcttaggatatagaaagcyaaatcatgaaataaaaataatgttaaattagactttatcaaaattaaaacttcttctcatcaaatgacactatcaagaaaataaataggggccgggtacaatcccagtgctttgggtggtcaaggtaggaggattgcttgaggccagaagtttgagaccagtctgggcaacataatgagaccctatctctaaattttttttttttaattagccgagcatggtggtagatgcttgcagtcccagctatttgggaggctgaggcaggaggatcacttgagctcaggagttcaaagctgcagtgagctattatcatgccactacactccagcctgggcaagagtgagatcttgtctcttaaaaaaaaatggagaaaggggagaagaaaaaaagaaagaaaaaaatgaataggcatagtacaaaccagaaaaatatatttacaatacatatttctgacaaagaatttgtatccagaatgtataataagcttctaaattcattatctttatatgtatatattaagttacaacatacataaatgtgtatacatatataggatgttacctaatgataagcaggccggccacttctccaagaaatcatagcaaccttaaatgtataaatacactgcatgatgatgattctggactggatgctagaatgaagggatgaagggaagatagctataagactaatatcagtcaactgaaattgtaatacaaactgtggataagaatcctattttatcaatattaagtttctgattttgatatctgtactgggattttgtaagagaatgttctttttcttaggaaatacattccaaaatatttgggtgagggcaggttgtccccagtttactttcaagtgattcagaaaaaaactaatatacatagacacacatacacaaacacacacacacacacacacacacacacatctatatatatacatagagagagagcctgataacgcaaatggatgaaatctaaatataaaaagctgtcaaatctgaataaagtatatatgggagttccttatactattgcaactttattgtaagcttgtatatcaaattaaaatgtcataaacattaatggtccagaggactctggggagatggcagagtaggaagcaccagatatctctctaccaatctagacaccaattacattggcagactctgtctaatgtaactattttggaactcaggagtctattgaagacttgaaattcccacttccaggtttggatgataaattatggttaatttcggtccatttcagctcttagtacagtagcagctactcatcctccacccatagctccatgtcaagaagctgtatttgtgttcctgaagcaaccttcacacagtattcaggatcaaacgagtggggraagagggaagcaaacaccggggaagggaaagaatctgatttccacaattaccacattattagattcaaaggtccagttttcaacaaaataccacaaatcataccaaaaaaacaagaacgtataatccacttaaaggaaaaaaataagtcaacagaaactattcttgaaaaagacctgtggcagatatactagacaaagactttaaaacaactatcttaaagacaatgaaagaactgaaaggagatgtcgaaagaatcaagaaaataatatgtgacttaaaatggtaatatcagtaaaaagatagaaaatcttgtaaaagaccaaaaagaaattctggagctgaaaagtcaataacttaaatgaaaaatttactagagggattcaaatccagattagagaaaacagaagaaaaaatcagttaacttgaagagaggacaatggaaattatcaagtttaacaattaatagaatgaagagacaatctgtagaatgggaggacatattagcaaactattcatccaccaaaggactaatatccagaatatacaaggaactcaaacatcttaacagcaaaaacataaataatcccattaagagagggccaaggatctgaatagacatttcttaaaagacatacaaatggctaggagttatatgacaagaaattctcaaaatcactaatcatcagggaaatgcaaatcaaaatgacaatgggatatcacctcaacctagttagaatggttattaccagaaagacaaaaaataagaaatgtcggtgaggatatggagaaaacggaacctttatacactgttggtgggaacataaattagtatagccattatgaacaatagtatggaggtttctaaaaaaaaaaaactgacagtagaactaccatacaatccaacaatctcattactgagtagttatccaaaggaaaaaaaaagtcaatatatcaaagtgatacctgcaaccccatgtttattgcagcacttttcacaatagccaatatatggactcaatttaagtctccatcaatggatgaatagataaagaaaatttggtatatatgcataatagaatactgttcaactataaaaaagaatgaaattctgtcgttggcagcaacatgaatggaactggaaatcatgttaagtgaaataaacccggcacaaaagacaaacattgcatattctcactcatatgtggcagctaaaaaagttgatctcatggaggtagagagtagaatgaaggttaccagaggctgcaaagaatcaagggggaataaaaagaggttgattaatgggtaaaaacatacagttagatcgaaggagtgagttctagtgcttcatagcaaagtagagtgaatgatagttaaaaacaatatattgtatatttcaaaataattggaagagatttgaaatattccaacataaagaaataaaatgtgtgaggtgatggatatcctaaataccctgatttgattattacrcattgtatgcatgtatcaaaatatcacatgtaccccataaatatgtacaaaaattatgtattaataaacaaaaacaagaaatataaaaaaaattatcatttggggcacaagagaaaagattgaagaaaaatgaactgagcctaagagacctgtgggatgccattaaatgaaccaaaacaagcatggtaggagtctcaggagaagagagaagaaatagtcaaagaaaaaaaatatctgaagaaattatgactgaaatcttcccaaatttgatgaaagtcatggatataaacatctaaaataattgatggactccaagtaagataaattcaaaaaagatccacatcaagacattataactgaacttttgaaagacaaagaatcttgaaaccgccgagagaaaagcaactaatcacatgcaagttattctcaagaagattattcgcagatttctcatcagaaactctggaggccagaaggcagtggggtgatatattcaaagtgccaaaagaaaataaccatcaccaagtatcctatattcagcaaaactgtctttcccacatgaaaaagaaagtaagacatccccagataaataaaagctgagacagtatgttactgctaaatctgccccacaagaaatacaaaagggaaacccacagggtgaaatgaaaggatgctagacagtaacttgaagccatgtgaagaattaaaaatttcaattaagttaatgcataggcaattataaaagctaatattattataacaactgtttgtaattccacattttgttttctacataatttaagacactaacacattttaaaggattgttagtttatgcttttaggcacacaatgtagatacacataatcttttaacattagcaaacgaaaagtgtggagacagagctttatacacaatgtataaagacataatcttgtgaaattaatagccaaaaggggaggagcagagttcatgcatgttattgaagttaaactgctataaattcaaattagagtgttaagactctagtatgttaaatttaacccccatgataaccacaaaaaaaaactgtagaatacataaaaaaggaaatgagaaagaaatttaagcatttcttttacgaaataatcaaaagacactaatgcagaagtgagggataaaaagctataaggcatatagaaaatagcaaaatgagtaaagtaagtccttttttattgataattactttaaatataaatggattaaactctccaatcaaaagacagagattggtgaatctatttttaaaaatataatccaactacatgctatccacaagagactcactttagattcaaagacataaatacattacaagtaaaagaataggaaaagatattctacataaatcataatagtatgatggtgatagttgtacaacattataagtatatttaataccattgaagtatacacttaaaaattgttcagatggtaaattttatgttatacatattttatcacaaaaaaataaggaaaaaaaatcaacggtccaggttctacttctggcatgacagcttggggttctctgttgacctgctctctagcaaaactggcgaaaatattttttaaataattttttttttcagacagagtcttgctctgccacccaagctggagtgcagtggcacgatctcggctcactgcaagctccacctcccgggttcacgccattcttctgcctcagcctcccgagtagctgggactacaggtgcccgccaccatgcccggctaactttttgtatttttagtagagacggggtttcaccgcgttagccaggatggtctcaatctcctgacctcgtgatccgcccgcctcggcctcccaaagtgctggaattacaggcgtgagccactgcgcctggccaaataaattttaagtctctagaaatggccctaagagcatacagcaaattaaaaaaaattattcaagaaaatgtactaaaatttggtaagaagaataaaagtgtgtggtatatgagccaagactcagtttctcccttcttgcccccaacttagcaagacaaaatctccactcctggctgctacagccaggaatatgaggttccctctcactccagatcccagtcaggggactgtctttctgcagtgagcaagaaatcaaatttctcatcctgccactagctacctgttggtgaggctaactactggctgggtgcagctaagaagtgggtgctccctttttctacccaacgctaaactaggagacagaggatctaacttaagcatggtactgctgacagtactggagtctgatccaagtggctcacagtttggggattccacaccaggagacccaggagtgctgcacttccctataccaagcacttagctcctaagagtgagagtgtcactcaaagggaagcacaccattgtccctgctcccagtaccagacaagtgactcaaagtttttttttgtttttttttttttttgagacggagtctcgctctgtccacccaggctggagtgcagtggcgtgatctcagctcactgcaagctccgcctccctggttcatgtcattctgcctcagcctccctaatagctggactacaggcgcccgccactacgcccagctaatttttttgtatttttagtagagatggggtttcaccgtgttagccagggtggtctcgatctcctgacctggtgatctgcccgcctcggcctcccaaaatgctgggattacaggcatgagccaccgcgcccggccaagtgcctcaaagattttgtctaggggaaatatcaggccttagaagagaaaggtctgaacctctcccccagagaactgacttcatgtgaaacaagatgtggagaagttcaaacctaaggacatactgtaaattaacggagattgtgatgatagccaattgagaggaaactgatagattcactagagctataagctaaaccgcaggctggctagttttccagagataaatgaggaaagagacagatgaagacatcttggggtaggaacaaatctcaaaacactggctttaggagctatccgttcaaaagaacacaaatttgaccggatccatttgcggagcaacttatgcaacggagaattattgaaaacaatagagcaatcatctaggtaattagggaaacttagcagctgggtgtggccagagaaaaagactgttaaaaagaactctcagaagaaaacaggtgttttcttcaccagtaatattcattacttcagaatgagcaatgtattcttagatatgacaccaaaaccacgggcaacaaaagaaaaaatagccaaactggacttcatcaaaattaaaaaatatttctgctttaaaagactatagtatcaagaaagtaaaaatatatcacacaaaattagagaaaacatttgcaaatgatgtatctagtaagggattagtatccaaaatacataaaaacttctaaaacaattataaaaagataataatattattttaaaatgggcaaagagttttaataggcatttctccaaagaaggtatacaaatgactgataaccacataaaaagatgttcaacatcattagattacataaatgcaaattaaaaccccaagacaccacttcgcacccaccagagtggcataattttaaaaatcagataataacaagtgttgatgaagatatagagaaatcagaaccttcatacactgttggtagcaatgtagagtgggcaatcactttggaaaacagtccggcagtccctcaaaacattacagatagagttatcatatgatccagcaattccactttttgacacatacccaagggaaatgaaaatatatgtccacgcaaaaacctgtacacaaatgtttatagcatcactatttataatagccaaaaaattaagaaacaacccaaataatcatcaaattgtgaatagtgttagaaaataaacggaggcacattataatttttaggagtttatatgagcaaacaacaattcatgaatcagcaccaaacttaaaactgaaagtggtatggggctccactagatgcatctgaagggaagtcatttatagggggaatgcagaagagcaaaaaaattatttgattcattaaagttaagctattgccttatttgcattatccaggtggaaagtcttgattgtataattaatgctcagttggtcatttatgactggccaagcttaagttttgtttatgtaggaacccatagccttggaatcatctcagcctaatggcatcccattaagttatttcgacaatggataaacaacatgttatctattcatacaatgaaacatttggccataaaaaggaatgatatactgatacatgctataacactgatggaccttaaaaacattgtagtaagtggaagaagccagtcacagaagatcgtatattatattattccatttatatgaaatgtccaaattaggcaaatgtacagagagcaaaagtagatcagtgcttacttaggactagagaggatagatgggtagagggtgatagctaaagtctacaaggttgtttttgtgattatgaaaatgttctaatattgactgtggtgatgcttgcacatacatctgtagatagtctaaaattcttgatttgcaccctctaaatggatgaagagtatggcatgtgaattttatcttagtaaatataaaatttcaaaatatataggatgggcgtggtggctcatgcctgtaatcccagcactttgggagaccgaggcaggcggataacctgaggtcaggagttcaagaccagactggccaacatggtgaaaccctgtctctactaaaaatacaaaaattagccaggtgtggtggcacacgcctgtaatcccagctacttgggaggctgaggcaggagaattgattgagccccagagacagaggttgcagtgagccgagaacgtgccactgcactccagcctgggtgacagactgagactccatctcaaaaaaaaaacatatatatatattacatatatatacacacacacatatatacatatgtatatatatgtaaaatatatatatacacacacatatatacacacatatatacatatgtatatatgtaaaatatatatacacatatatacatatgtatatatgtaaaatatatatatacacatatatacatatgtatatatgtaaaatatatatatacacacatatatacatatgtatatatgtattataaaatatctcgaaaatcaatggctctttatgtatgcactcatatagatataagagtatatatatatactcttatatatatatgagaagatggatagatagaccttctaagtagtcgtttttatcttaagtcatgttccctaaaaatartcttggattcaagtagattataatgtattgagggagtgctcttcaggaaatcatttaagggagtgaggactatagttaagaaagaggaaagggtcaagcaaagacaaaatctagctttggcttgatttatcagagctctggagcctaaattgcccctgcagaatcgtctccactttgaatcaagacagctggtcttatgtacacccacgttagtcagtctttggctgcaggtgcctgtagcagctggagttgtagccttttttggcaagtaggttccattatctgagagcaggtatctatctggtgaaaaagggcagctgtgagtcacttgcagccaaaacacaacagctgggggatgagtgcactggtctcagaaaggaggtctgagcagggcatcacccaagcctataagatacctcaaaggaatactcatgaagactggaaaatatttagcagatataattcattacaatattgtctgtaataacaagaactacatttcattgaatcaaaatttgtaaggtacatgttttattcatctagwaggatgtcagtagtcattaaagacatggtagaagaccatttagaaaaaatggaaataaatttcagaaatattgtgagatgaacagactataaaagtatgaacacaaaagtttcatcttgataaatatagcagtatatatgttttgcacacattctttccctcttgggaaagatgtatgtgaaaatttaaatagtagttactgctcagtggcaggattatggctatttttattttctacatttttttatctatttattcaatattgcttttgttttgtgtgtatgtgttttgggattttgtcttttgtgttttctgagacagggtctcacttcaggctggtctgaaactcttggcccaaagtgatcttcttgcctcagactctcaagtagctgggattacaggtgtgcatcaccacacctgtctgtactgctttggagtaataaagaagtgatttcaaatattatacattaatgagttaattctcaaattggaactaaaataatgcaaccatactcaaataatacaaggctaaagagtaagactctaagaaagaatgtgtttttggagaggttactatcccagtgtgtggtcttctactttgcacatttaatttgtcattacacctagagctcgtcggattggtggtcactgaccaacaagagatgaacttatagatcaaaatatttgtgtagtaattttcaatggagtgaccatacatgccagcaaccattccattcattacttattcatagccctgtgttcccaaggtcaggtacctgagaagacatgtaagtcaacagaaggctatttggtgagtatacagagcagataatccagagaaatatttcatccacttcacactgaggcctgaaaaatcacattagacaccccagagcccccttcttgctgctccagtccagcagtcctgaccacatctgataggatgaagaatgtgcacctctarcctcaggagcattattccacacgctggttagatgttttggtgtgatctggagcaaaaaggtgagttgatccaagttgtctctcttggaaatttaaattaggtattcctaatataatgaggatgctaatgtgaacagaggctggaacaaagccatgaaatcttgtcagggccatgctgtgtcacggaaagccaatattatgagactgaaaaaaaaaccccactgagagaaacaagacaccatgagctgagagaccacgtggcagcccatgaggatgcagagagtcactttaagtctctaaagtgacctctgttcttgaccgcttccctttatcagttcacagacatcctcatataaacctgacgtgagcagaatcttgagagaacctcagttccttataccaaaagaaattgacacatgcacgacccctcactcaccacccagtaaccagaaggctacatattcagtatctcttagggaccaatttagattggtccccaataaataactccgaataaaaggggttaaaggatgtgggttttttttttttctttttcagtgtgcttctttgaataatgataatcttcccacactagatgataagattcctgagggcaggcaactcatctcgttttacacaccagtgtagaacccccatggtgccagaacataggcccttccgtaaatatatgttgaatagaagaatcaccaaatcactttagcatgttttatttctttcatttccacagcagcccagttagctatttgagaaatattggagaaatagctcagggctgctgtggaaatgaaagaaataaaacacttgaacgtgatttttacagtttaaattgctcattgcaatgcagttgtctattggcctacgtgatattataacagttttatctgaactgttaaaatcaaaagtaggaataaaagataacttttactgtttcaatttgtccctatagttgtacaaagaatgagaaccaaaaaaaaaaaacctcccttagctacaatgtgctaagccattattgttattctaatttaatattcctatcaaccacattaaataatattacattctcactttacagacaaaatccaagctgtagaggagttatatagctataaagggatgaagccaggattcaaacgtaggtcagattctgaatttgtgctattttcatttattctgtgctatttacagggatcgcagagattgtccaaatcaccttttggttttacatacagggaaatttaaaggagttaaaacagaacctatgatttccgactctttgggagttatagtgtaatataggtaacactgttcccctgctggtgaaaaaatataagcacactaggatttctagcagcagagagagaggagaggggagcggaggggagcggaggggaggggaggggaggggagaggagaggagaggggaggagaggagaggagaggagaggggaggagaggagaggggaggagaggagaggagaggacaaagaggctaagggctaaagccaggatcatgtcttattggagtcactgcaaatatcaagacccttgatttctcctctaaatattcatacattccattttaccacagtggaaaaataacttattatctagtgataataatcattatctagtgttagtttttcttatgttatacatgaatggatgaatagaaggatcaatgaatctacctctctatctatacgcatgtaatttccactgtagaggaaattactacactttatgtaatcaatttcctcctcattcaagcaaagtcagacttgtaagaattttgtagagttcactaaagccacatattgtccaggttattttatctattaccaccttactgatttacagccattaaaaaataaaaaaaaaattaaaaaaaaaagcctttatttcccaagtctcagttcatctggggagttaaactgtaacatctgagtcagccatgaaaaggcctaatcctgccattgttctgcacttacaatttctatttctgtcaagggaggtagaagtgcaggtcctgtagtcttctatcctgactgttgatttctaaaactgtctgtagctacactattggcttcatctcatgctgattacatgtactttagggcccatagtgattaaaagtcaaaccaacaggacaactttggyactgaatttcctaaacagagttttctacattccagtttgctttctgtagcaatgatacctttgcactagatgtctgtggagggaaacatccaaatgtgacgtctctgcttcccaagtcatatgaaagggatcatgttcatgttgactaagcagtgcagtcaaatgctagaccatgtccatgtttaggttcagcaactgtagtctctacatgtactggaattcagagatttctcaaaccttcacttgcaagttggcaggctataattaaatacacacacacacacgtgcacatacaatagatttacgcatactgtggcactttactgtaacttgatgatttctttaaaacattcttactgccatctggcatagtagaaagagcataaatttcagaatcttcagagtatgatactgtaaaatatatatttggtctttgtccccatttcctgacatacatctcctaaaatctttggaatctacaaagtaataagggtgtcttttgtatactaatgagccaactggtggctgggggaccctggatgacttcagaaagactaagacatgattagaggtttgggactttcagctgcaccccttcaccccctccacagagaggagatcggctgaagtttgagttgatcaccaatggccaatgatttgatcaatcatacctatgtaatgaagctcccattaaaacccagaaggactacattctgagagcttctggatagctgaacacatggagggttttggagggtatcacacccagggagggcatggaagctccatacccctgcccacatgcctcaccctatgtatgcatctcttccgtctggctattcatctgtatcttttgtaatatcatctataataagtaagaaaatgtgttcccctgagttctatgagacactccagcaaattaatcaaacctaaggagggaattgtgggaacactgatgtatatagccagctagtcagaagtacaggtcataacctgtgcttgcagtcggcatctgaagtggggggcagtcctgtgaaatggaggcatcaatctgtgggatgtgacactatatccaggtagatggtgtcagaactgaactgaatttgagggcatcctgctagtgtgtcctggggaatttgccagagaattgcttagcatggggacagctggtgtcggacgtgctctgtgttggttgtgtaagaatagagactaaagaaagaaaaaacattttggtttggtttatcatatatccctttagccccacctctaaattcaaatctaagttttgtcatctactattttgtttacttttgagctggaacaacttcataaacctctctgctccttgttatttttttttcacttgtaaaatgaagacagtaatggtattgcctcataatattactctatggattaaacaagataatctagataatacacctagcacagcacctagcagctactcaataaatgttaggccccttcatctaaagagaatggaaggcactattaagttcacaaaggttgagctttgcaagggtaagtaggccaccaacttgtatttgaaaaagtactgaagaatatatagacaaaaacatacagcaagtgcctggaaaaccatctagaatatttagaaacccagaataaaattatccaaaattgaaataacctctggctgtcttcctatgaagatgaattataagtttcagttgaaaatatatctttcttaggaatttatctctgaaatatttgctttaaggcatggatttaaagagtttatatttaatcaacttgaaacatgcagcataagcccctctcaaattcaaacaggaacacatggaatttatctgtaaacattcttatagatagatcaaaggaagaagctattctacaaagtcmcaatattgaaaataaaagaaaactgagaaagaatatgatggtgcctttaagtgtttcaytttccagttaagtatgacattctttaggggatcatgtaattatcaagccaggcagtgtctccaggctattgtgaatctttttgcactcaggcctgaactgactgaaaccatgtcaaatagctggggcctctatcattttgaaagagtgctgttacaacttctagaggttcacaaatttaattcatagcaacaaaagtcacagaacaagctccctgaaaatcatctgaaataggttgaagtcaactgaacaaaataaagccagtactggtataggcatattttaaaagccatttttcctataaacagattcaaggattataccacatttaactttccagacagatgactggctttggtcttcagggtgctttctttatagcagtggtcaccgacctttttggcaccggggactggtttcgtttcgtgcaagacaattttcctatggaggagaggtggttggttttggaatgaaactgttccacttcaatcatcaggcattagttagagtctcataaggagcacacaccttagattcctcgcaggcacagttcacaatggggttgtgctcctatgagaatcaaacactgccactgatggcatggaggcagagctcaggtggtaatgctgctggctcgccactcacctcctgccgtgcagcctggctcctaayaggccacagactggtactggtccatggcccggggattagggacccctgctttatagaatggtcacagataaggacaaatatgctacctggaggaccatctgaatcacacaaactacaaatatggaagccaaggagtggtaagatgatagtctgcaacactatcttaagtctaaactggagtcttgacgatagaacaacttaaatcagataaattccataaaagtaaacaaattgttggcatgacagtcaattatgaagaaagacatttcaaagatctgaacacactgaaaagactgacacaccagagactggtcccgggtatgtgatgtagcatcgaggtttctctttctttccacccttcattggtagatataaccctgagaaataaaaaggaagctaactgtggaagctaaatgtttaaaaaaaaattgcttttacattgtgaattttgatacaacgattccattgagtccaagtagagatgttctaaaaaaattcagagtattcagaaagtgatagaaatatttctccaataataattattattttaataatcatttaatatgaataattaaaacaacttatatctgtattttgcaccccatttgaaaacctactttaacattcataatctccctcaagctttccaaaaactccatgtgttaagcatgatgattcccattttacagatgaggaaatggaagcacaaggaattaaacttgaccaggacaacacagcccagcagacctttgatgttttctagcctcacaaaaatatctgaatgacatagattttatttwtatatatatatataaaacaatttcatttaataatatagcatagaaataaaatcacaaatatacacacaaaagtgtaatagaagtagaacactctcatcagttctttgggggaaaagtggccatataaggccacagaataattattattattcgttaagggaaaataattattctctggggatattgaatttattctaatattaatacagctttaaaaaacccaaagaattgtttattgtgtggaagcagtgcggattatacataagctaggaacctctgggaagtatgtttgtcttggtatatggctttttatttttttttaattcattgtttttgtttggcccagtaattacactttgaagttccatagtacagagaagatgtagcaagaaagcggatttgaataggtttttcattgtttctcataaagacatgatttgtagttacactgttttcttttacggtgttttcacatgaccaaatcctcccttccagaaaagaaacaaaatcagccaaattgccaacattcttcacctctgccaccactcaagacagcttatttgcatgttacagtgaaggctcttattcgctctttttctccggagccttatcttgaatctagactatttcattgaaatcttaaaataaaaagatgtaatatctctagctctattattttgataatgaccatcctatagaatttagtgcacacttgacactttgttcttttctcaaatcacactgtaaaacaacctgaaagktttttttctaattattcatttaacaactgataaaacatctctctagtagaaagaatatgcacctagtggaatytctccttatctrcaattaaagtcaccctccattgctaaacaatgtaaccaagattctgcaatactaagtagactcttcagattcaaaggacccatttgaaaaattaaattctctaatacagcctgagtaacacctgagcagaagcggagatgcaaagaaaagaacatttctaaagggagctgggggaaaggaagacacaaagtgttggttttctcatctttgaactgagccttagagatgcccacatgccaggaagaaaccaacaaaacwcagaaaagcaaaaaccaggagaaatctctaggaagatagaatctgggacccaggagtggtaggaaatggcagccaagagcacaagaaagtcaggcactatggataggaaaaaggctgtgagaacctatttccctccagacatgttctggatgttcaatcagtaggaccaccttgggaatagccagctgcactagcaagccaataactccaggatgggccaatctctcatcaccactcccccaaactgtatagcctcctaattacagctgtgggaggcatctgttagaaaagagtagcgcctgagtcgaaggtacagggaggttccctgaggggcaggataaattgggatggcttcaggcagaggaaaacaaacggaattgttaatatcagaatgtactgaagaatttctctaccctgaggcatacccttctcaatgtaaccagaagagaaataataaagaggagaaattagcgtaataaaaacaaaaaagagccaggtgtggtggctcatgcctataatcccagcactttgggaggcgaagacgggcagatcacttgaggtcatgagttcaataccagcctgaccaacatggtgaaaccccatctctactaaaaatacaaaaattagctgggcacggtggcaggtgcctgtaatcccagctcaggaggctgagggaggagaatcgcttgaacccaggaggcggaggttgcagtgagctaagatcgcaccactgcactccagcctgggtgacagagcaagactccatctcaaaaaaaaaaagataaagataaatcaatgaaaccaaaagtcagtcaataaaattaatgtatttctagtcagcctgatcaagaacataagagagaaaactatccctatcaggattgagaaagggaatataaccacagttcctacccacatttaaaagataatatgtggatattgtaaacaatttatgccaataactgaaaacttagatcaaatggttgaattacttgaaagacacacacttccaaagttcatccaagaataatctgaataacttaatatttattatctactgaatttgtacttcaacattttccccgtaaagaaaactccagacacaaaggaatttactggtgggctgtgccaaatatttatggaagaaataatcacaaattcttccagaaaaatagctgaaaaaggaacacttcctaagtcattctatgaggccaacattagcatgatatcaaaccaaacaatgcaagaaatggaaattatagactaatattcctcattagcataaatgcaaaaaactcataaaattttaactagttgattgcaacaatatagaaaaaggaaaggacatcatgaccatgtagcattgttcacagaaatgcaaagatggtttaatgtctgaaaatcaataacttcaattcactgtacaggctgagtatcccttatccaaaatgcttgggttcagaagtgttttggatttcacttttttcttttttttttttttgaattttgaaatatttacaggtacataatgagatatcttggggatgggacccaagtctaaacataaaatttatttacgtttcaaaaacaccttatacacataggctgaaggtaaatttatacaatatttttaatagtttgggcaagaaataaagtttgtgttaagtacttatgtgtggaattttccacttggggcagggcatcattgttggcactcaaaaaagttgcagattttggagcatttgggatttgggattttcggattaaggatgcttaacttgtattaacagaataaaaagggaaaaccatatgatcaactcattaggtgctaaaacaaatttacaaaattcaatattaatttgtgataaaaactctcagcaaactaatagagaagagaactttaacctgaaaaagaacatatatgttaagcatgtaggcaaaatcataattaatggtgaaattctgaatgtttttatctcttcctctaagattttaagtaagtaatgaatatctgctctcaccacttctaytcaacattgcactagaggacctaacaagtgaaataagttttaaaataaatacagattagaaaggaaaatttaaaactgtcttttaattacagaaaacatgatcatgtgtgtagaaaatcctaaggaatcattgtccctaattcacaggtgaggagtcaaacattttttaaagtcttaaaatctgctcagagtcacacagattctatattttcatatccaatattcaaacccaggtcagggtggctccaaagattatcctccaaatatgatcttcactaccttttctagaattccctttgggaatgctaacaagcaggyatgacagccaagtgtaactcagatgcactttgagattaggaagtcaccttcttgatcaccatctcccactcagtgttaccttgcccatactccccagggattctccatatctgaggtaggatggggaaagacagatcataaaagaggttgcctttgtcttttctagtcacactcactctgcccttccaattctgtatcagaataaacgtgaccccttttctttgatttctacacaaaacacaaggcaggaaggttgagtagtgtactgtgtgaaaaacaaaatataaacagtaggtattccctaaagacttcatgctttgcttctcaagctgtcctctggaaattcaattcccctatttaatttgcagaacactgtaactctatgctacctatggcttggcttgagtgtatcactgctgttctagggctcattaatgtgctttgctgaacaatggatcagcttctctaggttccctgatgtagctgtccagaagagcaggagagagccccactttcttctttgtccttttttctcccccattagaggtttatttctctcacctatataaattgttctacrtactttaaaagtctaatgttgttcattatagtttgttttatttttttaaaaaaagacttttactactaataataccttaattacttatactttaatcaccgataacctactaatagggtaattacacagaaaacatcagtctcttygaatggaggtagcaagagatgctcttactaattaattctctggggtgctagcaagccagtatagtgcttaggttataatgttttggaggaaaagtatcatattcatcctagaccctgctattaatatactctcaggttaatactttcccacaaaagctttagcaataacaatttagtaacgaagaggctagtctatgttttagccacactggatgagtggcagttccagaacttcaattctagagccaccacaggtagtaggagggcccygggttgtgaggccagctcagaggtgtggctggaaactgcccagaccctcacttgcaagttacaaagaaaaccagggaaggaaaatgagctcctttgaagcagagagagggaagagaagagcatagggcagagccttggaatgcactatttccgcaacgcagaaaaagctaagaacatttctaccattttttaaagaaaggacttaagtggttcctaaaactgagatcaatgttttacataagttcagcatttgtggctgctggaatttttatatctgatttctgctttcctccaaacgatagtctcagaacattttctgaaatctcagaggtaaaagatcaaggcaagccaggacctccagcatttgttaaaatgttttgtgtaatccatttggtttattctgctccagggcaggctcattttaatcctcatatgcagtccattgtgacccttctgcccacaaagataagaggagtaaagcttttacaataatgtaatatcatatctggaaaggattccacaaatcctgtggtaagattgcaatgaaaaatccaatttagcaaaagctttacacacagacatgcacacatacaatgcagtatacctccaatctctgaagctcatggtagggaggggtgggccaggggagagacagaaacctgtattctcaaaaacacaccacttcagaatgcaagtcttactactgcaaaaattgtttaatatacatcgaataagttattacatgagtactaagatctttagactctttttcccatttgttctgaatctcagactagcaagatataacttttttggtttatcttataaatctcaattttttctagcagaaatgtctagctttgacaaacccaattttgctttctgttgccctttaagatatgttgttatggtttcagagaaaattccaaaatatttctgatttttaagcttactgctttatgcttaacagtattatccagatttaatggagaattaataaacaaacacaaaaccagtatgatggtttgctaaccaacagcagtacagttaaaagcagtttgcttcctctgggcagattttgaccaacattatcacaatgaccktagcctataacggaaagtgatcagcttcccccaaagcagccgcccaactacctgctcaggctattaatctcttttcattacytacatttttaatctactttgtgtgtgctccttgttttttgggcaggaaatgagatgcagcagtaaagccgtgtccaccaaagaagaaaagaaagtgccgatggtgtgyggggtgggggcggagggttgaaacgaggacctaccttgcttcctgtgagagctagagttgtataaagaaaatctcttagataaaattctctcttgtccttggaaagagcacactgcttactctatagttaattctttcacgaaaccattatttggtaacatagttaaccttaccctgattaatctgtttcaagtgtgaatctttatgtgttggattttgttggtgtctttcatttgctcaaaaattcagtcttcggccgggcgcggtggctcacgcctgtaatcccagcactttgggaggccgaggcgggcagatcacaaggtcagaagatccagaccatcctggctaacacgtgaaactccgtctctactaaaaatacaaaaaaaaaaaaaaaaaaaaatagcgtgacgtggtggygggygcctgtagacccagacactcgggaggctgacgcaggagaatggcgtgaacccaggaggcggagcttgcagtgagctgagatcgcgccactgcactccagcctgggggacagagcgagactacgtctcaaaaaaaaaaaaaaattcagtcttcatctctttctgattccaccacaccctctcctgacaatttcagtcctttccccttcttttgcacagaaaacaaactcacatattcacaaaagctttctttgtgcctttcattcttcacccacccttctttggaacatcttaactttccacgtatcctgactttaaattccactggcttcacattccaccttgtactgtagttattagttggagtgtctcatttccccaaccagataatcatctcaaaggccacagccctttgtatcatccagagtgtacataataggttcttaatcgttatttgttggatttgaattattttgtttctctcatcatcactcaagcttcttctgacatttgtgcaagcaaatgaagttacagcataaaatctaaaaactctgtgtagcatgtaagactgatcatatagttgcctctgaatcagccttttttctaagtattaatctctctcatccactcccaactactagcccaacccatatatattttaagccacgttgattaaataacaatctactgtattatttttaaagacctaatcgtgtcaccttaggcagattccttgtcttctctattataagtgtttatttcagtgactaattatacttaactaatactggtttcttttttcatcttgtagttctccagaccaacactatctcatgcttctatgcttttgtacattcctccccttcttggaatactgccctgattcctgctaactcccctctcattctaatgactctaaatttagaactgtaaccccagattctctcctgaccccaaaaccatacatccaactgtttatttggcatctctgccaagagacactaaaagtctatggcattggtccagataaaatattatagtggcctggattaggactgtagctgtgaagatgagcaaaataagtagaatttgggatgtactttgagagttttgtcaataggagtgtctgtgacatgtagatgcaggttagttcacattattcaatgcccaacatgagacctagagcacaggctcaattctctgttaactttgctcctttttatggctaaagctctggtgaaagacttcataagcatacatctcgcaatcgcatgtatttagttgtcaggcacagaaagctggactacaaatcacaaatctgttaacactgattcagtattagataatttaaattctttatctcctgataggcttcttatttttaaaagatccaggcttgcacctccactttccttcttaaaattttcacttgaaagtctcacagttatctcatacttaacattttcaaaaccaaattcttgtatcttttttctctttttttctatttatttatctttatttggatagttttaggggaacaggtggtgtttggttgcatagaaaagttcttcagtggtgatttctgacattttggtgcactcatcacttgaccagtgtacactgtacccaatgtgtagtctttcatccctcaccccctcccacttcccccccccaccccgagttcccaaagtccactgtatcattcttatgcctttgtgtcctcatagcttaactcccacttataagtgacaacacaggatgtttggttttccattcctgagttacttcacttagaataatggtctctaactccatccaggttgctacaaatgcccttattttgttcctttttatggctgagtagtattccatgcttatccacttgttgatggataggcatttaggctggttctacatttttgcaattgcaaattgtgccactataaacatgcatgtggaattcttgtatcatatgctaccccagtttgctttttctccagtgttctttatctcaaaaattgcaccatcttctacccagggccagaaatttaacaattatcagtttaacaattatccttcccttactccccaggtccaattggttgtgacatcctaataattctaccaccaaattataacttgaagtcacacagttatctccatttctgtgactacctcctagttcaaaccaatgacatctctcactggacaatcgtaaataactgcttttatgcctctatcctagactttcttcagtgcattttctacacagaagccagagagtcaatttaaaaaatgcaaatctgtaacatctccttcatttagaattcttcaattctttccaccgtttttagaataaagttcaaaatcctcaaccttacctacaacaccatgcacagttttgcctccacctctctctaactgagcctcataactctctcccccttactcactatgctccagacacactaagtttctctctgtttttactacattccttgatgacagctccttacctgtgctcttctctactgtattctcagcacctaggtaacactttgcatatacatgttcaattaatatttattaaatgtataaaagaatgaatgggttttcaggatcataacctttatgccagaagaggagttgaaactattatgatcctttcagctgcaagtaatggaagattcaactaacagaggtctgaacaataaagaattttattgtatcagacaactagaagcccaagaatagagcagctttgggccagttatttcagctactgaataacatcttcaagactccagcttcttcccttctctcttctgtgccattctcagtatgcaatgcctccccttatggtcacaagaaagctagaacatttcagatatcatagtcaatgatgacagccaactaataataggtgtgttttccccatgcagctattttcaataatgaaaacaaaaaaaagcctttccagaaacttctcagaagaattaccctcagttctacacaccaaaagtgagttacacgttctattcattcctaagcaaatcactgacaaaggaaatgaaaccaccacgactgatgtagaccagttatgccttgaagctgggaagttcgcttttcttaagcagtgaaaggaaaacaaggaaaccaaatcagaactttgccaacaatgaaaagtcgaamrgtagggagaaatgagaaatgcaattgacaagaaaaagactattagacaaccaagagtgtcagccacaaaagaacatcattgtcatcatcatcatcatcatcatcatcaaagttcaaaaatagtgttggccaaaacacacttctctatttaagtgaattattaggacttgaaattatttaaataaagacttaaataaagactttaaattaactaaagttaattctaaaaacatgtgttgagatagcataatatttcagggcatagattgtggttacatgtggttacacttgaccccacttcaaccaaaacagctatacttatttctgtttaaaatattgagactcacaaaaatatttcatttgaaaaaaagggttctggattctaggtgaaggtaacagctaattagagagaaatgctccagcattgagagaaggcagcaatcgccctgttctcctcctctctttaacatcccttctccatctgtttgcggcctcctcttctacctgttctttcaatgctgatgtactacagtctactctttccatactttttgtctcatgtgttttctttcttcagcttccactaccaattttttgctaataaatacaaacctctaagcactcctctcctgagcctcagatttgaactagcaaagattcaatggttatctccaactaaacatcccacaaacacccccaaattcacctagctaaaaattacacccagcacctattgccttcccacaccccatctgtacttgttcttccctgggtgttcccaacatcagtaaaatgtctccccatcaacttcgcgcccagagcagaaacctgcccagtcattgtccagtcctctctcttcctcactgacacatcagaaagttgtcaatattgtcacttctaacatccaaatttctctcacaccaactcctttccactctaccccctgcacactactctcatcatttcttgtatagttttttcttcttcttaaaaaatattattttattttattttatgttctgggatgcatgtgcaggatgtacaggtttgctacataggtaaacttgtgccatggtggtttgctgcacccatcaacccatcacctaggtattaagcctcgcatgcattagctacttttttaattattatactttaagttctggggtatgtgtgcagaatgtgcaggtttgttacatagttatacacgtgccatggtggcttgctgcacccatcaacccatcatctacattaggtatttctcctaatgctatctctcccctagccccccaccccatgacaggccccattgtggatgttcccctccctgtgtccatgtgttctcattgttcaactcccacttatgagtgagaacatgcggtgtttggttttctgttcttgygttagtttgctgagaatgatggtttccagcatcatccatttccctgcagaacatgaactcatcctttttcatggctgcatagtattccatggtgtatatgtgccacattttctttatccaaggtatcattgatgggcatttgggttggttccaagtctttgctattgtgaacagtgctgtaataaacatatgtgtacatgtcttttggtatgtatctttgggtatatatccagtaatgggattgctgggtcgaatggtatttctagttccagatcattcaggaattgccacactgtcttccaccatggttgaactaatttacactcccaccaacagtgtaaaagtgttcctatttctccacatcacctccagcatctgttgtttactgactttttaatgatcgccattctaactggtgtgagatggtatctcattgtggttttgatttgcatttctctaatgaccagtgatgatgagatttttttaatatgtcagttggctgcatgaatgtcttcttttgagaattgactgttcatatcctttgtccactttttgatgaggttggttgttttttttctagtatatttctttaatttttttatagattctgaatattagccctttatcaaatggatagattgcaaaatttttctcccattctgtaggttgcctgttcactctggtgatagtttcttttgctgtgcagaagctctttagtttaatcagatcccattcgtcaattttggcttttgttgccattacctttggtgttttagacatgaagtccttgcccatgcctatgtcctgaatggtattgcctaggttttcttctagggtttttatggttttaggtcttaagtttaagcctttactccatcttgaattaatttttgtataaggtgtaaggaagggatccagtttcaactttctgcatatggctagccagttttcctaacaccgtttattaaatagggaatcctttccccatttcttgtttttgtcacgtttgtcaaagattagatggttgtagatgtgcggtattatttctgaggcctctgttctgttccattggtctatatatctgttttggtaccagtaccatgctattttggttactatagccttgtagtatagtttgaagtcaggtagcgtgatgcctccagctttgttcttttcayttaggattgtcttgcctatgtgggctcttttttggttccatatgaaatttatagtagttttttccaattctgtgaaraaagtcattggtagcttgatggggatggcattgaatctataaattactttaggcagcatggtcattttcacaatattgatttttcctatccatgagcatggaatgtttttccatttgtttgtgtcctctcttatttccttgagcagtggtttgtagttytccttgaagaggtccttcacatcccttgtaagttgtactcctaggtatcttattctttttgcagcaattgtgaatgggagatttcactcatgatttggctctctgtctgttattggtatataggaatgcttgtgatatttgcacattgattttgtatcctgagactttgctgaagttgcttatcagcttaagcagattttgggctgagacaatggggttttctgaatatacaatcatgtcatctgcaaacagagacaatttgactccctctcttcctatttgaatacgctttatttctttcttttgcctgattgccctggccagaacttccagtagtatgttgaataggagtggtgagagagggcatccttgtcttgtgctggttttcaaaaggaatgcttccagttttcgcccattcagtatgatgttggctgtgggtttgtcataaacagctcttataattttgagatacgttccatcaatgccaagtttattgagagtttttagcatgaagggctgttgaattttgtcagaggccttttctgcatctattgagacaatcatgcggtttttgtcattggttctgtttatgtgatggattacgtttattgatttgcgtatgttgaaccgccttgtatcacagggatgaagccaacttgatcatggtggataagctttttgatgtgctgctggattccgtttgtcagtattttattgaggattttgcatcgagttcatcaaggatattggcctgaaattttctttttttgttgtgtctctgccaggttttggtatcaggatgatgctggcctcataaaatgagttagggaggattccttctttctctattgtttggaatagtttcagaagtaatggtaccagctcacctttgtacctctggtagaatttggctgtgaatctctctggtcctgggctttttttttggttggtaggatattaattgctgcctcagtttcagaacttgttattggtctaatcagggattcaacttcttcttggtttagtcttaggagggcatatgtgtctatgaatttgtccatttcttctagattttctagtttatttgcatagaggtgtttatagtattttctgatggtagtttctatttctgtgggatcagtagtgatatcacctttatcatttttattgcatctatttgattcttctctcttttcttatttattagtctggctagtggtctatctatttttgttgatcttttccaaaayaacagctcctggattcattgattttttgaagggttttttgtgtctctatctccttcagttctgctctgatcttagttatttcttgtcttctgctggcttttgaagttggtaaaccctgtggtggtacatctgcctcctgtgatctacccttcatcctacagccacagtgcgatttctaaaacaaacatccaaagctattttcctttcttaaaagttttctttttccagagctacaggataaagtttgaactcctcccggtaccctgcaagccccatcatgatttgctctcacttcttctccagcctaatctcttagcctttgtcactcatggggagaggtggccttactaataaattgatttagactccaggttttgaagccagactgcctgagcttgaatcttggctctgtcacttagtgacttacctgagaaagtcatttgacctctctgtgcctctgatttcccactggtaacatggatgtaataatattccctgaaagttaagtaaggcagtatatgtaaaggatgtggaagagtgcctagcacatagtaagtgctcaataatagttaactgccatgaactttacaatcatccaatttctctaaacccgatgttttgttcctatctctgttcatcttccttggatccccttccttattttgtttgccagacaaagtccttctccctgttcaaaagtcatttctactgggcccttaaaacttgaaaaacaaattcttaagcctgtgttctccattcaataaaaagagaccttgaaaatttatagaaaaaaaatttttcagattgcagatctaacatgataaaggaattcttcattatttatttattcatttatttatttaacaagcatttttgaataccttattataggcactactctaagggcagagaatacaaagattatcaatacaagcattcaaaatcaaaatccagactagtgttgtctagtagaaccttctgtgattatacaaatgctctgtgtattagtctcttctcacactgctaataaagaaatacctgagactgggtaatctgtaaaggaaagaggttgaattgactcacagttccacatggctggggaagcctcacaatcatggctgatggcraatgagtagcaaagtcatgtcttacattgtggcaggcaagaaagcttgtgcaggggaactcacattcatgaaaccctcagatytcgtgagacttatttactatcacaagaacagtatagcggaaaccactcatatgattcaattatctccacccggccccacccttgatacgtggggattattataactcaaggtgaggtttgggtggggacacagagccaaaccatatcactctgaccaatatggtaaccactaaccagctgtggctatgaagcatttgagatatgagttgtgaagctgaggaaatgaatattcaattgtatttaattctaattaatttaaatctaaatagccacatgtagctagtaactacctcattagacaggatagtctagacccatatatgaagaaatagctgtcaggtgaacaggaccatagagaagatatgtataaagtaacatggggccacagaggaatgagtgaacaattgtttttaggagttggggaaaagcttaaaatatttggtcacaaagaatgagtaaattatagggaaatatggtgctaactaagcttcctccagctttgatagggtatgaaaaagtggttggcaactgatctgggaaattagtgaagcccttacaagctcggatttggtgtcactgaatgctttcttcaagagatatatattgtttggttgtttttcaatcctcagtattaccaaagaggcacaatttggagggaatgtagaggaatgaatgaaggtgagggaatgatgctctgcatcataatgtgaaatatttcatttggagggaagtagcctcagaatttgtaatgcaattgggaatatttttccattttgtaggtttatactttactatctctgagaatttatactgtcctcagagtgtatgtgtggtagtgtggggtgtgtgtgtgtgtgtgtgtgtgtgtgcgcacgcacatgtatgtttgagagagagagggcaacagcaacaaagaaagagagaaaaaaacagttaatcactaacaaagaatacaaagggcatatttgccgctcatttaatagagagatttgaaggggaagaagtctgagagctcaagcccacctagattgtctcccagagctggattcctttccaaggccatctaagactgccccacccagatgtcctaaggcacatttccaaactatcactcaaacttaaagaaatttactattgggtaaaagagatggatgttgaggccagacttgcccctgtggagagaatttccaaaagatgggcagagattcacccaaaggaaattagaagagaaggtaagcctcagaatacaggaataaggttgggaaatgttacagggawtgatgatggcccacaaagtggctatctgacaatgatttaacctcttgggtacatttctgttgagccatgggaaagataatgctttgaagaaagtgttaaatgtcttcctctagtacaacttagcacagcaaactcttgaaaggaagtgaagaagaacatgaagaaaaacagtgatccctgctatattgtttgttatctctactacctcctccaccaaacactccacagtggcccttgagacatggacaatgttgtcttgaaggagctgtgggtcatttgttactgggtttaactcttagcaaataaattcatgtccattggcagagtgaagagtagtgagtagcaagacaagactcagaaaaggaatggtcaaattaatagaaggggaggagaccccaggctgttcctttctctaacacacacatgcacacacacatacacacactcatactccaactacctaaatacactaagggatgaaaaatgctaatattttcataacaaggagaaatacattccaatgaggttatatgcaatgtattatctaatatttgagaattctccgtaaatccatatacagtaatacctaattgagtctacttgaagaaaaataccaatctgaatttgtgaaaaatctgaatcatggatgatttttaaagatatgcaattgcattactttttaataagctgtacacacctagtgacctctgccaagtagaggcccacaagatctgcattaatggttagctagttagcaacactggcaaacaaaaccattggcaagcagtctgctaaagcacctgaaagtttttgtgcacttgcttccttcttctcgtttgactattcatttgacacctttgttcttcatgaatggtatacctgtaaactccaaaccaamctttgttcaaaattatactaatggagtctaaattaatgaaattttactttattcatctgaaaacaccaccagcttagtagccaacaatgtcacaagctgacaagaaaaagtgattctgcaaaactcttttactgagctggtagaccatgtccaattttctggactcagtgctctaaagaaytctgctgcctctcttattttcaaagtagctagctataaatgtcagtaaatgccagcctcccagtaagtaatgggaaaaaggagaagttaggagatactgagtgcgtgggtactactgattgtccaaaaagcctgtagcgcatggcatgggagatcaaatacaacctaccaaccatatattgtttaaagtattaagtaagcataatttgatttaggaaaaccacacacaacataaggaatattatcaaagcgagtccgtgaacatggtgcaaggcaggtccaacttgagcctaagaagcagatagcagctagaggcagggtctagaggtgccatgctggccttgcatcccaggcaaagcaaatcctttgctgttgctttccaatatgacccaactctagcccacaagtcaagaacagtacttcttcccctttgggtttcagccatggcatgctggtaaatatttaacagttggttctctgggtgtagttccgacctgaattttgattgatgttttggttaatgttaatgagtaagataactgtgaaataattaaaatctatgttgaagcttcactagttcatcaaggacgtgaacagcttctttgccaaaccacttaagagtttcctaatactaaaagaatattttctcaatttgttgtgcaattcacaacaaaacagctaaaccaccacacactgaagtttaatctgcattattaacattttccccaccactttcttaggtctagatagacaatcaacacaacaataaatgaggtgttcatttgtagcgtttgctgattccatggtataaacactcccactatgacccttcccagctaccaacatgttgtcattgaatgcagaattgggaagagatgagcagtagcacacgattatatagttttcatcacatagacaaaataaacataaaaagcttcaaaggcagagataacagagtaaaataattaagaagtaatgagttttgaatgtttatttcctttgtttttaatataatttatttcattataagtttacataattcactttttaatgatgtgcatgtttaacagccagcttaaaaaattcctgaatttaacaaccagctctcaggggccaacagagctagctccagcatactactgttgcagccataacctaaatatgtaaaatattatcctgaacaaaagtaacatgtaatctacttgtatcctttaatataccagtatgggtgagcttcagagactaaacttagagaacagagcactgcaggcaagagacacaatgcctaaaaaaattatggctaatactaataacaacccccaaaatacaggaatagacacaaagcattaagcatgtcagaaaggggcttgcattaagaagttcatggatgaggccggacgcagtggctcacgccggtagtcccggcactttgggaggcggaggacgggggatcacttgaggtcaggagttcgagaccagcccggctaacatggtgaaaccccatctctactaaaaatataaaaattaggcaggcatggtggcgggagcctgtaataccagctactggggaggctgaggcagaagaattgcttgaatccaggaggcagaggttgcagtgagccgagatcacaccactgtactccaacctgggcaacagagtgagactccatctcaaaaaagaaaaaaaaaaaggaagtccatggatgagacttgcagttttctatctaatacctattctccttataggtgagactgtcagccacctagccaatactcattctctccttctttcttactgaaagaacactgttattatttgaagcaaccatagacacaactaagaaattatactttccagcctcctttgcagctaggggcggccatgtgacagttggagccaaagagaaataagtggaagtcactggatagggcttccaagaaagttctttgaaagaatatttgatatttgagcagtatgatagatgaagccaggtccctgtgtcatcgtagaacaatcctgccaacgctacactgcccactttcaattcctcactacatgagaaaacaaaagcacataattagtttaagctactctcacctggatgtgctgctacaagcagctgaactaaaaagcataattaataaggaatcaacacgaaatgactgggaaagattgtcaaatgagaatataataaagctcaaccatcagtatcaccattccagtttaaagtgcatctgataaagaatccttcattaactctcattcaacctcctaccatttacaaggaccagaaagagaaaacgtgggttgttattatattataaaaatgtgcaaggaatttcaactgtaaagctattaaagtaggaatgaaaaataactggcggcccatatatgctttgataccagaagcataggtaacaagatgactaaaagaaggcagagaaataatatatccttctgcctcttttttagccagtgctcctttgtttccaattcaacaatgtagctggatgatagaaatctaattaaaatgagcataaaagttcaggcagagcttaacctaggagtttaaacagtattattaagatagctcctcttcatattttgactgtcttttcttgggttggttgaactgaatggatctcaggctccatgccgtagccctttatgtctcattggctctgcctgggacacatcccatctttgaatgaatcactgtgatccggggaagggacatgcaatgctctgattggccatgccagagccactgccttctttctggagccaagagagaagcccctttgaaaccataggaactgtgtggaacagcatcactcactgccagatttctaccatcagggagagtaagatgtaaaaaactacrccttggccaccttcttataggtctgattttctaagaaggcatcactttgggaaaatgtgctctaataaaattgttgcttccctgttcccaccccatatagccctggagaatacagaaggggtagttctctgaagaaaaaaaaatgaatttattaccagaaaaagtgagaatacatatgggatggccaaaatgatgtccattatacttactatttgccctcaggtcagaagttctgagtttgcactaatgggaaactgagcatgtccctctcccataatggtaattcattctgagacatcactccccacactgctcaagtagtgccacatcactttctgcatataccaggtgactgcaacttcacttcacagaaacaactaaataggaaggcgggaaaaggagcatgagccagtatttcatcctgagatacacaatcctttgtgtaaaaccttgaagggaagtaaaaaaagaaagagtcctggatgaagaagatgctgtggattataatttttcatgcaccacaatgaattacagagtcagaggcagtagaagtacaatacgatcctacctccacaaggcagtgccacaccacatgaatgcccatcagaccgtagaattaaattgggagtacttcatgccaaaaacaagaggatggtgacatatttgtcaggtatacagaaacaaaaattaagccagggacacataccaattacaggcaaagacttaagcagcaaaaagacagaaatctgtgttgacaaaacaaagcaccataaatttgtataagccaactatataaagcaaaaactatgatgaacaagaagaagaactagttagattattttagattgacaaaaacaaaaataaaattactacacatcaaaactgatcagtaatataacattcatataatagagtattattttagtcaattactccattaaggacagatttttttttttttttttttaattatactctaagttttagggtacatgtgcacattgtgcaggttagttacatatgtatacatgtgccatgctggtgcgctgcacccactaatgtgtcatctagcattaggtatatctcccaatgctatccctcccccctcccccgaccccaccacagtccccagagtgtgatattccccttcctgtgtccatgtgatctcattgttcaattcccacctatgagtgagaatatgcggtgtttggttttttgttcttgcgatagtttactgagaatgatggtttccaatttcatccatgtccctacaaaggatatgaactcatcattttttatggctgcatagtattccatggtgtatatgtgccacattttcttaatccagtctatcattgttggacatttgggttggttccaagtctttgctattgtgaatagtgcctcaataaacatacgtgtgcatgtgtctttatagcagcatgatttatagtcctttgggtatatacccagtaatgggatggctgggtcaaatggtatttctagttctagatccctgaggaatcgccacactgacttccacaatggttgaactagtttacagtcccaccaacagtgtaaaagtgttcctatttctccacatcctctccagcacctgttgtttcctgactttttaatgattgccattctaactggtgtgagatgatatctcatagtggttttgatttgcatttctctgatggccagtgatgatgagcatttcttcatgtgttttttggctgcataaatgtcttcttttgagaagtgtctgttcatgtccttcgcccactttttgatggggttgtttgtttttttcttgtaaatttgtttgagttcattgtagattctggatattagccctttgtcagatgagtaggttgcgaaaattttctcccatgttgtaggttgcctgttcactctgatggtagtttcttttgctgtgcagaagctctttagtttaattagatcccatttgtcaattttggcttttgttgccattgcttttggtgttttggacatgaagtccttgcccacgcctatgtcctgaatggtaatgcctcggttttcttctagggtttttatggttttaggtctaacgtttaaatctttaatccatcttgaattgatttttgtataaggtgtaaggaagggatccagtttcagctttctacatatggctagccagttttcccagcaccatttattaaatagggaatcctttccccattgcttgtttttctcaggtttgtcaaagatcagatagttgtagatatgtggcattatttctgagggctctgttctgttccattgatctgtatctctgttttggtaccagtaccatgctgttttggttactgtagccttgtagtatagtttgaagtcaggtagtgtgatgcctccagctttgttcttttggcttaggattgacttggcaatgcgggctcttttttggttccatatgaactttaaagtagttttttccaattctgtgaagaaagtcattggtagcttgatggggatggcattgaatctgtaaattaccttgggcagtatggccattttcatgatattgattcttcctacccatgagcatggaatgttcttccatttgtttgtgtcctcttttatttccttcagcagtggtttgtagttctccttgaagaggtccttcacatcccttgtaagttggattcctaggtattttattctctttgaagcaattgtgaatgggagttcacccatgatttggctctctgtttgtctgttgttagtgtataagaatgcttgtgatttttgtacattgattttgtatcctgagactttgcggaagttgcttatcagcttaaggagattttgggctgagacgatggggttttctagataaacaatcatgtcgtctgcaaacagggacaatttgacttcctcttttcctaattgaataccctttatttccttctcctgcctgattgccctggccagaacttccaacactatgttgaataggagcggtgagagagggcatccctgtcttgtgccagttttcaaagggaatgcttccagtttttgcccattcagtatgatattggctgtgggtttgtcatagatagctcttattattttgaaatacgtcccatcaatacctaatttattgagagtttttagcatgaagggttgttgaattttgtcaaaggctttttctgcatctattgagataatcatgtggtttttgtctttggctctgtttatatgctggattacatttattgatttgcgtatattgaaccagccttgcatcccagggatgaagcccacttgatcatggtggataagctttttgatgggctgctggattcggtttgccagtattttattgaggatttttgcatcaatgttcatcaaggatattggtctaaaattctcttttttggttgtgtctctgcccggctttggtatcagaatgatgctggcctcataaaatgagttagggaggattccctctttttctattgattggaatagtttcagaaggaatggtaccagttcctccttgtacctctggtagaattcggctgtgaatccatctggtcctggactctttttggttggtaaactattgattattgccacaatttcagagcctgttattggtctattcagagattcaacttcttcctggtttagtcttgggagagtgtatgtgtcgaggaatgtatccatttcttctagattttctagtttatttgcgtagaggtgtttgtagtattctctgatggtagtttgtatttctgagggatcagtggtgatatcccctttatcattttttattgtgtctatttgattcttctctctttttttctttattagtcttgctagcggtctatcaattttgttgatcctttcaaaaaaccagctcctggattcattgattttttgaagggttttttgtgtctctatttccttcagttctgctctgattttagttatttcttgccttctgatagcttttgaatgtgtttgctcttgcttttctagttcttttaattgtgatgttagggtgtcaattttggatctttcctgctttctcttgtaggcatttagtgctataaatttccctctacacactgctttgaatgcgtcccagagattctggtatgtggtgtctttgttctcgttggtttcaaagaacatctttatttctgccttcatttcgttatgtacccagcagtcattcaggagcaggttgttcagtttccatgtagttgagcggctttgagtgagatttttaatcctgagttctagtttgattgcactgtggtctgagagatagtttgttataatttctgttcttttacatttgctgaggagagctttacttccaactatgtggtcaattttggaataggtgtggtgtggtgctgaaaaaaatgtatattctgttgatttggggtggagagttctgtagatgtctattaggtctgcttggtgcagagctgagttcaattcctgggtatccttgttgactttctgtctcgttgatctgtctaatgttgacagtggggtgttaaagtctcccattattaatgtgtgggagtctaagtctctttgtaggtcactgaggacttgctttatgaatctgggtgctcctgtattgggtgcataaatatttaggatagttagctcctcttgttgaattgatccctttaccattatgtaatggccttctttgtctcttttgatctttgttggtttaaagtctgttttatcagagactaggattgcaacccctgcctttttttgttttccattggcttggtagatcttcctccatccttttattttgagcctatgtgtgtctctgcacgtgagatgggtttcctgaatacagcacactgatgggtcttgactctttatccaatttgccagtctgtgtcttttaattgcagaatttagtccatttatatttaaagttaatattgttatgtgtgaatttgatcctgtcatgatgatgttagctggtgattttgctcattagttgatgcagtttcttcctagtctcgatggtctttacattttggcatgattttgcagcggctggtaccggttgttcctttccatgtttagcgcttccttcaggagctcttttagggcaggcctggtggtgacaaaatctctcagcatttgcttgtctataaagtattttatttctccttcacttatgaagcttagtttggctggatatgaaattctgggttgaaaattcttttctttaagaatgttgaatattggcccccactctcttctggcttgtagggtttctgccgagagatccgctgttagtctgatgggctttcctttgagggtaacccgacctttctctctggctgcccttaacattttttccttcatttcaactttggtgaatctgacaattatgtgtcttggagttgctcttctcgaggagtatctttgtggcgttctctgtatttcctgaatctgaacgttggcctgccttgctagattggggaagttctcctggataatatcctgcagagtgttttccaacttggttccattctccacatcactttcaggtacaccaatcagacgtagatttggtcttttcacatagtcccatatttcttggaggctttgctcatttctttttattcttttttctctaaacttcccttctcgcttcatttcattcatttcatcttccattgctgataccctttcttccagttgatcgcatcggctcctgaggcttctgcattcttcacgtagttctcgagccttggttttcagctccatcagctcctttaagcacttctctgtattggttattctagttatacattcttctaaatttttttcaaagttttcaacttctttgcctttggtttgaatgtcctcccgtagctcagagtaatttgatcgtctgaagccttcttctctcagctcgtcaaaatcattctccatccagctttgttctgttgctggtgaggaactgcgttcctttggaggaggagaggcgctctgcattttagagtttccagtttttctgttctgttttttccccatctttgtggttttatctacttttggtctttgatgatggtgatgtacagatgggttttcggtgtagatgtcctttctggttgttagttttccttctaacagacaggaacctcagctgcaggtctgttggaataccctgccgtgtgaggtgtcagtgtgcccctgctggggggtgcctcccagttaggctgctcgggggtcaggggtcagggacccacttgaggcagtctgcccgttctcagatctccagctgcgtgctgggagaaccactgctctcttcaaagctgtcagacagggacacttaagtctgcagaggttactgctgtctttttgtttgtctgtgccctgcccccagaggtggagcctacagaggcaggcaggcctccttgagctgtggtgggctccacccagttcgagcttcccggctgctttgtttacctaagcaagcctgggcaatggcgggcgcccctcccccagcctcgttgccgccttgcagtttgatctcagactgctgtgctagcaatcagcgagattccgtgggcgtaggaccctctgagccaggtgtgggatatagtctcgtggtgcgccgtttcttaagccggtctgaaaagcgcaatattcgggtgggagtgacccgattttccaggtgcgtccgtcacccctttctttgactcggaaagggaactccctgaccccttgcgcttcccaggtgaggcaatgcctcgccctgcttcggctcgcgcacggtgcgcacacacactggcctgcgcccactgtctggcactccctagtgagatgaacccggtacctcagatggaaatgcagaaatcacccgtcttctgcgtcgctcacgctgggagctgtagaccggagctgttcctattcggccatcttggctccctcctctctaaggacagattttaaactttcccaggaaagattttaaaatcaattctctctccctctttttattatcccaatcaggtctttgtcctattgtattctttattttttccttcactgatctctaggctacattctacttgacatctatacaattatttacttagtatattttattgatctattgttttgactcaaatacatttattttaaagaagaactggtggataggaaaatataaaccaagagcaaaagatagaaaggcccatgccccgggtccacaaccaccagctttgctgggatcctgtcccagggtctttggatagccccgcctgaagtgcccatgacgggctacatgtttggtaaagggatctatttyrctgacatggcctccaagagtgccaactactgccatacatctcagggaggcccaacaggcttaatcctgttgggagaagttgcccttggaaaatgtatgaactgaagcaygcttcacatatcagcargttacccaagggcaagcacagtgtcaaaggtttgggcaaaactacccctgacccttcagstagtattactctggatggtgcagaggttcctcttgggactgggatttcatctggtgtgaatgacacttgtctactrtataatgagtacattgtctatgatattgctcaggtaaatctgaagtatctgctgaaactgaaattcaattttaagacttccttgtggtaattgggagaggtggccaagtcactcccratggctctggtataaattcagccgaagcccttctgcaccaactcacctggccggctaagttgctgatgggtagtacctgtactaaacctcctaagaaaggattttacagaaacacattaaaaggttttctccaacttttcgagtcccttgttttgtgttgtgtttgtggggaggggttgttttggggttgtttttgttttttcttgccaggtagataaaactgacatagagaaaaggctggagagagattccatccgcatagactagtcctgtggaaaaaaaaaaaaaaaacaagctccattagaatgtctgccttactggtttccccagggaaagaaaaatatgtttccacccttttttctaagtgttcatctttagttttgattttggaaagttgttaagcattcatttttagttaaaaataaaaactaatttcataccattaaaaaaaaaaaaagaaagaaaagaaaggcctgtgcccctggagtgagagggcagggatgagaaacagcaaaggaggcaggtgtgaggcatgtgttcatttggagcactgctataacaaagtaccatagacaggtgtcttcaacaacagaaatattattgtcccacagttctggaagccaaaaatccagaaccacggtgtyggcagggttcattctttccttgagctataaggaaagatctgttcccggcctctctccttggcttgtggagggctgtcttgccccgtgtgtcttcatatcaccttctttctgcatgtgtctctctctccatgtccaaatttcccctaagatcttataaagacaccaatcatattgcattagggcccaccctcatgacctcattttaaactgattacagaccttatcgccaaataaggtcatgttctgcagtactagatgttaggattccaacatctctttttgggaggcttgggtcagaatttatagggagacacaatctgacccataacagaaagaataggtcttttggagaatagacaagaatagaattggcattgcctgctgcccactgggtgaggtctctatctctttaatcagccccttataatcaccacactcgaggaaactctttcctgcatgttttttgaattatcacccctctactcacaccacccacctctctcctgacataactcaaccagacctacatttttctatcttctgttgaatttctagtcacttaatacacaaaacattcatttctttctaacaaaaccaaagcaawgtcaccacccatgggtgcaagaatggtataaaccccttcacatccagcccatcaatagccccaatttgtataaatgaagccagtaagtccctcccagactctaagaccaatctttgtcgtacacaaggaatatcggtctagcctcaaccattacttctggtgccaccctgatagaaaacttcattttgtcagcaatcaacgtcctgccttgagacccaggttccctatgactgaacccctaccctgtatcctttttattctttaataagttcctaattgatgttccagcaccttatcactagattcttgtttgtccctttaagagaaggagttacggccgagcatggtggctcacacctgtaatcccagcactctgggaggccgacaggggtggatcacctgaggtcaggagtatgagacaagcctggccaacattgtgaaaccccatctctactaaaaatacaaaaattagctgagtgaggtggcaggtacttgtaatcccagctactcgggaggctgaagcaggagaatcacttgaacctgggaggcagaggttgcagtgagccaagatggcccactgcactccagccaaggtaacagtgcaagactccatctaaaaaaaaaaaaaagaaaaaaagtaactccttctcttttttgctttttttcttttttttttgagacggagtctctctctgtcacgcaggatggagtgcagtggcaaattacaattttttaaatctctgcctgctatctcaatctagacaagaaattgtattctagcccttggacttcattctccttagaactggctcactgatgtagttgccaaagctttatactattaaacacccgtccccttgaaattccaccaattgttggtcctgtccccacttggatattgtggcacctccacgtagaaggtatacaacaaatggttgttgttttttgaatagacagtaattgatactgggtcttgaatatttgttaatgtcacttcttcctcaccagaccaagaaccaataacccaaaggacatcttccttcagactcacatcattgactatctttctctggaaagtcttactttgctcccatgtacaaatccctgacctttgttggaatgacaagtctctccagactcaaattcaggactgggattcatatcaagtcttgtcagtcctggttaggtactggtccctcatgttcattatggttccattttatgaagcaatagaaattgctaagttctaaaacaaagaaatgatcacacatcctccaagtaaccttaataattcctcttcaagtacatcatgttctaagatcacagaatcactccaataaagtacaagaagagtgtgcagtaaaggttgaattcaggcctgattgatcaagtcctacacattctaaatagaggcccttccttgacaagctcctaggagacaacctctgaacccctgaaatatcctgcctaataagagtgtttttatacttctgagaccttgggccaggctgtatcagtttgaccaaatggtttttaacaatgtgacttgtggtgaatgcctattttcctatgcctgaggtcttgggccatgctggatttgtttgatctcttgggagctggacgctaagtagttaatgtcagtcctatgggtgctgcataaccgtgagcccacctgaatcaccgtgaagctaaaaatgctggacaccaaggctcaggtaagctcctctggttgacatcgctttccatgtgttgtcacacattgttgctgagagaactaagtgcatccctgtgactccactgggaaaggacacctggaatcttgtgcctgatttctcctttatctccggattttatgggaagtacacatggaagtgatgtcaaccaggggagcttacctgagccttggtgtccagcatttcttgggtgtttgtttgtttgtttgttttttgagacagtctctctctgttgcccaggctggagtgcagtggcaccatctcggctcactgcaacctctgcctcctgggttcaagcaattttcctgtctcagccttccaaatagctgggactacaggcacaaaccactaaaactggctaattttttttttttttttttttttatctttagttgagacagggcttcgtcatgttggccaggctggtctcgaactcctgacctcaggtgatctgccaacctcaccccaccccaccccaccccgcaaagtgctgagattacaggcatgagcaacacacccagccagtgcccaccatttctatctttataatgtttgaggtcagctcatagttatgcagcacccatatgactgatactaactacttagagtctgacccctaagagattaaactgatccagcgtggtccaaaacctgaggcacaggaaaacaggcattcaccacaagccacattgttaacataaaccatctggtcaaactggtaaaaggtgaataccttttacctttgctgggattaatctgtatcttttcactgtcataaataataactgtaagcgtaacagcttttctgtgtcccaaaagtccttctagaaaatcatcaagtctgaaggttggccctgggaacctctggctgaaagccactttgaatgaatgtcgaaatgcgtaaagaatccaattattttagtatttttgtaccatagatttttggtacttagaacacttagacttttgtatagatctaaactcactgccttggttttcacctttacatcaaatcctcaaaacaaatcaactgtctctagacaaattttaaatgcctgaatgcattgaccaaaaattcaacctctatagatttagcaaaagaaagtgctaacacatattcacatggatatgtgtagaaggatattcatttctgtattacttgtaaaatacccgaggcaacttatatgtccttcaacacagatatgtaacaatacatagtggaatatccttactatggaacattgtgtaactgagaacatataaggagtgcaatcaggaaagattatcgggggataaaagacaagtatgcagaacacagctcatttttgtaaaaacaaaataaaatcctaattatttcagttgcatacacatagcaaaagagcctggaacctcaccaatctgatgccagtgggtaccagagagcaaggaaataaaattggaataagaagacatttattcagtgatatttaaatattttttaaccaacacatcttatttttgtaattttcacagattttaaaatagcaaacatctcaatttttaaccactttgcctttatatacaatgccaagaccacttggtacttgtcagcaaaatccagtgatgttagaatgagtattgcacgtagctccacctctccctctggggaaatctcacctgagctgtgctcctggattagcagatgtggtctggctcacccgctatgagaatgggtggctggagaggagctggcagacatcctgcaagagaacgaggctccttgataagtgcttttttgaccttactgtaactagtcataaagatctttgaaaattaaggatacatgccctcgtttcccttggtcattgatatggtttggattggtgtccccacccaatctcatgtcaaattgtaatccccagtttgaaggtaggacctgatggcaggtgactagatcataggaatggtttcttatggatggtttggcaccatccctttggtgctgttctcatgttagtgagttctcaggaaatctggtggtttcaaaatgtatggcacctcctccctctctctttctcttgatcctagctcctgccatgtaagatgactgcttcccccttgccttctgccatgactggaagcttcctgaggctccccagaagcagaagctgctatgcttcctgaacagcctgcagaactatgagccaattaaaccaggtttttaaataaatgactcagtttcaggtatttcttgtaacaatgtgagaatgacctaatacagtcatggaacatcataagtaggaattcctcccacgagtcctttctttataccctgcggggctgtgggagtccccactaccgaagagcagcctgagtactgagtgtgggttgtgaacactatggggtgataaagagtccctttcytatgttcctgctcagccactgggtgacgtgaccttgtgcaaatccaccccactctaaatctgttctctttacctgtaacagaaggattatgtacagatcacctctaatatcttttacagaactacaattctaatgtatcatcacagaaagttagctacactttcctttgcctggacacagcttcttcccctctgtatagctatgacttccaaccaaatactcttgtcgttcycaccaaaataaggaaagggtaggttcctttgaaaagaaacagaatgattctgttgggaaaggatcataacctatcacacaactcctcatctaacatgaaaatacagaaatatgttacataytgttacatctttaaaataaagctgcccacttcattttagttgtattacagaattctaattctgacactgcaatttatgtcttttgatgtctatcaagaagatatattaaaactctggttaatgaaaagcaaatgttttatatttatatgacctctttaatcttttgcatgaaaaaggagggaacattaatctctgacaaaagaagaagcctccgtgtggagagaataaggaataggtcccaatgttaacagaaatgttaattaaaagagctagtgatcatattcaatttctaggaccaatttctagatattcctagcatttatttttgtctcaatttgaagtcccatcaaaagaagaaaaacactcatttatggtcttcattttcagaacaaactgagtctcattataaaatgttcacatttttgtactgcaattcatccactcacaagaaggccaaaggcaaaagattaatggatcacaaacgasggctgctctgcatggcagaatgatcatccccctccaccctggcataacacaacatgacctagcacccagctcttctacaacaaattgcaacacccatactggaccactaatactgttttcaaaaagcttaatgttgtgaattcttgcatcctaaaattcaacatgcatactgtttcaatttataaattgtattcaatttataaatgtatacatactgtttcaattacaaacccctgaagataagggtcatgagaaaatgttggcaaaatctgctctgtagcastgaatagcaattagtatcaacaatgcttatggtgtttttgaagcagcttttgtgtttcaaattgtttactgaaggagttaattttatgttgaacaccaataacattcggggaaaaaataacctcgaaaactatttatatagcaaccattaataaaaatagcagtatcatcaggtgatgttttataaagctataattagctggtgagcacatttatggaacagctgtgatgtagcagaccctgttaaaatctgagataggtacaaaatatatagatgacagacgttttcttgaagaaatgttccatctacatggagcccagcgcatgacagataacactgtaatttggtaagaaaaggtaagaaatagtctgaaatcaaattgagaatgcaaatagaatgtaaatgctgagattctatccaaagaggtgtgaaccaacccagaaagcgttaagcacatatggctacatacttagagtagcgtggttaggagggagatgagactgacaaaaccattgtacggcgtagggaaaatagcaaggatctcaagcctgaagaaatcttaaacgacaacaggaatttcagatagagataggaataagcaactttttggtaaaatccttctgactaattcttctttaatcattgcctgtggcaatgaacgagaaagatgttgtcagtttaaagtacccagactggacacttagagcaaagataagggtaatgacattaagcgttcatgttttcaggagattccagaaaaacctaaattgcttgtgatatcttgggctcatattcatactttgggttccacttcagaaattctaaccgytatggaagagtaatatcaattctacagatcttctgtgatgaatcccagagcagccacttctcacctagttggttttgccaaatacttgtaaatagttatacctgaacctgagtcatacaggaaaggaaaaggctgaaagttacttacataaataaatccttgatctcagcttcttttattttaccttgttgatttcacttaaaggtgcatttaaaggcttttggcagcagccataagggagaagctggtattaaatgaatcattccacttaaaaataaattataaggctgggtgcggtggctcatgcctgtaatcccagcactttgggaggttgaggcgggtggatcacgaggtcaggagttcaagaccagcctggccaagatggtgaaaccccatctctactaaaaattcaaaaattagcccagcatggtggcgtgcgcctgtaatcccagatattcaggaggctgaggcagagaattgcttgaacccaggaggcagaggttgcagagacccgatatcgttatcactgcactccagcctgggcgacagagtgagactctgtctcaaaaataaataaataaataaataataaaacctggacaaaatattttaaataactatttgtaagctttggaggggaatgaatgaaggcaggatgttaagagctttgatgtacaaaggaagaaaggtagagctgtgtgagttaccaaaaacatacaacctaccacaattgaatcttaagaaaattgaacagacctataacaagtagacagattgaatcagtaataaaagaaaacctctcaacaaagaaaagcccaggatctgatggcttcattggtaaatcctaccaaatattttaagaagaattaataccaattcttctcaaactctcccwaaatattgaagataagggaacattccaaactcattctacaagaccaacattaccctgacaccaaaccagacaatacaagaacacaaaattataggccaatatccccaatgagcacagatgtaaaagtcctaaacaaaatactagcaagcgaaatttaataggacattaaaagaatcatatatgcaatcaagtaaaatgtattcctgggatataaggatggtataatatacacaaatcagtaaatgtgatacatcacattaagagaatgaaggacaaaaaacatatgatcacctcaataaatgcagaaatagtgcttgatgaaatttcatgataaaaattctcaacaaattagatatcgaaagaataaatgtacctcaacttaataaagtccatatatgacaagcccacagctaacgtcatagtcaatagtgaaaagctaaaaacctttttctgtaagatcaagaacaagacaaggatgcctattcacatgacttctattcaacatagtactggaggttttaggcagagtaattgggtaaaaaaaataaatgaaagacatccaagttggaaaagaagaagtaaaattgcctctatttgcagatgacatgatcttatatagagaaaaccctaaagatttcatccaaaaaattgttaaatctaataaattcagtaaagttgcaggatacaaaatcaacatacaaaaaccccagtagtatttctatatactgacaatgaactacacataaaaaattaagaaaatccaatgtccaataacawcaaaaagaataaaatatttaagaatacatttaaataagaaattaaaaatctatacactgaaaattgatgaaattgaagaaggcacaaataaatggaaagatatcccatgctcatagattgaaataattaatattgttacaatgtaagtgctacctaaagcaatctacagagtcaatgcaatccctaacaaaatctaatgtcatttttccagaaatagaaaaaaaaaactctaaaatttatgtggaaccacaaaagaccccaaatagccaacaaagctgaaggcatcacattacctaatttcaaaatattctaaaaagctataataatcaaaacatttagaccaataaaacagaatagagagtccagaaataaagccacatatttacagtcaattattctttaacaaagctgtcaagaacatacaatgagtaaaggacagtctctttaacacataggtctgggataagtggatatctacatgccaaaagaatgaaactgggccttatctcatataatatacaaaaattaactcaaatggattaaagatttaaatgtaatactagaaacttaaaactactagaagtaaacacagggaaaaaaagcttctcgtcattaggctaggcaataattttttggatatgaccccaaaagcacaagcaacatgaaaaaatagaccaatgtgattgcgtcaaggtaaaaatctcacacatagcaaaggaaacaaccaaaagagtgaagagaaaacctacaggatagaagaaaatactttcaaaccacactctggtttataaatatttaaacagttaatatccaaaatacgtaaagaactcaaatgactcaatagcaagaaaacaaataacccaattttaaaaacgggcaagggaccttaatagatatctccaaaagaagctatagaaatggccaatagacatatgaaaaaaatgattaacattactaatcatcagagaaatgcaattaaaaccacaatgagatatcacctcatgcctgttaaaatggctataatcaaaaagacaaaagatagcaagcattggcaaggagatggatgaaaaggaattcgttcatactgtttttgggaatgtaaattggaaaacagtatggaagttcctcaaaaaattaaaattgaatgactatatgatccatcagttccacatctgggcatatatccaaaggaaatgaacacagtatgttgaagaaatatctgcactcccatgcactcccatgttcactgcagcattatttacaatagccaagatgtggaatcaacttctgtccatcaacagatgaacagataaagaatatgtgatacacacacacacacacacacacacacacacacacacaggaatattatgcagccttaaaaaagaaggaaatcttgtcatttatgaaaacatggatgaaactggaggatacgatgctaagtgaaataaaccaggtgcaaaaagacaaatagtgcatgatctcacttacatgtgaaatctaaaaaatcaaactcacagaagcagagagtagaatgataattaccaggagctggggagagcagttgggaaatgtgaagatgttggtcaagggtacaaagttttgtttagacaggatgactaagttctggaaatttattgtacaacattgtgattatagttaatagttacatattgtatatttggaaattgccgagagtgtagatcttaaatgtacttcaccaaaaaaaagataactatgtaaattgatggatatattaattagcttgattgtgtattcatttcacagtgtatacatatatcaaaacatcacattgagcactaaatacatacgactttatgtgtcaattatgcctcaataagaaaaaaaagaaattaaaaactgcattcagctgtaatacttctagtagaaatattgacactgttaccttgaaaatagagcaaataagaaatgtcagtaggaagtaatattctcagcatgagaaaaacagatacaaatataaaatcaaaattagttgtcttttaaattttaaaaccctgtcatctttaatgtaaatgagatatcagcatgaaatcattatttattttgttctttctaaaatacagatattccctagttccattcactaaaaaggtctaaaacatcaaatccaataaaattgtaatgtaagcaacaggtataattatagatgttctaatagttacatttttaaaaggtaaaagaaactggtaaaattcattttaataatatattttatttaatccagaatattcaacatcttaycattctaacatggaatcaatttttaaatgttaatgagatatcttacattctttttataccaagttttcaaaattaaatgtatatttttagactaacagaacattttaatttggattagccacatttcaagtgttcagtagccacatgtgggtagagactgctgtactgaactttcaaggccaatccaagtctagatataaagaaaaccaagtagctacgagtacccctggtgactaaattggggataacagagcagtgggaaggacaagggagaatgaaaatattcatttcagatattagtggtatcatggttggtttttttcctaatctttatctattaaaaacacatactgcatattttaggttaaatgatacaacgtttggcattagcattaaaatatttaatcaaaaaagtacaggagataaatgaaacactctttggaaartgataattgccaaaccaagagattggtatgtaaaaatattttatgctctctacttatgcatgcttgaacattttcatattaaatttcttaaaaatgaaataaagtaaaagcgctttaaaatataaagagataaatagacaattcagttaaccagttcctgatgatcaaatttttatgtcaccactattaatattgaattctctttaaaaagggccatattgattattttattattacattttattaaactacttaaaagttttaaaagttaatactgtcctaaccacagaatgttaaagattaaattatgagtcaaagactcaagttaattgttagaatagaaacttattagaaagcttacagaatctgcaaatcttttatttcctggaaagtgaaacagctgttgaaatgaatcttatattaggtaggaaataaaggagggagagaaggaaggaaggaaggaaggaaagaaggaaagaaggaaggaaggaaaggagggagggagggagggaggaaggaaggagagaaggaaaggaggggggaaggagaagggaaggagaagagacttcagaatgtcacaccattgtctggattttaacaatggatctcaaaatattgagattgccaaggttttttaaaagtttttaaaccaagataaactgagaacgttgaagtaatgtcataacttctctttattaaaaatcaattctatcctcaactgaataaagtacatcatacttaatggtgaaagactggaagctttcccagtataatcataaagaaaacaaagatgtccgttctcaccacttctattcaacattctactggaggttctagtcagggcaataggcaagaaaattaaataaaaggcatccagattggaaaggaagaagtaagctttctttactcaaagatgacatacatttttaggaaaatcctaaggactcaatttaaaaactattagaacaaataagttccacaaggttgcagggcacaagatcaatatacaaaactcratagtgtttctgtatacttgaaatgaacaatccaaaaataaaattaaaaaacaattccaggctgggcacaatggctcatgcctgtaatcccagcactktcgaaggccaaggcaggtggatcacctgaggtcaggagttcgagaccagcctggccaacatggcaaaacgccatctctactaaaaaatacaaaagttaactgggcattgtggcacatacctgtagttccagctacttggraggctgaggcaagagaatcgcttgaacccaggagggggaggttgcagygggctgagatcaggccactgcactgcagcctgggtgatggagtgagactccaactcaaaaaaawaaaaaaaataaaaaaaattcatttacaatagcttcaagaaggataaattacatttaacaaaagaagtgcaaaacgtatactctgaaaactacaaaacacgttaaaagaagttttaaatgatttaaataaatggaaaaacatatgtgtctatggataggaaaactagatattgttaaatggcaataattcccaaactaatctatagattcacasaatcccttatgaattcccaaatgtcgttttttgcaaacaatggcaagcggatgctgaaattcacatggaaatgcaagagatccaaaataaccaaaataaccttgaataaagttagactcacactttctaattgtaatacatactacaagcaatagtaatcaagacagtgtcgtactggcaaaggatagacacagatcactagaatgcaattagagtatagcaataaagccatgtacctatggtcaactgattttcaacaagggtccaagacagttcaatagtggaaagaataatgttttcaacaaatggtgctggaacaactgaatatccacatgcaaaagagtgaatttaaacccctacttcacatcatatacaaaaattaactcaactggctcaaatacctaaatgttagagttaaaactataaaactcatacatgaaaacataagcataaatctttgtgactttgtgatctcagatataataccaaaaacaaaaacaatgaaagaaaaaataggtaagctggactacgtcagaattaaaaactttcgtacttcaaaagatattatcaagaaagtggaaacacaactcacagaactgaagaaaatattttgaaatagtgtatctgctaatgtaccagtatccaaaatatataacccaactaagmaataccaaatctgaaaaaacatttcctcgaagaagaaacacaaatggccagtaaacacacgaaaaggggttcaacatcattagttactacagaaatgcaaatcaaaaaaagaacrtgtgtgcaagcatctttttcgtataatgacttcttttcctctgaatagatacccagtagtgaaattgctggatcaaatggtagttctatttttttgtttgtttgtttgagatgcagtttcactcttcttgccaaagctggagtgaaacgacatggwctcagctcactgcagcctccgcctcccaggttcaagcaattctcctgcctcagcctcccgagtagctgggattacaggtgtgcgycaccaagccaggctgattttttgtatttttagtagaaacgaggtttcaccatattagccaggctggtcttgaactcctgacctcaagtaatccacccacctcggcctcccaaaatcctgggattacaggcgtgagccactatgcccagccagtagttccacttttaaaactacaaatcaggttcggtatttgagcaaatactgctccagtgatgagtataccaaaatctcacaaatcaccactaaagaacttactcctgtaaccaaacaccacctgttctccaaaaacatatggaaacaaaacaaattttttaaaaaagaacaatagtcaaggtgggaatgttgaatagcactgtactggcataaaaacagtraaaaaaaaaaactcttttgcatagtcactttgtaagagtttggcagttattcaaaaaattaaacagttaccatatgacccagcaatttcactactagtaacatacccaagagaattgaaaatatatattcacacaactacatgtacatgaatgttcacagcagcattattcttaacagctaagagcagaaacaatcacaatgttcatcaactgatgaatggatacacaaaatgtaatatatccacacaatggaatatttttcatccataaacatgctacaacatggatgaaccttgaaaacattgtgctaattgacagaagccagacaaactgtgcagaataggcaaatccatagtgataaaaagtacactggtggatgccaggagcttcaagaaggagagaatgaggactgactgctaatgtgtacagggtttcttctgggtgtgaaaaaagaagacagtggtgattattgcacactttgtaaatatactataataaaatcctatgtgaagtatatcccccaaaaaatcaattctatgtctaccagatatagaattgactctaccttttagtttctatagagaaaaaatattcatccctgcacttccaaagcctgagatatctgtttcagtgtccatccttatctcagggtttcaattttttaaattattcattattcattttctttctaaaatatttatataccatcaaaactgaagtgcatgatacattttcattgtgtagtcctctttataagtagtacattttattattaattgacataattgtattcatttatgaggtaccatgtgattttttttatactttaagttctggggtacatgtgcacaacgtgcaggtttgttacatatgtattcatgtgccatgttggtgwgctgcacccattaattcatcatttatattaggtatatctcctmatgctttccctccccctgcccccctccccccaccccacaacaggccctggtgtgtgatgttctgcttcccatgtccaagtgctttcattgttcaattcccacctatgagtgagaacatgyggtgtttggttttttatccttgcaatagtttgctgagaatgatggtttccagcttcatccatgtccctacaaaggacatgaactcatccttttttatggctgcatagtattccatggtgtatatgtgccacaytttcttaatccactctatcatttatggacatttgggttggttccaagtttttgctattgtgaatagtgccacagtaaacatacgtgtgcatgtgcctttatagcagcatgatttataatcctttgggtatatacccagtaatgggatggctgggtcaaatggtatttctagttctagatccttgaggaatcgcctcactgtcttccacaatggtagaactagtttacagtccctccaacagtgtaaaagtgttcctatttctccacatcctctccagcacctgttgtttcctgactttttaatgatygccattctaactggtgtagatggtatatcactgtggttttgatttggatttctctgatggccagtgatgatgagcattttttcatgtgtctgttggctgcataaatgtcttcttttgagaagtgtctgttcatatccttcgcccacttgttgatggggttgtttgtttctttcttgtacatttgtttgagttctttgtagattctggatattagccctttgtcagatgagtaggttgcctgttcactctgatggtagtttcttttgctgtgcagaagctctttagtttaattagatcccatttgtcaattttggcttttgttgccattacctttggtgttttagacatgaagtccttgcccatgcctatgtcctgaatggtattgcctaggttttcttctagggtttttatggttttaggtctaacatttaagtctbtaatccatcttgaattaatttttgtataaggtgtaaggaagggatccagtttcagctttctacatatggctagccagttttcccagcaccatttattaaatagggaatcctttccccattgcttgtttttgtcagrtctgtcaaagatctgatggttgtagatgtgtggtattatttctgagggctctgttctgttccrttggtctatatctctgttttggtaccagtaccatgctgttttggttactgtagccttgtagtatagtttgaagtcaggtagtgggatgcctccagctttgttcttttggcttaggattgtctttaaagtatgggctcttttttggttccatatgaactttaaagtagttttttccaattctgtgaaaaaaatcattcgtagcttgatggggatggcattgaatctataaattaccttgggcagtatggccattttcacgatattgattcttcctatctatgagcatggaatgttcttccatttgtttgtatcctcttttatttcgttgagcagtggtttgtagttctccttgaagaggtccttcacatcccttgtaagttggattcctaggtattttattctctttgaagaaattgtgaatgggagttcactcatgatttggctctctatttgtctgttattggtgtataagaaagcttgtgatttttgcacattgattttgtaycctgagactttgctgaagttgcttatcagcttaaggagattttggtctgagacaatagggttttctaaatatacaatcatgtcatctgcaaacagggacaatttgacttcctcttttcctaattgaataccctttatttctttctcctgcctgattgccctggccagaacttcyaacactatgttgaataggagtggtgagagagggcatccctgtcttgtgccagttttcaaagggaatgcttccagtttttgcccattcagtatgatattggctgtgggtttgtcataaatagctcttattattttgagaaatgtcccatcaatacctaatttattgagagtttttagcatgaagbgttgttgaattttgtcaaaggccttttctgcatctattgagataatcatgtggtttttgtctttggttctgtttatatgctggattacrtttattgatttgcatatgttgaaccaaccttgcatcccagggatgaaacccacttgatcatggtggataagctttttgatgtgctgctggattcagtttgccagtattttattcagaatttttgtatcaatgttcatcagggatattggtctaaaattctctttttttgttgtgtctctgccaggctttggtatcaggatgatgctggcctcataaaatgagttagggaggattccctcttttcctattgattgcaatagttcagaaggaatggtaccagcwcctccttgtacctctggtagaattcggctgtgaatccatctggtcctggactttttttggttggtaagctattaattattgcctcaatttcagagcctgttatttgyctattcagggattcaacttctccctgatttagtcttgggagggtgtatgtgtcaggaatttatccatttcttcgagattttctagtttatttgcgtagaggtgtttacagtattctctgatggtagtctgtatttctgtgggattgatggtgatatcccctttatcattttttattgcatctatttgattcttctctcttttcttctttattagtcttgctggtggtctatcaattttgttgatcttttcaaaaaaccagctcctggattcattgattttttgaagggttttttgtgtctctatctcgttcagttcttctctgatcttagttatttcttgacttctgctagcttttgaatgtgtttgtcttgcttctctacttcttttaattgtgatattagggtgtcaattttagatctttcctgctttctcttgtgggcatttagtgctataaatttccgtctactcactcgtttaaatgtgttccagagattctagtatgttgtgtctttkttctcattggtttcaaagaacatctttatttctgccttcattttgttatgtacacagtattcattcaggagcaggttgttcagtttccacgtagttgagyggttttgagtgagtttcttaatcctaagttctagtttgattgcactgtggtctgagagacagtttgttataatttctgtttttttacatttgctgaggagtgctttacttccaactatgtggccaatcttggaataagtgtgatgtggtgctgagaagaatgtatattctgttgatttggggtggagagttctgtggatgtctattaggtccacttggtgcagagctgagttcaattcctggatatccttgttaactttctgtcttgttgatccgtctaatgttgacagtggggtgttaaagtctcccattattattgtgtgggagtctaagtctctttgtagatctctaaggacttgctttatgaatctgggtgctcctgtattgggtgcatatatatttaagatagttagctcttcttgttgaattgattcctttaccattatgtagtggccttctttgtatcttttgatctttgttggtttaaagtctgttttatcagagactaggattgcaacccctgcctttttttgttttccatttgcttggcagatcttcctccatccctttagtttgatcctatgtgtgtgtctgcacgtgagatggctctcctgaatacagcacactgttgggtcttgactctttatccaatttgccagtctgtgtcttttaattggagcatttagcccatttacatttaaggttaatattgttatgtgtgaatttgatcctgtcattatgatgttagctggttactttgctcattagttgatgcagtttctttctaccatcgatggtctttacaatttggcatgtttttgcagtggctggtaccagttgtttctttccatgtttagtgcttccttcaggagctcttgtagggcaggcttagtggtgacaaaatctctcagcatttgcttgtctgtaaaggattttatttctccttcgcttatgaagcttagtttggctgaatattaaattctgggttgaaaactcttttctttaagaatgttgaatgttggcccccactctcttctggcttgtagagtttctgcccagagatctgctgttagtctgatgggcttccttctgtgggtaacctgacctttctctttggctgcccttaatattttttccttcatttcaactttggtgaatctgacaattatgtgtcttggagttgctcttctcgaggagtaycwwtttggtgttctctgtatttcctgaatttgaatgttggcctgccttgctagattggggaagttctcctggataatatcctgccgagtgttttccaacttggttccattctccctatcactttcaggtacaccaatcagacgtagatttggtcttttcacacagtcccatatttcttggaggctttgttcatttctttttactcttttttctccaaacttctcttctcgcttcatttcactcatttgatcttcaatcactgataccctttcttccagttgatcgaatcagctactgaagcttgtgcattcatcacatagttctcgtgccatggttttcagctcatcaggtcatttaaggacttctctacactggttattctagttaaccattcatctaatcttttttcaaggtttttagcttctttgcattgggttcgaacttcctcctttagctcggagaagtttgatcgtctgaagccttcttctctcaactcgtcaaagtcgttctccatccagctttgttccattgctggcgaggagccgcgttcctttggagggggaaaggagctctgatttttagaattttcagcttttctgctctgttttttccccatctttgtggttttatctacctttggcctttaatgatggtgacgtacagatggggttttggtgtggatgtcctttctgtttgttagttttccttctaacagtcaggaccctcagctgcaggtctgttggagtttgctggaggtccactccagaccatgtttgcctgggtatcagcagcggaggctgcagaatagcagatattgctgaacagcaaatgttgctgcctgatcattcctctggaagcttcatctcagaggggtacccggccgtgtgaggtgtcagtctgcccctactgggaggtgmctcccagttaggctactcgggggtcagggacccacttgaggaggcagtctgtccattctcagatcacaaactccwtgctgggagaaccactactctcttcaaagctgtcagacagggacatttaagtctkcagaggtttctgctgccctttgtttggctatgccctgcccccagaggtggagtctacagaggcaggcaggcttccttgagctgcggtgggctccacccaggtcgagattctgggccactttgtttacctactcaagcctcagcaatggcgggcgcccctcccccagcctygctgctgccttgcagttcgatctcagastgctgtgctagcaataaacgaggctccgtgggcrtgggaccctccaagccaggcatgggatataatctcctggtgtgccatttgctaagactwttggaaaagtgcagtattaggaygggagtgacacgattttccaggtgccatctgtcaccccttctcttggctaggaaagggaattccctgaccctttgcacttcctgggtgaagcgatgctttgccctgcttcggctcacacttggtgggctgcacccactgtcctgcctccactgtctgacgagccccagtgagatgaacccagtacctcacttggaaatgcagaaatcacccatcttctgcgtcactcatgctgggagctgtagactggagctgttcctatttggccatcctctaatggaccgtgatattttgatatacatatacaatgcatactgatcaaattagagtaattagtacacctcaaacgtttatcatttctttgtgttgggaacattcaaattcttttcttctagcaattggaaaatatacaataaatcattattaactatagtcaccctgtagtgctataaaacattagaatgtattcctcctaattagaattttgtatccattaaccaaggtctttctatccctcaatcctcatgtccttcccagcatctrgtaaccactattctactctctgcttctatgagatcaatgtttttagctaccacatgagtgagaacatgtgctatttgtcattttatgtctggcttacttcacttaacataatgtcctccaagctgatctatgttgctgtgaatgacagatttcattcttttttatggctgaatagtattccattctgtatacataccacattttcattattcattcatcgcttgatggacttttaggcttattccacatcttggctattgtaaatagtgtagcaataaacatgggagtgcagatagttcctcaaaatacagattttctttcctttgtatacatgtccagtagtgggattgctggttcatatggcagttctattttcagttttttgagaaacctccatattgttctccataatggctgtactaatttacattcccaccaatagcgtatgagtttccttttttccacatcctcacargcattttttattttttgtaatttgataatagccattctacctggggtaagattatatctcartrtggttctgattgggatttccctgatgattagtggtgttgaacagtttttttatatatcttttggccatttgtatgccttcttttgagaaatgtctatttgggtctatagcccattttaaaaatcaaawcatttggttttttggtgttgggttgtttgagttccttatattttctgattattaatcttccatgggatggagagtttgcaaatattttctcccattctgtgggttgtctctttgctttattggttcttttgctgtgcagtaactttttagcttgatgtaatcccatttgtctatttttactttttttccctgtgcttttgaggtcttatacaaaaaaatttttgcccagaccaatgtcctgtagtgttttaccattgttttcttttagtagttttatagtttcaagtcttacattttagtcttcaatctattgggagttgtttttttatatagtgagagaaggatctagtttcactcttttgcatatagatatccagttttcccagcaccrcttattaaagagactgacctttcctcaatgtatgttcttggaaactttattgaaaaggagctggctggaagtgtgtggatttatttctgggtcctctattctgttccattggcctgtgtatctgtttttatgccagtactatgctatttttgttactatagctttgtagtataatataatttgaaataggataacgtgatgcctccgctttgttctttgtgttcaaaattgctttagctattagaggtcttttgtgtttacatacaaattttaggattggtttttctatttctgtgaagaatgtcattggtgtttctgtggtgattgcacagaatttgtagatccctgtgggtagttcagacacttcaacaatattaattcttccaatcaatgaccatgaaatatctttccattattttgtatgtgtcctcttcaatttcttttattagtgyctcatagtttttcttgcagatatttttcacttctttggttaaatttatttctaggtatttttacagctgttgtaaatgagattgttttcttgatttattttgcaaattgatcactgttagcatatygaaatgctactgatttttgtatcctacaaatttactggatttatttattcattctaaggatttttttatggattctttaggtttttctaaatataagatcattttgtgtccaaacaaggattatttgacttcctctttcctgatttggaaacccattgtttctttctcttgcgtaattgtgctggctagcacttccagtgggcatccttatcttgttccaggtcttagcggaaaggcttttcatttttccccattcagtatgatgttagctgtaggtctgtcatatatggcctttattgtgctgaggtatattccttctctatccaatttgttgagagtttttgtcataaaaaaatgttgaattgtatcaaatgcttttaaagcatctattgaaatgatcatatgttttttgtccttgattatgttgatgtggtgaatcacatttattaatttgcatatgttaagccatccttgcatctctgggatgaatcccacctgattatggtgaatgatctttttttccttcaacttttattttaatttccaaggtacatgtgaaggatgtgcagttttgttacataggtaaatgtatgccacagtggtttgctacacatatcaacccatcacctaggtattaagcccagcatgcattagctactcttcctgatgctctccctccccaaccctgacaggactcagtgtgcattgttctttccactgtgtccatgtgttctcatcattcagctcccacagaagtgagaacatatggcatttggttttctgttcctgtgttagttagctgaggataatggcttcccacacatgttcctgcaaaggacatgatctcattcctttttatggctgcatagtattccatggtgtatatgtacatttactttatccagtgtattgttgatgggcatttgggttgattccatgtctctgctattgtgaataatgttacaatgaacatayatgtgcatgtatcttcataatagaatgatttatattcctttgggtatatacccagtaatggtattgctgggtcaaatgatatttctgtttctagatctttgaggaatcaccacactgtcttccacaatggttgaactaatttacttttccaccaacagtgtaaaagtgttcctttttctctgcaaacttgccagcatctgttgtttcttgacattttaatgtttgctgaagccgatctgctagtattttgttgaagatttttgtatctatgtttgtcagggatattggcctgttgttttctttttttgtttgtttttggtttttgtttgtttgtgtgtgtgtgtgtttccctatctagttttggtataagggtgtcctccyaagccgagtttagaagttttccctcctcttccaytttttgaaatagtttgagtagaactgatatcagttcttttagtaagcggtagaattcaacagtgaagacatcagatcctgggtttttctttgataagtgactttttttatcactgctttgatatcactactccttactggtctgttcgggttttctatttcttcatggctcaatcttagtaggttgtatgtgctaaggaacatatccatttcttctgtgttttccaatttattggtgtacagttgtacataggagtctctactgatcctttttacttctgcagtgtccattgtaatgttccctttttcatctctcattytatttgtttgaatcttctcttttttcttagtctagctaaaggtttgtcaattatctttttcaaaaaccaacttttcattgtttatcttttatrttgtttttactgtctatttatttctgctctgatcttatttcttttccttctactaattttgggtttgatttctgtttttctagttccctaaggtgcatcataaggttgaagtctttctattttttgatggaggaatttatrtctataaatttccctcttagtactgcttttgttgtattccacatgattctcatatgttgtgtttccattttcatttgtctcaggatagttttttaattttcttcttaatttcttcgttggcccattagtcatttgggaacatgtttaatttctgtgtatctgtaccgtttccaaagttcctcttgttattgatttctagttttattccactgtgatcagaaaagatactgagtatgatttctacttttgtaatttgttgaaacttgttttgtggtctaagatatggtttagcctgtggaatgtttcattttctaatatgaagaatgtgtattctgcagcagttggatgaaatgctttttagatgtctattaggttcatttgaactagagtatagtttaactccaatatttgttgattttctgcctggattatctgtctattgccaaaagtgaagtgttgaagtctcctactattattgttttgcagtctatccctccctttagatctattaatatttgctttatatagttggatgttctggtgttgtgtgtatatatattcaccattgttatgttctcttgctgaattgacccatttgttgttatataatgaactctatgtctctttttacagtttttgatttaaagtctactttatctgatataagtatagcaattatctgctcttttttattttcatttgcacggagtatctttttccatcccttcattttctgtctgtgtgtgtccttayatgtgaaatctgtttcttgtaggcagaatatagttgggtcttgctttttaatctgttcagccattctacatcttttagttatagggtgtgatctatttacactcaatattattgataggtatggacttattactgctattttgttacttgttttctatgtgttttgtaactcctttcttcttttcttactgtcttcctttgtggttacatgatttttctcccatagtatgtttgaatccattgctttttattcttgttatatctatcataggtttttgctttgcacttaccttgaggcttaccaaaaaaaatcctgtagttacaacaagttatttaaaactgatataaacttaaatttgatcacaataaaaggaaaagaacaaacaaacaaacaaaaatcatgtacacattaactccctgtacatgttaacattgttattccccacctcatttgtgaccttggaataaatttgcagacctgggaaacggaaatcatgtttggtgactaaaaagtactacatttatattgattctaattttgatgaataaacaactctgaagagttctgattcaactagaaacacagcagcattttatttctgaatcttytcatcacaaagagcagcaaagaaagtaaaaaataaacctacaaagtaagagaaagaaatcataaaacttcacattgcaaataattggtaccaaagatgcagtggaatgggaagtgaggaacagggagaacaragaaggcctaatgggaaatgacctcagaaacagccagcaaatatagtacattttttaaaagctggggtagctttggaaggttaggattctatctcttgttggttatggtcttaatgaacccaaggccagtaagagaaatacataaaaatgagatcacacaggagggccaaatgtcaagtcttttgccacaacatcagaagaggaagcccttgagctaagaagcctacaaatctatcctggcctcacccctccatagtaatctcttgttaaacatcactaaaatatgagtaacaaaaaagaaatgtgccctacattctcataaagatactacagagaaaattttaaaaatgaaaaagaacaatatagccttcttaaagacaatgaaaacaccagawaaatcattgacagaaggcagataaaaagtgcaacctaatattccaactgagaattttaaacctttatgcatcaattgaaactataaggataaatatcaaaacatagagaagagatggctacacaagaagacatgacagtagataacaggagggcatgaaacaagaactgacggaacgtatgaaagaaacagaagaaaaatacaaagccaggtccaaaatgacgactaawctataggaaatactaagaataatagataccatagaaaaccacagtaaggatacagaaaacagaaataaaatccaacaaaatgcaaaataaaatagaaataggaaggaaaaggcccatacatatatataatttaaaaattatacaggaaaaaaaggactgaaaggaatatatgtatattccttctatatatgtatatgtattcttatactttttcttaaccttatatatatatatacatacatacacacacgtacacacacacacatatatggttgtatacacaagtataaatagttgctgatgataaaaaccaactcatggaacttaataagcactcaagctatttcaacaaaaaaacctttcctgaaattaaataaagacagaaaagaagaaactaaggaaagaaagaggagcatggagggaagagaggagggaatgaagcaagcagactgagttgaatctgcatatagaaaaaatatagatttattgaatatcagggaaaaccaacccagaatggccaaccctgagactatcctagtaaaattattcgaacttcaaaataagaaaaagaattctttgggcaaccaggtaaaaataacaagtcactaataggagaaagaaatcaggttagttgaggtttattgacaacaacactcaacaaaggccacagaaaacatgacagcaacacctacaagatactcatgagaaaagggtawaagacaaggattttatatccagctcaactcctcttaaagtttaaaggctacagacaactacagtcagttattatttgtgatagttatattctacaaagtctttgcagatactgaattagcatatactgaataattgatcctaggggaaatctagggttaggttcctgcaagccaatggtcataacattttcatcaattgatcgatatatagccttgttttatgtgggcttctgtttaaagatgccttatttaatatatattgttgatgcattatcatttaactcaatcaacagcactataatttatgcctaaacaaagcttatctaaaacatctattttctccagaaggcacattatagccttcttgccactaggaatactcaacagcacttcagcactatcttgagggccatcttaaaagtgaaatcaccaacaaaagcacaaaaatgcaaaaaacatagcaacaaattggccattcagaggacagttgtccacagtatgagagctgaaaaaagaagacaggtctcagctgagaatgtacacattaagcaggttgggaaactcaaattttttaccactctgcgcacatccttaaggtgatcccaaaagtacagatttacggaawacaaatgaattttagcaagtcagaaaattctaacatttatgttggaatccacgaacaatggagattgactatagttttgaaaattcaagagtttgggaaatactgttcacatgaaagtttcattaagaaacctcttgagtacaaactagcaaaccaaagataaattggatcaattaaaattagacggtgaattgaggagctggggaaaagaacagaaagtaatattatcattgctcatgtgagaataattattgttttaaataagaggggaatgagagtataaggtaaaggtaatctttggattaaaaattaaaacttcctaaatatcaaagggaaatgactgcaattgaaaaagtcagaaaaaaaaagttttgtatagtatacattttttaaacttgtatatagaaacacagaaaacataacacaaaatgacwgaactaagaccaaacatacatttctatcaatgtatgtatataagcttaagtaatctattaaaaggaaaagatctyctgataagatcacaaaacagaattcaatgctatactttatacaaaasacatgtctaaactacgtaattttaaaagcttaaatacatttttaaaaaaagaaaaacacaaagtaaaataataggagttgtgatcataatattaaacaaggtagaattcaggccaaccatcaagagaccaaaaaatggcactatattgctaagggtacgattcacaatgaaaacaaaacagctataaatgtttgatgcccatatttagagtttattgatacttttgtaagaagagagatcatacttcatagggaactacagaatgtctcagtaagttaggcagggcttgttataggattggggtctgttatagggttcaaggacctgtggttttgctgttaaycaggtgatgtcagaaagtggcaacaattctataaccaggtatcttagtgatatttatctacaaatcaggaagaccaagaacagctgaagctatcattggtaacaaagcaacagttgttcatgttagctgggagagggggatgcgtggtcatttttctgatttgcacagtgttcttatttttgtctttgttcacacatgattatggagtggtcttgttttgtccaactccattgttgtcacagggcacctctgtctcatgttgatattgtaaaattgtgtaagttcaacagcagaacatcatgggctagctgtaagagtcatgccaggtaccaattgacacctattgggggctgctcctttttctcaatatttatacacaaaaaaaaaacagagtagcaattttcatgaaccagaacttacagaaaaaggatatgttgagatactaataacaggagatatagacttacctctcttggtctaagatagatcaatttgaactaaaaataatgacataaactacctaaagaacataatctacaatgcagagctgagtgacatataccaagattttatctgaaaatagagaatacaacttaccttcaagtgtacatggaacactcatgaaaattgaatacatattagttcacaaagaaaaccttaataaattccttaaaagaggccgggcacagtggctcaagcctgtaatctcagcactttgggaggctgaagcgggtggatcacgaggtcaggagttcaagatcagcctggccagcatggcaaaaccccatctctactaaaaatataaaaaattagccagatggtgggtgcctgtaatcctagctactcaggaggctgaggcaggagaatcacttgaacctgggaggcggaggttgcagtgagccgagatcgtgccattgcactccagcctgggtgacaagagcaagactccagttcaaaaaaaaaaaaagaaagaaaaaaagaagtaatacagataacttattctgataataatgaattaaaactggaaattaattacaaattcaaaaaatgaaaactcctgatcttttaagtcaaatggaaaatgtaaagaaagcctataaatttgctagaaaacactattaatgaaaacagtatcagaccctatagaataaaacaaaagcaatactcagaagaaaattcttaaaatacttatatcattaaaacataaaaataattaagacatgcatctcaaaattttttaaaagaataacaaaataagtcaaaaataaggtaaataaaggaattaagaaagacaaaggcagaaatgaatgaatttgaacagaatatcaatagagctaatacctaaaacaataataatatttattaagagatactatatacaagcactgtactaagccctggcaataaagagatgcaagacagaattaatacataaataaataaatgaaagggtaaacagttccttactttagacagttttcctaattaaattccccttcatagatatgttttacaagtatctatgatactgatactacatacttgatatgttttacaaatatctatgatactgatactacatacttgatatgttttacaaatatctatgatactggtactacatacttgatatgttttacaaatatctatgatactgatactacatacttgatatgttttacaaatatctatgatactgatactacatacttgatatgttttacaaatatctatgatactgatactacatacttgatatgttttacaaatatctatgatactgatactacatacttgatatgttttacaaatatctatgatactgatactacatacttgatatgttttacaaatatctatgatactgatactacatacttgatatgttttacaaatatctatgatactgatactacatacttgatatgttttacaaatatctatgatactgatactacagtacatcagtatgtactgatactatataattgaacactttcacagccatgaaaggaaytctttttgattgtcactataaaagacttctgagataactttaaacttaaatataaacttcctagacaaaatcacaggctctaattttataaatctcttttcttctcatgtcaacagttaaaatctgtggaacataaacatttgtctaaaaacagaaaatcagctactgtttgtgggaaaaataagtttatagttcccaataatttaatgtgagaaagataggcaggcagacagagataagaaggatagagtttaagaaaagtcataactcttctaatcatgctttatttttccattgtctgaaagatcgtgagtcagctatacaaattttttgagcaagagaaaaaatataaggatttgaggaagccctggaaatgaacccaataatcatgaagacaaaacatttccctcctactgggtttttcccatcagtctctaaacatccctaaaaatgtactcaaaatgactcatcactttctgtgtgaggagggctgtgagcctcaccagcagtaccatgcggaccatgtgtagggcagatagtgccaagggcccagaaacactgtatcctacatggtttccaggttggttccagaatcaactgtctgaatcgaactcaatgataaaggagacacctgcagaaggaactgagacaggagctgctcttctaggtggatcttcaggagtgaaaggaagraggaacacactgagcaactcctgaggttttctagacaccaccctcgtgctcaagcatgcctgaggtgggcgggctgaaagcagtgaaagcagaaagatccttcattcctatccagtgcttccagaagagggactctgattcttttggagaagtagtatatggcagatgtcaaaagtaacccacctacttatgcagagtctctggaggcatgctgccttagggtccagagatgacagatagatagacagatagatagataggatagacdagatagatagatagatagatagatagatagatagatagayagataracagacagacagacagacaggtttctccaccccctgcactgaacttcttcctctaactaatgccctcttttccactttcaccagcatctatcttagctgtctccatgattctaatttctgttcatttttcagcctggtatgtgctagcctctgcccccatcgttcttttttccccagccacatggaggtataattgacaaattaaaaacgcatatatttgtatgcaccttagagtgtacaacatgatgttttgatgtacatatacattgtgaaatgatgattactacaatcaacctaattaacatatccatcaccccacatagttaccttttatatgtgtgtggtgagtatattaaaatctaagtgttagatgtctggcaaatttcaagtataaaatacattattattaactatagtcaccttgccataccatagttctccagaactcattcatcttataactgcatgtttgtaccacttgaccaacatctccttattctccccaccccctgaacacaggtaactacccttctactctctgtttctacaagctcaacttctttagattccacgtatacgtgagatcttgcagtatttgtctttctatgcctggtttatttcaaccttaagcagaacatccttcaggttcgtctatgttgtcacaaatggcaagattttcatcttttttaagactargtaatattcatacacacaaacacacacacacacacacacacacacacacaatgtatatataacattttgtccattctttggtcaacagacacatgggttgtttctgtatggatgtccccactccwcatctcttgttccctcttaggaggagcaaggggcattttaaagatcatatgccttccctcaaacccacaaagccaggccaggtcctgagagcctcccatttttcttccctaggacaataccctgaaatgctcgagtttgtgtgccttcttccagtcctgcagggtcaagccagttgtcagccaggacacatgtacttgctttccatgagggtatgctcagagaaccggactggagtagggggaagaagcatgcagagtgtttgggggacttgtgggccagctggaggtggggtacacaggcaaggcctcctgggtggctgtagtcaggcttcctgagggagtttgtagggcagttagcaaggtttgcagcctctcttcctcctcccaacctctcccaaccactcagccatgccaatcaccccagtattctgggtggggtgagaaggaagcaggtctcttgggggcaaggtcccacatagctgggggagccaggggtcactcactgcactctcactttctcccactggagaaatcgagggccaaggggaaggagtgatgtggataaagtgaagctgttcttcttatcctcttcaatcatctatctattctcagatttkttgctccagtcatgtgctggaacttctctactggactcccagattcccccagtggtactcccctctgtgggtagctgtcaaaatagatgtttctgtggagggacaacagtagaaaggtcctagaccaccatcatgctgacattggcaccatcattcttcaaaattgcttcttggtgaaaccccatctctactaaaaatacaaaaattagccggacgtggtggcacgtgcctgtaatcccacctacgtgggaggctgaggcaggagaatcacttgaacttgggaggcagaggttacagtgagccaagatcgtgccactgcactccagcctgggcaacagagtgagacttcatctcaaaaaaaattaaattaaattaaattaaattgcttctaccgagctcactcatgaccctttaattactaaagccagtaaaggcttgtggcttcttcggcagaccttctgctagccttgacactgtccactgtccttgtttgtgaaactcctccctcggcttgtgaagcccactctctctgagtgttctccttctctccagtagcatcttcttagccttttaagctggctcctcctgatctgcttgcccttggaatggtggcatcccccaggaacttatctttggcttcttctcacctcacaattttcctgggcccttacctactccagtgactccaactatcaatatgttgatttccaaatttacatctgcatggcttctcatgcctggtttcttattaatcccatcagttccacctcctattaaaagacagaggaatgtggtagttaaaaccatggactctggagatagaatgcctgggccgtggggccttagggaagtcacctaagctctctctgtgcctcagttttctcatctgtaaaatggaagggggagagtaataatagtacctacttcatagaattgttgttcagattgagttaatgtatataaagtacctagaacaggacctgaaacataataagcgcaatgtatttgctaattttttaaagttcggcatcgctgtttagtatctcctgtaagcatctcaagttaatttcctaaatctatcttcaatatattcatttaacatactcattttctctccacctctagtgctcataccttaaccaattccaactatttggtattgcaaatgtcaggccatacttaccactcaagctttatttctggccatttttcccatacccatcaaccctaccctttgactacacaacagaaactgagatccagttcatgcctctttaaccatgtcatgctcttgattcagagcccttatcttctcttctggcttactctgcctggaagcttctgcctctttcattcctctctacctggaacacctaatcatcactttcacgcagaacgacttggacatagttgtacagcctatgcactgaagaactttagcgtactctattcacatcttagtctatgtggccagaatttcttgaacttgtgtagtgtgtacacagtcatacacgatggtcctggaccaccctgccttatccagaaaacttttgcttataagtctctgcttagagatcccttccttcaggacattcttctggcctcttgatcaaatcaaagcctgttttctgctatacctgttttctgcccacctttggcacctcatgctgttaatagtagcccttttcacaaaatgttgcaacatatgttttcttatgtagcccctactagactcttggtggttcagcgtgtccaaaccaaactccataacttctcttcaccccaactttgaccactcattcactctttatcacccaaacttcctttcttttatattctctatttatacagaaccatctcttcatcatattttcaaccaaccccttgacaaatttcttatcttccagccataattagtaaacacccataggatttttatatctatttccatgagagcacattccacctcagttatatcataatttttgtttatgtgctaatctctccataggccatggacttaataaaggcacagggtcacctccctatcaccagtacctaacacgctgcttgaaactatgttgtttgaacttaacatctttaaatatgtaataaataaatataacaaaataatttgtaggatttagaataaactataaatctgtataaaccatttgttaggacttcactaattcactcatatgccttgagaccttggtttttttctttttaatatatttcatttatttataatactggtttttattcagaaaaaatactgaaatgtgaattttgtaataactaaattaacatatttcctcatataagtaaaaataattttagtatatactcacatatgttactactcgctaaatctatttcaatgctgaacatttagctggtataaaattaatactggcaattatggcatgaaaagaacattgccttggagaacactgtaagtagtaaagcaattccaaaaattacgaacttaaaattagaattctaaaaactgttattttaagtaaattcccatgattcttctgataacaaaacattcttactacttataaatgtaaaaacatatttccgtttaacaataaattctcccatcccgagaaaagaaaaaaaaaaatactgtgtttgagtctggtctctgacccttactgatcttgtggccttggacaagtcaatcctacaaagcctcaagttactcatacgtaaacaaaaaagaaagcaattataatatgatcttaccgagtaaaatatcaatattaaatgtaacatggtatgtgaaagtgatttctaaactgaaaagtgctgggtattatctattatctctgttaatatgattcccatcacataaaccactttccaaagaataattcggtccctgaatgaatttggttctcacatatctctttatcaccacagctgactctggaagataaaagtcacattatcttgaaagtggagaagaaaatagagtgtgcataaataaaatatacatttatattagtatttaagtgtacattgcatttgtgttaggtattttaaagatttttaggaaacaaagtcataagctttaagtctcatcctcagctaccaaatagtatagaacaaggtcagcaaactttttctgtaaagtgcccaatagtgaatatttcagttctgtgagccatatggtctctgccacaactactcaactcagctgttgtgcaaaaaacagctataaacaacatgcaaatgaatgagtatggctgagttccaataaaactttatgtatacacactaaattttggattttatatagtattcacatgtgttttagtctggtcaggctgctgtaacaaaataccttagacaaggtaatttacaaacaacaggaatgtattgctcacagttctgaaggctagaaagtccaagataaaggtgctggcagactgagtgtgtggtgggggcccattctcacagatggcaccttctatgtccttgcatggcaaaagggtcaagcaagctttctcaagcttcgtttataatggtgctaaattctattcatgaggtctgtgcccttatgatctaatcacctcctaacgactccacctcttaatattatcacactggggatgaagatttaacatatgaattttagaagaacacaaatattcagaccacagcaacatgccataaaatattattcttcttttgatttgtttctgccatttaaacatgtagaaatcattagtgcatgggctatgtaaaaacaggcagcaggccagatttggcctgtgagccagccccccatataaagataacactccacattggacatttagatgtttttctggtagaagagtaattcaagttaattcatttaactatagtaaattagccagggttggtagctttycaaaattagaatmaatttcagattatattacaagtaaaattcttgattccttcttggagcattgttgggagatatttggaggtggctattctaaggaaaatcatcatctacatcaattcaagatccacaaaaatggtacttgtgcatatgctataccacatcatctgccttcaagtggcttatcatggaacctggaatggcttatacattttgagtgtttattacaaatttgcatctgaagaattcttgcacgtggtcgtgtattctatttctcaggcaatgtagtaagagtgtagtttgaaaagtcactcaaaccaggtttgctatgctccgaatgtttgtgtcaccctaaaattcatgtgttgaaccataatcaccaatgtaatggtattacgaggtggggcctttgggaggtgattaagctttagggcagagccctcatgaatgggattagtgcccttataaaaaagggcccagagagctgccttgccccttccccaatgtgaggacacagcaagaaggtgccatctatgaaacaggaagcagtttatcgccagaccccaaatctgcctgcaccttgatctttaatttcccagattctagaactggaaaacacatttctgttatttaaaagctacccagattttggtattttgttatagcagcccaaacaaactaagacaggggttaaatctcagctttcctgctcaataactatgtgatttcccagcactttgggaggctgaggtgggtggatcacaaggtcaggagttcaagaccaccctcrccaagatggtgaaactccctctctactaaaaatagaaaaaaaaaaaattagccagtcatggtggtgggtgcctgtaatcccagctactcagaatgctgaggcagggaattgcttgaacctgggagacgcaggttgcagtaagccaagatcatgccactgcactctagcctgggtgatagagcgagactccatctcaaaaaaaaaaaaaccacacaaaaaaaaaaacaaaaaaaaactctgatttaaagggagcttgtcaaatcctttaattcctcatttgtaaaataagaaaaagaataagaatatttgcatggtttttggaaagtgaaaggaggtcacataggtaaagcgctcagggcaacacatggttcctctccctcattctagttacaatttcaaaaatatgtttcaaaacccatgttactctaaagcaaggcaaatttccatcttttacttcttatttttttctgcattcaatataatcatatgaggaaccagtaatgattctaaaattcttgctcacacctgtaatcccagcactttgggaggctggtgggcagattgctttagctcgtgtatccaagaccagcctgggcaacatggtgagaccccatctctactaaaaatgcaaaaaaaatagccggctgtggtggtgcacacctgtggtctcagctactcgggaggctgaagtaggaggattgcttaagtgaggtgtgctggggagggggcggaggttgcagtgagccaagatcatgccactgcactccaaccttggtgacatagcaagatcctgtctcaaaaaaataaataaataaaattcttatcacgtattagtattcatgatcacatctatctgcatttaaaatgccttgtaacaaggaagctaagcactcattttattgaaacattctagatatgtctgttttctaatgcaaagacattcacaagaacatctaagcattaacctcagtgttcaaagtgtcaaaaagattttgaaatcatgaatatttttatgtaaaatactgatttaatgtttctcagaaaaattcaagtctaagggtggcatcagcagaatagcagttctcaggattcacccaccaccccacttccctacgcctccactgagagatcaactagcaactatgcacagataagaacaccttggtgaaaatcctgaaacatagaaataagcctaagtcacctgcatgttccatagaagtgagtaaaaatccacattgaaagggtaggagaaatggtgtatctcccttccccaagtcaccacagtgccatacagagaggattccccagggcctacagtgggaaaagacaacctgggtggtggacatccagcttccctaggattcagagatgcttccctgaaagcccactctcttctcacctcacagtaacggtagggaaaaactgcacagctagactacgtggggtcaggtagaaacaaagcaagagttgcaaagcccacagagaccagtgcacaaattttggcgaaagttcagtgtacctcccagcagtggtgctagatcagagataccagattccccaccccaccccccacccccacaaagctggactggtcactcccagaagaggtgggaaatgctacctgctttgaatccgtagatagctagctgccaggcccagcctcagacttggccagagtatcccccctcacccaggaagggagaagaccccctgacagtgaatttcaacaaaaaaagtaaggactagttctgccatacccaggagtttaatcagcattccttgctgccacagaacacaaccccagatccctcccagggagggagacaaatctcaacagtacctttctactgagtatagcagttggtccattcatcctgatatacttaayctcaggaaccctcctgcaaccctgtccaactgctgaactgaaatagtagtaccttctggccacagaatacaccctgtggcccagcttgatcagaggcaattgaaatgcctatccagtagctcagcctgattgcagaggtcagccagtggtcttgccagatagcagagcccagctagctgccccacccaaattcagagcaaaagcagcagcccagccatctagagaacctaaaagcaagctctgcctttccagggtcattaccagctgactcacctagaagcatgggctagattaaatagtcattcattcaggaagcactcatgaagagcctaccaggtgccggccctggcctggggctgggcttagagccggggcaggatggcctggcatctgctccgtggagctcacagcccagcctaggctggcaactccagtctgccccagtttccagttctgtccattccccttgcagctcagcatggatgaagctttgaaatccagctctccctctccctctccctctccctctccctctccctctcccgtctccccacggtctccctctccctctgtttccacggtctccctcttatgccgagccgaagctggactgtactgctgccatctcggctcactgcaacctccctgcctgattctcctgcctcagcctgccgagtgcctgcgattgcaggggcgcgctgccacgcctgactggttttcgtattttttttggtggagacggggtttcgttgtgttggcctggccggtctccagctcctaaccgcgagtgatccaccagcctcggcctcccgaggtgccgggattgcagacggagtctcgttcactcagtgctcaatggtgccccggctggagtgcagtggcgtgatctcagctcgctacaacctccacctcccagccgcctgccttggcctcccaaagtgccgagattgcatcctctgcccggccgccaccccgtctgggaagtgaggagcgtctctgcctggccgcccatcgtctgggatgtgaggagcccctctgcctggctgcccagtctgggaagtgaggagtgtctccgtccggccaccatcccatctaggaagtgaggagcgcctctttccagccgccatcccatctaggaagtgaagagcgtctctgcccggccgcccatcatctgagatgtggggagcgcctctgccccgcagccccgtctgggatgtgaggagcatctctgcccggccgcgaccccgtctgggaggtgaggagcgtctctgcccggccaccccgtctgagaagtgaggagaccctctgcctggcaaccgccccgtctgagaagtgaggagcccctccgcccagcagctgccccgtctgagaagtgaggagcctctccgcccggcggccaccccgtctgggaagtgaggagcgtctccgcctggcagccaccccatccgggagggaggtggggggtcagccccccgcccggccagccaccccgtccgggagggaggtgggggggtcagccccccgcctggccagccgccccatccgggaggtgaggggcgcctctgcccagcggcccctactgggaagtgaggagcccctctgcccggccagctgccccgtccgggagggaggtggggggtcagccccccgcccggccagccgccccgtccgggagggaggtggggggggtcagccccccgcccggccagccgccccatccgggaggtgaggggcgcctctgcccagccgcccctactgggaagtgaggagcccctctgcccagccagccgccccgtccgggagggaggtggggggtcagcccccacccggccagccgccccatccgggagggaggtggggggtcagccccccgcccggccagccgccccgtccgggagggaggtgggggggtcagccccccgcccggccagccgccccgtctccgggaggtgaggggcgcctctgcccggccgcccctactgggaagtgaggagcccctctgcccggccaccaccccgtctgggaggtgtgcccaacagctcattgagaacgggccaggatgacaatcgcggctttgtggaatagaaaggggggaaaggtggggaaaagattgagaaatcggatggttgccgtgtctgtgtagaaagaagtagacatgggagacttttcattttgttctatactaagaaaaattcttctgccttgggatcctgttgatctgtgaccttacccccaaccctgtgctctctgaaacatgtgctgtgtccactcagggttaaatggattaagggcggtgcaagatgtgctttgttaaacagatgcttgaaggcagcatgctcgttaagagttgtcaccactccctaatctcaagtacccagggacacaaacactgcggaaggccttccgcagggtcctctgcctaggaaaaccagagacctttgttcacttgtttatctgctgaccttccctccactattgtcctatgaccctgccaaatccccctgtgtgagaaacacccaagaatgatcaataaaaaataaaaataaacaaaaaaaaatagtgaaggtctattcctggtaagggacacctataaaagccagaaaaggtagctgtctctgcaaatgcacagacaccaatgcaagaatgcaagaattacaaagactcaggaaatcatgatacctccaacagaaactaacaaatcttcaacaatagaccctaaagaaaaggagatctatgacacgtcagaaaaagaattcagaatgatcctctttaaaaaaagaaaaagaagaagaagaagaatttcaagaatatacaaattaaaaattaaatgaaacttggaaaataatacacaaacaaaacaaggagttcgacaaagaaataaacatttttttaaaccaaagagaaatcctagagatgaagaatacaataactgaaattaaaaattcaatagaaagcttcaacatccagctcaatcaagctaaagaaaacatcagtgagcttccaaacagaacatttgaaattacccaatcagaggagcaaaaagagaaagaaataaagaaagccggcaggaattgtgggacaccatttagagaccttatttatgtgtaatagtaatataagaagaagaaagagaaaaagagccaggaaatatattaaaaggaataatggatgaaaacttccctaatctgaggaaggaagccagcatccaggtacaagaagttaaaaggtctctgatcaaattcaactcaaagaggagttcaccaaaacacataataattaaactaccaaaaatcaaagacaaagaaaaaattctgagagcctcaagagataagaaatacatcacgtacaaaggagtcacaatatgactatctgtggacttctcagcacaaaacctgcaggccaagaaagagtgggatgatagagtcaatgtgctgaatgtgctgaaggaaaataatcacaaaccaagaatacttcatccagaaaagctgcttttcataaatgaggcataaataaaaactttcccagataaacaaaagttaaggaggttcatcctccactaggcatgcattacaagaattgatattaaaaaaaagttctttaaactttaaacaaaaaactgctaattaataacataaaacttacaaaagcaaaaaactcaatgatataaataatacagagcaatattcagaatgctctaggactgtaatggtggtatgtcaagtaattttatccttagtaggagggttaaagaatgaaactattcataacaactacagctaaawtgaattggaaagggatacatactacaaaatgataatatacatttacataaaaatataaattcagacatcaaaaatataaaataggaaaaagtcaaagcatggagttgtatgcaatcaaagtttcattgttatcagcttcaaatagactgttatgagtgtaagatgttctacataagcctcatggtaaccaaaaagcacacacacacacacacacacacacacacacacacaaagatacaaaaaatactactacagaaaaccatcgaaccacaaagcaagacaacaacagaggaaaaaagaaacaaagatctaaaaacaaccagaaaacaatcttttaaatggcagtagtaagtctttacctggcaataattatctttaatgtaaatagattaaattctccaaaaaaaattgtagagtgaatgaatgaattttaaaaaacaagacccaactatatgcttcctacaataaactcaccttttgtatgcttttaaggacacacataaactaaaagtgaagggatggaaaaagacttttcatccaaatagaaaccaaaagaaagcagggataacaatacttacatcagacaaaacagacttaagtcaaaaactgtaaaaggagaaaaaggaagacattataaagaattgcttcatcaagaggatatagcagaggtaaatatatatgcaaccaaagtggagcacctacatatctaaagcaaatattaaaagatttgaatggagagatagattacaatacaataatagtaggagactttaatacaccactttcaataatgagcagaccacccaaacagaaaattaatagggaaccactggacttgaagaacactttggaccaaatggacctaacaggcatacacaaaagttccatctagcatggataaaatacacattttcctcaagtgcacatggaacattctccaggatagatcatatattagcccacaagaaaagtcttggcaaatttaagatgattaaaattatatcaagtacctttccaagcacaatgatatgaaactagaaatcaataagtggaggaatttaggaaactgtattaatatatggatattaagcaacatgctcctgaacaaccaataaatcaattttaaaaatttgaagggaaatttaaaaatatcttgagacaaatgaaaatggaaacacaacacactaaaatttacaggatgcagcaaaagcagttccaagagggaagtttatagcaataaactcctacatcaaaaagcagaaagaccacaaataaaccacttaatgttatgcctcaggaaaatttaaaaaaactaagcccaacatcagcatatgaaaagaaatattaacaattagagcacaaataagtaaaatagagactagaaaagcaatgaaggtcaatgaaacaaaaggtcaatgaaactgagagttggtttgtgaaaaaataagcaaaagcaacaaatraggtagaataaccaagaaaaagcactcaagtaaagtcagaaatgaaagaagagacattacaaccaacaaaayagaaaaacaaaggatcatcagagactaatgtgaacaactatatgccaaaaaattggataacctagaagaaatggataaattcctaaacacacacaacttaccaagactgaatcacaaagaaatagaaaatctgaacagaccaataacaagtaaggagattgaatcagtaataaaaagtttcccatcaaagaaaaacccaaaatctgatggtttcactgcttaactctaccaaacatttaaagacaaattaatgtcaacccttctcaaactcttccaaaaaattagaggagagaaccctttcaaacgcattctgcaaggccagcattacccttataccaaagccagacaaggacatcacaagaaaatgaaactacaggccaatatcattgattaacataaatgtaaaactcctcaacataataataccaaatcaaactcaacaacacattaaaaggatcatccaccatgatgaaattgaatttatgcctgggatgcaaagaggtttcaacatrtgcaaatcaataaacatgtacatcacgttaacagagtaaggaacaaaagtcatatgatcacctaattagatgcagaaaaagcattgacaaattcaacaycctttcatgattaaaaaaattcaatacattagatataaaagaaatgtacttcaacatgataaagcccatatataataagcccatacctaacattatactcaacagtgaaaaattggaaccctttcctacaagatccaaaagaaggcaaggatgcccattcttgacacttctattcaacacagtattrgaagttcttgccagaacaataaggcaagaaaaagaaacgaaagacatccaaataggagaggaagaaatgaaactgtcactatatgctgacaacatgatcttatatatagaaaaccataaagagtccaccaacacactgttaaaaatgataaacaaattcagtaaagatgcaggattttwaaaaaatcaacattcaaaaatcagtagtgttgcactacactaacaacaaactttccaaaaaagaaatcaagagaataatcccatttatgattgatattaaaataaaatacattacttagaaataaatttaaccaaggaggtgaaagacctgtacactgaaaactataaaacattaatgaaggaaattgaaaaagacacaaataaatggaaatatatcccatgtttctggataagaagacttaatattgttaaaatgtccatactacccaaagaaatatacagtcagtgcaatccctatcaaaattccaatgtaatttttataaatacattaaaartactcctaaaatttatatggaaccacaaaaatattgaatagtcaagtcaataacaagcaaaaagaacaaagctagaagcatcacgctacctatttcaaattatactacacagcaatagtactaaaacaccatggtgctggcataaaaatagacacatggatcaatggaacagaagagagagcccagaaatgaacccawacatctgcaatcaattgattttggacacatatacaatgggaaaaggacatcctcttcaatagtgttgagaaaactggatatccatatgcaaaagaatgaactgagacccttatttcacaatatatacaaaaatcaactcaactcttaaccataagaccagaaactttaaaattactagaagaaaacgtagcagggaaaactacatgacattggtctgaacaatgattttgacaacctgtggattcagagaaaatatttacaaaccatacatccgataaaggattaatttcaaaaatatataaggaactcaaacaactctatagaaagaaaataatagtaatccaattaagaaatgggcaagagttctgaataaacatttctcaaaagaaaacatatgaatgactaacaaattaatgaaaaaatgctcaatatcactaattattagggagatgcaaattaaaaccacaatgagatagcatctcatgcttgttagaattggctattatcaaaaagacaaaaaataagtgttggcaaagaagtggagaaaagagaacacttttatactgttggtgggaatgtgaattaatacaaccattatggaaaatggtatggagctttctcaatgaactgaaaatagatccaccatatgatccagcaatcccacttctagattatttagctgaaggtttgaaataattaattgtgtcaaagaaatgtctgaacttccgtgttcactgcagcactattcacaatagccaaattaaacaatcaacctaaatacccatcaacagacaaagaaagaaaatgtggtacatatacacaatgaaaaaagaagaaattatatcatttgcgacaacatggacggtattggagaatattatgatacgagaaataagccagaaagacaaatagacatgttctcacttaatatggggagcctaaaacaactgagctcatagaagcagagagtagaatggtggttaacagagaggctggaggacataggaggaatggggagacaatagtcaaagggtacaaagcctgagttagataaaaggaatacgttcgatttttttggacctaatgcacagcacgrggaatataactaataattgagtaccatacatttcaatatcactaagagaataaattttaaatgttctcatcacaaaaaatattaaatgtttgaggtgatggatatattaatttgcttgatttaatcattacatattgtattcataaatcatcactttgtaccctataaacatatataaccataatttgacagcatataatttaaaatttttaaatatgtctactttgttttcttttcagttgtacaggttttttacactgtgaatctttccattctacttgatatcaaatgaaaaatctgctgagaattctcaaaactggaaaaagctgagataaaatatctcaatatagaagggacaatgatacatacgtatcaaggccaatcagttagaagtgcacagctatttttcatgtactcttcagatcattgttttggcagacagcaggttctggagtcagactgcctgtgctcaaatcccagctcttcaactagtaggtttaataaccctaggcaagtttagtaacctctgtgcctcagttccctcaggaaaggatagtattatctcagaggaaggtcagttgtaagaattacatagtatgtctgaatttgggttctcctgaaagaagaccctgagatgggtcttaggatcaggtagcttgttggggaggtgaaagagtggagggaggagttggaagagtgagtcagggagggagaaatgccatgccagctaaggatgaactggtgggctggttatcatgctgagcacttgcagctcaatcctccaggggaatttctgaggaaccttatagaatggtcctcaaaactgtctctcttaaggatgagaagctgatgcgtttatacactaacttccaatctgcgtttgttgaggttcactcctgggagctttaacttctctgcacaaactggctggcttgttcactgactgggcaaccttccccagcttcagaagaagccgtgaggcaggaaagctaaggcatatacttgagagggaatgatggcctcaaacacagagattcccactgcagccgcactaaaaccaagctgatctatgcactgcggcttggggttcagaaattatctggtgtggggatgggtgcggtggctcaagcctgtaatcccagmactttgggaggccgaggcggggggatcacaaggtgaggagtttgagaccagcctgaccaacatagtgaaaccccatctctactaaaaatacaaaaattagctgggcagggtggtgcccacctgtaatcccagctactcaggaggctgaggcaggagaatcgcttgaacccgggaggcggaggttgcagtgagctgacatcatgccactgcactccagcctgggcgacaagagggagactcygtctcaaaaaaaaaaacaaaaaaaawgaaaagaaaagaaaaaaagaaattatctggtgtgatgcatgaaatgctaagcacagggtatgaaaaatagcatctgcttgaaaattctaattagtagtagtagtagtatcagaatcaacgctgaaatgtaaggaaggtaaacaccattcaccttttggatcctgaagactaaataatgttgacacatacccagatagaagattcaggcaatagtgcaagtcacagaagagcataaaataatgagctcaactaggattccacagggttctaggtgcccacaggatattgtggtggagagatctaacaaatagaggggaatttttgtctggaactcaagggagaatgagtgagagctggaggtggagacttgggaaccatcagtatctgcattaaagttcaaatattgatgtgtgatcctagaagaaggaaaattcattgaagaaaataagagggctaagaccagagcctcaggcaacagtggtatctaagggaacatgaaaggagagtgatgctggaaagcaaactcggtagaataatcctgccagggaagtaggaggcaagcaggagagggtggtgtcatgaaaaccagagcagagagaaagaggaaagtttccagaaggagagtgtgtaaagcagtgtcaaatgctgcagagactaacatgaaaacaactaaaaaacttaattacatgctttctttaggatgtatttgtttttaatggaatatgattttagtttggaaaagtagaaacaataagagtaatgaatagaaactgaagcacaggaaaatctattaaattcaattcaatgtgatacgctttttgagcacctatagtgtagacacagattatccaaaaatcatgcaaaactaataattraaaattctttaatcctcctcatctgtttctcttcttgaaaagtgggttttatggtatgaaaatttcatattatggaattggccgcaagctttaactctatttgtgtgcattacttgatcagcaagcattcctaactgctttttctccactagaatgcaaggcatgtcatctcaacaaaggaagctatgcaagccaacctaattrttaatacacccactggcttttccaaacatatgcttaaacgtcgtcttcattctgtgatttgatagcctagtattggaaaacaagaaacctcacttgtttcattgccataataaccaattgtcttttagctttatgacgaggcattggccactaggtggagaaagatacccagtgaccccctaggcaaagacatgaactggatttttacctccccggattcacttagtaactctctagacagtaggttgaattcagttgcgaacaaaagaaatctctatgaatggtaatggcaagtattccaggcacttaggggtcattactcttttccctggaatctatgctttcactatccaagaatgagtccctgcccttctgatcaagataaccctcagaatttgaattaatgagtcttattgttctgtctctcagccttgagcctctgcacagccccagrgaacacagcactagctacatgtgtgaaatagaaagaattattctcctccatcccctctccagccatggtgccaccctgagataccacctttgcccttaaaacacgtaaaccataccatccagaaatcattacatttttactggaaacttcagaaggacaaaaggtcttcaggacctaaaggaataaaactgttaagggttaagttttagaaccgcaactggcagactcataagccatcctaggacctgccttgatctagaattatagtaaatgtcccattatctttgaataactaatgtgaatgatattttataaagaagtctgtctctctagccaaaagacatttttgttcaaacaaattaaagaatttaattgcttataaaactttttctacatgctttatttctcaaacttttaaaatcagagcataatcttgttttttttctttctaatcttttcctctgattacacatctctcctatttttaatgcattaatcacttttacaaaagaccttaaaaatagacgtttaactatttctccaaatagttatacacttattattttctcatcccttatttaaacagttaggcatgtcyaaatatgtgagttatttgctgaaaaatattttcctactttccaattgatcagtgccggcagagaggaaaaataagaacagacataattgtttcacagacttcattatcttcttgcccaagaatattccagcatctgtctttttaaaccttgcattataaaaattaaaagaaaaaagtggaataatgaatgcacagagaggtgaataataaaagctaaaaaggaaactcagtggaattgaatgaagtaaggactacacggaaaatatctgatgaggtctcaaggctgcatctgaagaccttattggtttttaccccagactcgttcctttctaaccattggtcttttcagaattgattccttactctcctttcatctccagctgctgctttccctgatgttttggatctcgtaaagagccagtagttctaaaggtaaccattaactttaattattttatggagaaattgctatgattaacttagttgatacaaacattttgagatcaaaccttttactcagctagattacttcaaccttcaagaaaccatgccccatgcacatgtgcaaactccatgcatatatagaatcacaaaaatttagagtggagacctcaggcaggatctaaccccggtcccctcattgaatgccaggacatgaaagcctggcactgagaagcaccttcctccatatctcataatgatgggtgatgaatttcacccatgaaacagtgctcctcattcctgatccagtgctgatcccaagttaagatcttcctgatgtacagaggagttcagcctcaactgagtgtccttgttacactgatggagaacagcagaagctctatgatttctaccaccagaaataaacagmttagtggtctgtacagcttggatttctcwgacagtctggtcttcctacatgaggggctagcagagccattagctcaagcttcaaacatagacttttcaccttaaactccaaatgatattaaacatttagttacagaaagacaaaaatgggactgaaggacattctccacataacttgaaacttgggtccctcccaactttcaaccctggaactttcaaccctggatgaccaccctgtagggcaccaggatcttatgaataacacaattgtgttacatgatgcatcgcatgtgagcgcttatgttaacatcattgatttgttcaatgcaattacgtaaactatatagatgctttggtatttcactttttcatataccagaagacttagaaatgaaagggatctgacttttttggagaagctctgctaagagaagtacgaccaggtcatttgtgggaaaataggcaattcatctaataaaaacagaggcaccactcacaaatacttttgctctgctagacattctatttggagctttgtaataccataccatgaaataatacatgattctatgcaatcttcacaataccctatgacctaggaactattatcacacccaattcacagatgaggaaactggggcttaggttaagtgctcaagcacatacaattagtaagcagttaagccaggactagaaagaacccactagtggctgacaccaaagccacattccagccatgctggatcacctcccaaggtgggttaaaatttttacgaagcaatcctaatgcttcaagaaaatcatcaggaggtcttcacctcccacttaaggacctgtcaatcacatattaagttcttcccctcagctggtactgcccataacttaataacatagaggacatgaaatgctacagcttgtcctagagaggtatttgtgggagggtctacattatactgaaagctgaatgtcagtggcatgaggactaactgctgtttgacttacctgtgatcctacatcctttccccaggctttgtttctcactcacttctgacagtagccatttctggtccttgtttgcattataatctattgaatggtgcagttaggttgctcctcagtttttctgcccacttcaaaataataaccaaatcctgtttctgtttctttctccataaactctaaagaacaacatttttgtccaatattctctcagggcccatgataggccaaaccatctcaaagcctaaggttatgtgagttgctcacccaggactgggaccaggtaaagtcagaaggatgggagagtttgtcttcagtgcctctcttcacttgctctccacacaactgtcttctgttctgctcttcctggacctcttatgcctgcatactgccctggattcctgtagttagcttggtaatgatattactaatggccatatgtatttgtgtctgtctggtcacggttccttactcctccagaagacacctggaggaagtaaagccattggtagaatttcagaaactgcacacctggttggaaggcagtttcaggaaagagtggctgctatgacaggtaattgattatttgctcacagaagtaggcacttcctaaaactaattgttacatctcagaccatgcatggccaagtgtgtaccttcttccttgcatcaagatgaggaagcctaggaaagacagagccacccaatggagaggcctcaagaagaagttcagcccaagaggcagaatccagtgtctgcagggttcaaggctatagagaaaggaagtggtccaggcaagctgtcaacatcaggagcataacacaaattggcaggtgggtggaacaagaaggaggagattcaccctaaagcagtcacattcagagatgcgtagagaaaagaaccactggggagacagggctcagcagccaggctggggggaaggagcactgcgtgaatctctggcatgccgagggccagactagcacaggtccctgactctaaagggaccaagataccaggcaggtagcagagatgttaatttgactcaggaaataagacaagaatctatctcctgagtataagtgcaaggcctacatcccagggtaaaacctccctcatcataatggagatacaagttcaaggctagacttggtgctctggcccctagacagagtcctgcaaactcactggattgtagtcagggtagatccatccttaagatgtggagacaactggcccagcagctgaaagagcagtgactccaggttggaggtacgagatggggttagggagggtccatgtaacactttatgctaactaggaaaaggcatcccaagcagactgtggtaaacctgtggacacagtgcttggcaagtgcaccacatttttgtgttatttggtaagatgcctctcccagttggacctaggcctgcacaggcacagcctgatgtgtgggaagcagactagattctggcctcctccttcttcctcagtcaggcactgcgatggtaatgttaggtgtcagcttgactggattgagtcacctagatggctggtgaagcattgtttctgggtgtgtctgtaagggtgtttcaggaagagattgccatgtgagtcagtgggctgacagaggaagacctgccctcaacgcggccagcaccatccagtaagctacaggcccatttgggacaaaactggcaggaaaaggaggatttaccttccctactgtctctctcccctacagagcaggacctttttctcctccttcctttggacatcagactccaggttcttcagcttgcagactctgggacttgccccagcagcctcccaagggggctcttgggcctgaggcctgcactgtcagcttccctggttctaaggctttggacagaaactgagccacactaccagcttggagccatgctatcgcttctaagattctccagcctgcacttggcctattgtgggacttcgtctctgtgactccgtgagccaattcctcctaataaatctccttccgtttatcctactgattgtatctctggagaacactgagtaatgcaggtacccttgggcagtaaacaacctgtcaaacaatacccagcagacttggaaggcacagtgacttcacagagagaagattgtactggaaaggcctagaattgagggcaatggaagggttttctttctcccctctaatgtataaccaagcttcctactcaaaccctatgtgataaaaaaggagaatcaagcggaacctgcatcagtatctaatcaacagacttttttccctcctagaaagggcatttaaatatcaattcaagctaagaaaactgagaaactccagaataaatgctttggcaaaaacatttgtattccacaactttcttttcatagtcaagttatgttccttctttgtttttttccaggccttcctagcagagtttttgctgtctctgaccaagctgaaggtaagttggacagatgcaccattcagaggccaagttccacacagcagtttttttttctagaagtaacatctggctctatggctttttcccccttggagactcagcggctgtggacgtggcaggctgcttggcttgcttcacagctgtggggccacgtcccaagttcctctggcatgagctgcagctgtgcaacatctgacttcatccttccacaaccccctgcaccccttgcccttttacttgaggcagacccccaagaagtccaggcaaaactctggaaaacatgggatggtgtcagcactctggtctctggcccttggtagccattagaagtaaaaccacaccttgtagggaccagtgttctgtcaccatgttgatggtttgaggaagagattaaactctttggtcaggaaagacctgggggaaaatatgagtttctattcacaaaggagatgaaaagaaaaatctttttggagagtggggccttttctgtcagtgagacctgaagattaaaaatgaagagaagagcctataaagatacttatgaaagaatggagagcaaccgtccctaaggatccagaaatacctgtgaattggaaggatttcagttctggtaattctttgaaaacaacgctttcattttctaagtgatacatcctcattaaagaaaatatagaaagagaaagaaaaatatatgtacctagagagaatcacacttcttccacccaaactcagaccatttggggcattgccttctttcccttttattcttgtttatagaattctggggaattgagcttacccctaatcatacatgatatatgtttatatatgtacaatattaaattatacaagttttgccatgtaattaatgttctttgtaacaacttttaagggtggcataattgaacagttatggcaattttctagatctattataattctgttttaatagacactaaagagacattttaaagaagcaaacaaaatcagtaaraagaaaacctggatttaggcaataagaagaaagaaaaagtaaactccaaggtttatttatatagcccagagattagcaggatggtgatatcaatagcagaaatattgaagcaagaaagagcttgagaggttgcctagttcctggctactcaaagtgtagcccatgaaccaccaacatcagcatcatcagggagcttgttagaggtgcagaatcttatcctccacctcagacctactgaatcagcatcagcatcttaaaagggccttcagatagttgatatgcccaacaaagatcaagaatcactggctcaatacaatcccttcccccaaccagagatgtaaagtctggctgcagtcacacagctaaatagtggagatctggtctttggttctattaaaccaaaatctattttattcaacctctagtaataataatacaaaataatatttatcaataactaagtgtcaggaatgattctaattgctttatatttaatgcttacaacaaccatgttagcatccctttttatgatcaaaaaactgagtttcaagtaacttgcccaaggtcccatattaactggcagaactgagattgaaccccgggtatctgtcttcacaktttatactcctaaccaccaaagtaaactggrtgatggatggatggatggatggatggatggatggatggatggatgaatgggtgggtggacaatgggccactttgctgtactttagcctagctaaactgacaagcatacatttaagtatgttagggatatacttaagtatgtatgggacagtatgcatagctatatgaatttgaaacaaagaagtctagttccaaagccctcacctgctcttaaacagtcactacaccaaaactgcaaaagaaaacagtatgctagggttatccttaatggctgaaaatcactataggacaatgtaaggagttttacatctccaacaaattggctatatgttaggcttccctctatyggactactattttttgtttacctatgagtatcttctcccaatycattcattcatttcaatctttatcatacctatttgttcattattagttattatgtggctgctcaagaggttgtgatgatcaaagcagacagtccctaccctcatacgatttgctaaagggaaatacaaagattaaataaataattgcacaaatatacatttaacttcaagctgtgctgtgaaggaaaactacatagctgagaaaagacagcagggggtggtaaccttgccttgaagtcagtctcactcttctctacccatccctgcagtttcacacatagttgaccttcttctgtcattgtttattcacctaaatttcaaactcattttgcaaatattcacattcttccaaaattacatcattccctaactcctcccatcaaattcagcatctgtactagtttcctactgctgctgtaacaaattaccacaagtttagtggcttaaaacaaatttattagctcacaattctggagataagaagtccaaacggacattcctgggctaaaatcaaggtatcagcagggctagtttccttttggaggctctaggggagaacaggcttcctcggcttttccagcttctagaggctgcccccattctttggcttgtagcctccttctactggcaatttcattactttgatctctacttctgtcatcacagctccttctgtgactctgattctcaagcctctctctttcgcttataaggactcctttgattacattgattccacctggataatccagaataatactctctatctcaagatacttaatgtaatcacagcttccaagtcacttttgacatgcatagtaacacattcacaggtccagaagattagcatgtggccatctttggggccattattctgcctatcacagtatgttccttctttctcccgtgccctgttcctaggctctgtctcaatatattcccttcatcctattacccactgtgtccttctcattctttcccctcataataaaaccatataatggttccagtaacacgtcagccaaacaggaagaaggaagcataatgggtcaatccctgagccatgacttttccactgaagcataaccactcctttttgttttgttttttcaaacaaagctattgtcttggatctgattttctaaaaatcaaaacatcacgtttcctggttcagaatgtgcctacaaaacaataggaggctatcattttttccaggtaacttttataaaggaaaaagttacattgaaacagttcattatattgatatagacaatgagaaggtcaattaggaagtatatatccaaagcacattcaattccaaaatctatcctaaaaaaagtaattagggataggcacaaagatgcacaaatgttaatgatgaagagtagagaacaacctaaatgttcaagattacagaatcaattcatgaattattacatatcctgtgcagagggccactatatagcctttaaaatgatatcatggtacatattaagtgacatgaaatagagtagcgacmtcaattttcagaacaatacaacatggttgattaatatatattacacccagttatattactaagattatacccagttataaacaaccwcagggagttttatttcttcttcttttggctatggttttctaattaccccactgtcatttacattactaagccataaaaaagcaaagtaggatttactgatgaaaacacgtgaatatttaaaattttttaatcatagcaatagtaactagaatgcatttagttcttaggagtttgaaaaccatattctcatgcaaactttgcatccccataaagtaatctggacactaacaaggaatatttatactcaaaacaatcggtgagaatccacacagcttaagtagcagaaacaagatcacccttctcccgttgcctgcgatgctcttgtctcagagaccgactgaagctttttcaatgtgccacacttattgtcaatgtagggccggtacattggctcttccctgtgcctggaaaactcttcccacagatcttcacagagctggctccttcttattacataagactcaactcaaatgtcatcttctcaaagaagtctttcctcaccatctggtcgaaaatgtttctcctaccccttctcctagtcacagttttcttcatgacgcacatctgaaattatcctatttattacattgtttgctcatgtatcccttgcttctcccgccacccacccatcaccactaccacctttaccctcctaaaatgtaaagcacatgaaagcaaggctattttttgccctgtttaattcctagaacatgtctcacatacaggaggcactcaatacatttttgttatataattatcagtacaggttaactctgaagaaactttatctgttgcattatagaacactgattataaaagggwttttaaaaatattttgtaacattcaattccttatcatgtacttttttcttttttaattgaattatgacttacattaaatgcacagatcttaaatgtatagtttcataaattttgacaattacaaacccacttaacccacatcccaatcaagatacagagcatttcagttgctccagaaagtttactttgcccctcctattcctctccacagaggcaaaaattattctgatttctagcacctagaatagttctccctgctcttaaacttcatataaaagaaataatacaatggtatgcttttacgggcggggaggctggctactttccctcaacattatacttctaagatttacccatattgttacatttagtcataattatttattctcattgttgtgtagtgttcccttgtataaatatttttctattatttttctatttttctgtggatgtatatgtggtttattctcaggcttttggggctattacaaataaagctgatatgagcattcttaaacaagtcttttgtgacatatattttcattctcttgggtaaatacccaggagtagaatttgttttaaaccaatctgcctgctcaatgtagccacacaagtatgcttaggcaacaggagaaccacctacccaatccacagaatcagaacaaattactgcattttgaattggttattatgcagcaatgaaaactaaaaaggtatttaatctcatgttctctggaacaagattgcctggttttgaatgtcagctctttcacttaccagctacttgaccataggcaaggtattcagcctctctgcggagtcagatgtccaacccttattcctcatccacgattttcactgggtacgtgactatccagctagattacatttcccagcctctctcacacttattaaccacatgactaaagaatgtgagctgaatcaatgtgtgccatttcttagtctggactttaagatattgggcatgggcttcttcatacccacttccctttctaaaagactgagacatagataggctcacaatctacttttaatcatgcaaagacaaagacaatgtcctagaaaatgatggagaaacaagatgtaagagacattgtttctttatgactacatggagtagagctgcccaacagtgtaggctccccagactaccagaagcttctctactytttaagccacagtatttttctgtttctttgttacagtacctttccttttatcctaatatactccctatgctttactttaaaataatgcttgaggtcaatttgaaattggttgatgttctcttcatgaagtggaaataataggagcattataaagttattagagtctgtcaatactcccatacaggaaacatgtctttttataattgaatacaataagatagtctaccaatgtacaagaaaatttcttataattcagtatataccacaatatagtcaaggctttaaaaagtttctctcattytgactttaatagaaaagtattctaaragcagtactcaaagtattcaacccactattgggctaagattwgttgttcatgttagcaatgtatatttttgaagtatccaatctcaatgcttgaccaaatgagatgaagtccttgttttaatttggtttttcacaacttctaatttcctaagattaaatgaggcaaattgattttttctttgccagatttgatatactattgaagagcataaagacctactttctatttcgtggtctattcctttaccttgatggtcaatcatgaagacaacatgattgagtgaaataaatttctccttactgyttttaaagcaatggtgctcatttgagtattggacaactagaaacataggaaaaagtagacaaattttatgggaagggattaagcacaaataccttatttaaatattcatgcttaaaaaagaattctctctgaaatctctcatatttagagtagttcttatacagcaggaattttgctaaacttgttgcaagctttgagcagatgtgaaacaaagcaaaatgtgacccaatgttaccagagtctgaaaaattcacagaactgtgctattttacaatagtctgccaaaattcatattgaatgactcattagaagtttataaaataaaaatagataaaatatgcataaagccttacacacagtatacataaagccttattgctttttcatgttttcatagctgttacagaatttgttttaaaattgatgctaacgtgcctgagtgaataaccatttaattcaagaataaaatgaaaacaagcttagttgtacatttcttcatgtatctatacatatgagtagattcttgatgtgttaaggcctgtttcagcagtctaagattaatcagtatgggaaataaaagacaaggaacaaaagccaatactcaattccaagatattaggaatattagaatccctgtgaggggagaagtcaatggtaatttatgtaaaataatttggagatacgttgaataataatcaggcaaactctctttagaatgaggttacaagggacagtagggctggtacaaagacaatatattttcttctgtctacaagaatgggctggaacctcatcaggaatatgaactggtaccatcacccttccaatttagacctatggtttgattgagatatgtaaacaaatacatactagaagttaaacaaattaacactagtcaccccaccaaattcagttcgcttgcacctagattcctaatgcatatttctactagaagtctggcaattagcaaaccaggttttgagttgtagatgttgcttttaagggaaaggttttatcttcaactttaactctttcagattacttaatatttataaaggaactaattatgactttacagtgaggaaatctggcaaatactacctcaaatgagtgaccaaagttaacatcaccaataggcgaactgacatatttgcctcttgacattgtatactgaaaacatagaaccctaactttttttagtatgactacccaaaattaatagcctgaatctaatcgtgttatgcatcaggagggaacatcagataaaataaaggactttttacaaaacactggtctatactcctcaaaaatgacaatgtcttgaaagacaagggtagagaaactatccaaattaaaggaggtttgaggagacattaggactaaacgccatgcatgatcccaggttagatactctactagggagtaaattgctatgaaaaactttaaatatggattgcatttcatgaaagggtatcattaaaatgttatgtttcctgaatttgataattacactatgactatataaaagaatgtctccatacttaggaagtacatgctttaagtaaaatacaggcttaagccaaggaacgcaatgactgcaacctattcacaaaaggttcaggaaatattacatagatataaagagggaaagtatgatacagcaaatatgataaaatattaataattagtgaatctggataaagaatttataggagttctttatgctactcttccaactcttctttaaatttttttttagattttaattccagtaaatattttattagaattgttcttctgtttaataatttcaacttctattttagattcagggggtacatgtgcaggtttattacatgagtatattgtggggtgtggaggtttgggtagaatgaacccatcatctaggtagtaagcatagtacccaatagttagtttttcaactcttgccccctcctaccctcccccacagtagtccccagtgtctattgttgccgtctttatgtgatgagtacccaatgtttacctcccacttctaggtgggaacatgtggtatttcattttctgttcttgcattaatttgcttaggataacagcctccagttgcatctgtgttgcagcagcggacatgacaaaaagacacatgcacacatatgttcatcacagcattattcacaatcgcaaagacagaatcaacacaggtgctcatcaatagtgtattgcataaagaagatgtggtacatgtacactatggaatactacagtcttctttaaatttaaagttaaatttaaaagcatttaaacttaactctaaacacatgaggttattaaaacttgaaagataagaaaagtcatcattgctttcaacacacattatcttggtaaataatgttggtgagttccagaacttaaaaaaaatgatgtttatctcttggtaacctaataacacagataattagagctattcattaaacagctagttttaactattcctacacatgtttgaaatggacatttttcagagtgcttttctttcacagtagttccattggaaatatctgaggagtgagaatgttttcagtggacattgtcaaccacttaacatccagaaagctaaactttgaatatcataaacgtttattataaggtgcactctaaatccaaagaaccatggctcccctacaaattcattccctctgtattactgggcgcctgttatgtgtctggaactaagtcatttgcaggccgtcttaaaccacatccatcatttccagtaaactagcagttcccagacaggtgtctctaggtcaggcctctgtccagagctgcagagtcacatgggccacagcctactgtgcagcttcacttagatgtctcacaggcatcttcacctgtacctgccaaactaaactctcatcttccccttcaaatctgcatatccttccatcttctatttcaacaaacattgaatctttttagttgatgcagggagaaacatgggggtcacctttgcatcctccatcttcctcttattcacattcaatgagttcaagtcctactgatcctatcctctctaaatatagcaattttttttttttttgagatggagtctcactctgttgcccaggctggagtgcagtggcacaatctcggcacactgtaacctctgcctcctgagttcaagcaattctcttgcctcagcctccaaagtagctgggattacaggcgtctgccaccacgctcggctaatttttgtatttttagtagagacgtggtttcaccatgttggccaggctggtctagaactcctgacctcaggtgatctgcccaccttggcttcccaaagtgctgggattacaggcgtgagccaccacaccaggcctttttttgttctgttttgtttttgtttttgagtcagagtcttgctctgtcgcccaggctggagtgcagtggcaaaatcatggcttattgcagcctcaacctcctgggctcaagtgatcctcccctctcagcctcctgagtagctgggactacaggcatgcaccaccacacttggctttttttttttttttttttttttttgtggtagatatggagtctcactctgttgtccaggctggtctcaaacctctgaccgcaaatgatcctcctgccttggcctcccaagctgctgggattacaggcacgagccaccatgaccagccataaatatatctttaatccatctatttttctcatttccatctaagagaggaaagtaagcttagtggtgaaaaatatgaattctggaatcagattacttgaattgaaatccaagctgcaatctcctaactgtgtgaccttgaacaagttactatgcctcgctgtgcattagtgtcttcatctgtaaaactgggcccgttaatggtatccatattataggattcttattgtgagtactcaataagtgttcaatatcactgtctcctttgccaccactccagtccaaccattatctctcaactagaccagccttgtattgatctctctaattctgcatttgtgcctctctaacctacatgacaactagaggatctttacaaaacactgctggaagcatgcaattcccctgcttaatgcctttcagtggcttccctttatccttgaataaaatccaaactttttttcaaataccatatgtccttgcatgacctagcctagtgtttctccaacttttgacagctgaagaccacatgatgggtattcagttgacacagtgctactaatttcaggttaaaaaaaaaaaaacaaccaaaggcttatcctaatatgaagtaataaactgtcacttaaaagtaaaaatgataatggttatatataagtaagaagaatattgtttataattttcaccaaggcatccagctccacataaacttagtttagtttacatctatgcatagacggtttattttcttatatttatttctaataaactgtaaaatcataaataacaattatgggccatcagcaatgacaatctagggtgaatctgtcagagagttcataactgaattaagcagaggacccaaaaagtataggtgatttctcactgaagatcactttcaaagctctgtcagatgctaagaaaggagtaaatcacacaaaacagaaatgttagtgatttgaaccaattcccaatccagtctgataacattcaatcctggcagcatttcttctggttctatggtagcatttacatatggttttcgactaacccgcaataatagacaatcaatttgtctgggacctagcacatcatcatgtgctaggaaaacaaaactcgtagcaacagagcccttttcattgtagggcagtctttgcaaaatgatatgctgtcattttaccttcamcattaaaaatcaccatacaccaactttcaaacaatcaatcaggttgtttgagattctgagatgactaagatataccacttgagcaaaccacttaaaaatgtatttcaatgatataacactgtcattatcagatcatcatgaagaaatgttggcagggcgcagttgctcatgcctgtaatcccagcactttgggaggccaagaaaggcggatcacttgaagtcaggaattcaagaccaccctagataacatggtaaaaccccatgtctactaaaaatacaaaaattagccaggcatggtggtgtgcacctgtaatcccagctattcgggaggctgaggcaggagaatcacttgaacccaggaggcagaggttgcagtgagcaaagattgtgccactgcactccagcctgggtgacagagtgagtgagactccatctcaaaaaaaaaaaaaaaaaaggaaaatatgtttaaattatttcctcattgcaaaaacttgtatttattatgtttatggtttatttcttatctcctcccctggaatgtatgctccacaaaggcattgtgctttttatctgacttgttcaccacaatgtcatcagaacctagtagctgctcagtgaatatctgttacagaaatcaatagatctatggtaaatgactctggccattttcccaaacctgtaycatagattttaaaatcgtataaaaattgattagtaacaatggtttttattgaagatcaagtgtgatatggtcttaaagattcagacttagacttgaattcctgctccatcacttaacttaatcactttgtgactttgagcctgagcctccatttccatttcaaaacaatggaaatcatgacacctacctctgtaattattgaaagaattgaatttgataagtgtgcacaatttctcagcacaatgactaacacatactagttattcgttaaatgttagtaagctccatttcccttttctctttcctttttgattacagtcagagttacttcctctgtctgacaaaggctgagcagggctggcaaaggattttattttgcatgtcagtcagtatgtgttcactgcctggaacactaggtgaagaagaatttggcagccatgtccagattcagcaaatcagccccatgatatccaccctggcattggaggggagaatgacagcacccgagcagaatctaccatcctggatttatagactcacccaactgcctcataaaagaaccctctactcctcaaaatactcatttgatttttcaagcataaccatgagaggagctctgttacacaagcatcaattatagaattatttcacaggttaaggaaggtttaaggaaagacggtggaaaatctatatttctacaaaggcttgtcaaaccaattgagctgtcacttcattttatgaagtctgctgctttcagtatatgcaggcctgggtttaagaccatggaggtttagctaatcaggcttcacaaatcctatgtcctcaacaggattttgaaaacccacatttactagaaggaagcttctcccagtgacataaagaaaatgtcaacatttctgtaaaagatcttcagtccagaataatttaggattaagtattgtattgatcccagtggtgtaaaaaatactaagaataagtgcatgagacagrtgttaactgaagaaaaaagttttagaaatggttataattactctcctaagtattcatcaagtggactagggcctgtaactgtatctcttatgtcctcatagtgtagagaatgtgatagcttaattttttaagtatgtattatgtccaaaatatatttcggaggaaggaagagactgaaaatgatacttagttcttttcttttagttgtaacaaaggcagttaacttgtctaataataagcttttgtacccaaagtagaaggaaatacacatttcccatttgcaccaaatttacctaccaaaaaataaatatatcaatcaataaataaaaacaaaacaaaagattagttggcttctgttctatattaaatcaagaaatctgtagctacagatatagtcattatatccaagcaatgaagtttcacacttactcacagtcccaatactgttttgattacgcaaaaggtagccatgaaaatgggggagaagatattaagcagtcatccttgattaagaaatagttgcaatcagctgcagagatgacacagtaagaagtacattgtgttgtcaacaccttcagtaagaactaaggcatgtcaatagtaacctaaagtacaaagtggaaactgatacagcaaaaaacctgcaggagacatggattgtagaacatatcactaaacaccgctacatgttatggttcctaaataaacagccaaagattaaaaccagagggtgaaaattcagcacagaaccacccattgcttgtgacccaccatctattcttaatatagccaagtgatatggtttggctgtctcccaacccaagtctcatcctgaattatagttcccataatccccacatgtcatgggaggggccaggtggaaggtagttgaatcattggggtggttactgtcatgctatacccatgatagtaagtgagctctcacaaaatttgatggttttataagggtctttcccccttttttcagggtacttcttgctgccaccatgtgaagaaagatgtatttgctttcctttccaccatgactgtaagtttcctgaagcctccccagccatgctgaactgtgagtcaattaaacctctttataaattacccagtcttggctatgtctttattagcagcatgagaatggactaatacagtaaattggtaccaggtagtggggtgctgctataaagatatctgaaaatgtggaagtgactttggaactgggtaacaggcagaggttggaacagtttggagggctcagaagaagacaggaaaatgtgggaaagtttggaacttcctagagatttgttgaatggctttgaccaaaatgctgatagtgatatggacaatgaagtccaggctgaggtggtctcggatggagatgagaaacttgttgggaactggagtaaaggtcactcttgctatgcaaagtaactgtcagcattttgcccctgccctagagatccatgaaactttaaacttgagagaaagatttagggtatctggtaaaagaaatgtctaagcagcaaagcattcgagaggtgacagagcataaaagtttggaaaatttgcaggctgacaatgccgtagaaaagaaaaacccattttctgggagaaattcaagccagctgcagaaatttgcataagtaacgaggagccaaagacaccaagacaccaagacaacagggaaaatatctccagggcatgtcagagaccttcatggcagcccttcccaatacaggcctgaaggcctaggagggaaaatggtttcatggcctgggcccagggcaccccttgctgtgtgcagcctcaggacttggtgccctgcatcacagccactctagctgtggctaaaaggggccaatgtacagctcaggccattgcttcagagggtgcaagccccaagccttggcagcttccatgtggtgttggcctgtatgtgtgcagaagtcaagaattaaggtttgggaacctccacctagatttcagcagatgtatggtaatacctggatgtccaggcataagtttgctgcaggggcagagcccttatggagaacctctgctagggcggtgcagacaggaaatgtggggtcagagcgcccacacagagtccccactggggcactgcctagtggagctttgagaagaggcccactgtccttcagacccccgaatggtagacccactgacagcttgcaccatgagcttagagaagccgcagacactcaatgccagtccatgaaagcagccaggagtgaggttataccctgcaaagtcacagggatggagctgcccaaggctggtgggagcccacatcctgcatcagcgtgacctggatgtgagacatggaatcaaaggacatcattttcgtgctttatgatttgactgccctgctggatttcagacttgcatggggctggtagcccctctgttttggccaatttctcccatttggaatgggtatatttacccaatgcctgtacccccattgtatctaggaagtaactgacttgcttttgattttacaggctcataggtggaagggacttgccttgtctcagatgagactttggacttggacttttgggttaatgctggaatgagttaagattttgggggactgttgggaaggcatgattgtgttttgaaatgtgaggatatgagatttgggaggggccaggggcagaatgatatggtttggttgtgtccccatccaaatcttatctcgaattgtagttcccataatccccacgtgtcatgggaaggacccagtgggaggtaattaaatcatgggggtggttacccccatgctgttcttatgatagtgagttctcacaagaacttatggtttttaaagaggcttttccccctttggtcagcaattttcctttctgctgccatgtgaagaaggatgtgtttgcttccccttccaccatgattgtaagtatcctgaggcctccccagccaggctgaactgtgagtcaattaaatctctttcctctataaatgatccagtttcaggtaygtatttattaacagcatgagaagggaccaatacaccaagtaaataatatggattctatagccagagggcctgtgtgaatcctggctctgccacttcctagctgtatgaatttaatatctctgtgtcttggttacctcatctgtaaaatgacacgttaattatacctatctcatagagttttggtaaggattaaatatgttaatatacgctaacacgtagtactagaatgttggccattattatcatgatcatcattatcactactactactattattatttttcactctcctcctaacgtcaatatctggagtctcctctctcacccacatccctcatttttagcataggggagatatgctgatgggtttcagtcaatcaggccccaccttgggtgctctttctgtggttcagtgggcactacaggtggggcctgattgactgaaacccatcaacacatctcccctaacccaaacaaggcagagagaaacctagcacttgtgcaggaaatgcagagatgctcattctcctccttacagggctgggttgctgaagatgggaagcttaccaccattgtgtgaggagtgactggtatgccaaaggcccacttgtagagcttgaggatggagccaacccagaagtgagagccaagaaaaaatcctagtggcaaaactgaatcctagataagccaaactcaaaagccagcttccctggaatgttcatttacaggactgtaaatcactgctatggtctgaatgttatgtctccacaaaattcatatgttgtaaccttatcaccagtgcaactgtattaagtggtggggacatttgaaggtgattaagtcatgagagcatccccgtgaagtcatatccttatgaatgggttaagtgcccttataaagatgtctaagggagcttgttcattccttctgccatgtgaaggcattgtctaataaaaacaggcactcagccaggcatggtggctcacacctgtaatcccaacactttgggaggccaaggcaggtgaatcacctgaggtcaggatttcgagaccagcctggtcaggatggtgaaaccccatctctactaaaaaaatacaaaaattagctgggtgtagtggcacatgcctgtagtcccagctactagggaggctgaggccgaagaatcacttgaacccaggaggtagaggttgcagtgagccaaggtggcgccattgcactccagcctgggtgacagagcaagactccatctcaaaaaaaaaaaaaaaaaaaaaaacaggccctcacctacttctgtccatggctactggggttataaacacggaagaatttaattcctttctttcttttgtcctaggggttttcatagatttgtttgaaggtgtttttcatacccacccccagccccgactgtttcttccacttatcccattgagggttggtccccagatctttcctcccagtgtctcccagttcacctcactctgaatctgctggcatcatgttcttggatttcccagcatccaggtgagcaataaatttctattgtttgtaaatcgctccatctaaggcatttygttatagcagcccaaatgtactacatcaatctcttttagcttaagctagttggggtcccattttgttccttaaatctattatgtattcataactatgttttatgagatgtgggattattatatttttaatttaaaagacaaaaagtcattatttgatacagatctctcaaaagtctacacaagtgaggccttaagtgacttggatctaggtcttaatcatgtaaatataaaatagtagatttgaagagaaaatcaattcaaattataatcacatgtgcccagaacattcctccagcctttcatagttttgataagcaaacatcgagttgttaagcaaatcatctctatatgcattgtgtcaaatagcacatgaccaaacacagttcccaggacttctccatttttctttcatatatcagtcaggactctttcaagtgcacgtaatgaatatctaacctaaatgaatttaaaccaaaaaaggaatgaattgcctcattcaaaagggaaatccaagtcccagggctcaaattgtgtgatcaggtatattttttctctgtctttcagctgtttttctgtggtgtagcagtaaaaagcatgagctctagcagtaggctgccagatttcgaatcctgggtccagaacttgttagctgttttacactaaccttatcaattgacttcactttgctttcagtttttttaattataaaaatgagaataataataatgtttacaacctacgttttggataaaatgagttcaaaaatataaactcttttattatcatcattatcagcatcaggcaatctctttctacctggtggcaaagatggccccgacaacagcttatgtgatccttagtgcgaggaattccagggggcaagagcacctctttccagagagcttcaggaagagctccggcaacaattcgcatttgccaaacctgaattacatgtccacccctggatcacagagtggggtcagcccccgctgagcaatttggactaaaggtagaagagaggggttcctcaaagggaaattggagtgctatcaccaaaaaaggaaagagatcatagacacaaacaactatgttcactacagagccaactacaccctgattagtaaaatggtaaataatagttgttgctgttttacacagtgaacaatagtattcacgagaaggacacagcctgtaagccatgttttaagaaaattttctttattatttgggaagttagatttgataattgtagaagtcctctccagattcaatgaaattaaggtttagaaagatcttgagacataataaaaaaaaaaagaaaatacaacagaaataagcctttgggtatgtacagagtgggcaggtattactgtgacggctcctcattcaagataacaaacaaacggcagtactcgatctttgctgtcattggaattagccatgaatgctttatggatatggatagctttgaaggaaggatcatcttccccttgatatggaagggtgacctaaagactggatcagagggcatatgtgaaatttacaaaggccaaatcattttaaccatattgcctattttcccattaaagtcagtaaaaatgatattttatcatataaaattaaagtgaaaagaagttacctttccacttccagagtagaaaaaagagatacacatttcatgaaatcagttataatttttcaamttttctgaaaagtgaggaaagatacaaaataatctccatayataatatggtcaaaaccaatagaarcaaattaaaagtcactatttaaccttgttgaagtgccacagtgctttttgtaaatcagtacagtcatgaagtggaaaacaataaaaggagatttcataaaatgtgtgcctggaaaataaacactttgcaagaattttgcatgttaataataaggtaggagtcttttctggggcacttaacctgaaggccatgtgtggcaccatccaccttctgtccatggctactggggttataaacatggaagaacttaattccctttttgcttttgtcctgggggttttcatagatttgtttgaaggtgtttttcaccgcccccctcctccccagccaaagactgtttcttccacttatcccattgagggttggtccctaaatctttcctcccagcctctatcaaatckgagatttgagctgtggtctcattcaagccctagtagctttcatgactctcttttttctgatacagatgatttctagatacaaagtaattagcaaatgaactgttaatgaaatctgagcagacatattcagtccacagaatagaattacatttctttccacatttagtgcttcaccaacaaggggttggtcagcaaccagcaggctctcagggaaacttgtatttgtgtaatccagtccagtaaccaaaatgcctccttgaatacaacagagcacaatgtccccagctactgttgaggggccttcaagtcctccatctatatattaattttttatgacattgatgctaccagagcatcataagtagaaggcacatttttagttgttttcttagcagaagtggaaaatttccaccaatctgtcttactctcccaagagatccttcatacaaaaaaggaaaagaggttgtgacttggccccaatccacggaagttcagcctgtagcacagacatgatgcttgcccaaccagacgatgaccaaccctatgactttagcctttttggacccatatcactaactagaggaagtcatcaccaaagatctttgtctgactataagatggctatttctgcaagctattccctgctctgtggccttggtggaggaacaacccagactacctcaacactaaactcttctcccttctaaagcacacccctccaatcggaagaacaggaatcaataggaaagttctttctaaactgttacctcgcttcagattttctgcattaacggaacttaaaagtctctaatttcctggttcccatagaaagagacaaaaaaggtcagataaaccacaggactctcttcctcagagacagggctttgtattcagagttaagggatgcaataatgaaatgcagaaaaaacacacacacacctttattattagtggccaaatcagcctcttctttcctaggaaggaaaaagatgtcccatctgcctgtggcttgcaagtcacctacatctctcagaattaagagatttggggaaaaaaacagaagtcttccaagtaagaaaaagaaagccatttctggaattataaaaagatcatgtccaagaaaatgtaactgatgtkatatgatgtgatgtgatgtgatatgatgtgtgatatatggcatgatatgacatggacaatagccagaggctgggtgcaggtggcctcacagaagaaaaatgcagatacatgagcatccctgacagcaatgactcactccccttggggaggggtggttccagtccagactagtcctaggatggcctgtccagttttagcagtgcccctactgatcttgaggtttaggtcagtgggagatttaggtcagaacccctagaactacatagcccctcctgattcataaccatcaccagtaaaggccagactctcacattagtcccagaaagggctttctctggagtggaaactcatgacgaggcagggcatcctggaattatcagaatcacagcacatctcatgttcctaaga[450 bp omitted]atggtcttcatgccacttctaaatgcatacctgtcaacctttggaattgatggacattattgaccatgctacctgggcaagcaatcagaattctgtggactcatggacctataaaaacaatgatgaattgtctttattttttttcaagattctgttattctggttcagatccaatttttaatatttaaaaagatttagtttcacatggacaacatgatccacataatcaccaggctgagatgttaagaattttaacttttttgccacttttaataggatgtctcaaaatcttttctccataaatattcattttggtgtgggtgtagtaaatagtgataaaccatgtttgttttgagaaatatagccaacattctcaatggtcataacccatctttgcatataacccaatctggcagatgtaccaatcctttcagttagaggtaaaggatctataactagatacttcaagtctcccagatgtcttaattcacagttcacatagaaatcagaatggatttaaatgtctgtgtctgatggcataagatttaggctataagtagatatagcaaaatttcacctcaatccaatttctcaattttttcctagaccaagtactcactgggctggggcatgttgtagtgttgggataaaagcttttagttgaccagggtagacgggcatgttttataactccatgaatggagtaccatgccacattcactgcccaatctcagggacaaagtcaaaggaagaaccttctcaacattctgccaaatacatatcatcactgtgctcattaggctcagcgtgattgtgctcatcttcaggatgaagtcttgtcactgccaatcactcttttatctgcacagatttgtttggctgccaccttcatactcaagcctcttttctagaagcaaaatataagttttcacatagtaattttgttatcacatattctaggtgttcaaggtaggctaaatgagaataaaattatayaaatcacatgaagtcrtaggtgtcttcaaatgcttcagaatggcactaaacataaacaattcaacttccatattgcaaataaaacctcagctaaatgatctgtggttgccacacaggctgttcaccaatatttggtcctctcctttctgatacatggtaggattatacttctgacccccctgttgaacccagcatgtcatttgctttgaccaacaaatatragcacaagtgtcacttccaggaggaagccttaagagtcaataggatgtctcaaaattttttctccataaatattcaatttggcacgggggtagtacctcttcgtcatattcatttcttcctctaccatgatgatcatcaatattctcaatatgactgctctatcggcctagatccctgaataaagatgataacaatatacaatagagatacaatgtgagcaataaatatactcatttagcttcagggattgtttcttactgcaacagaacctgactgatacaccataacttgactgaaacaccatccctttataggaaagaaaggcttggacactaagcactgtgataaatgttactataatccaaaacagaagaaactagagactatacctattatatggcagcatatagatgatatgtgggtatatctattacagacttttctcccatctcacccctcatcaaaaaaaaaaaattctcaaacatttggataatctgaactcttcaaaatcaatgttcaaaaaatgaaagtgaaaaaaacagagttccgtcattttgacccatttgtcaaaaatcatttgcagagttccacttcttttctaagaccaagcacattaatcaaatacagagcttcaaagggacttcattttgagtgaccaaacagacaaataaattagctgcccatggctcctttgtaattgaagaggacccgtctgacccaaggggagaagactaaatcaaaaagcaaaacatccaagtaaaaacagcatcgagggccttaaacaaaccaaaaagccatcctataccctctcctgtccaagggtgttaagtatgagccaagcacatgtgtgtttatctactaataagagaatgcaaacatcccacatgtgattgatttcttatgtgctaccatcataaaaaaagtttgtgtctggaatacatattccagacatgtggcagtttataaacctgatcatacatattatacctacaacttacaaaactttttctctttgaaatgatgtgactctggaaggttttcttctttatttctgggaagaatcgcttaaagtttctcatttaagtaaagaactgctcgtttttagtttgcagagcttttaactagtgactcagtgaagagtgatgtcatatgttatcccaggactgccggtgtggttctctctgctcgctctaaccattccccctgcttctgtggcaggcagtaatccccgctttccatcctctagtcagcttcytcccagccagccacaagcgaacagsctcgcaagcmgcggatgaaacaggaagtctgacagcttgagtctgcagtgggacccctagtgttttcccactccatgtcctggcatcgttccccagaagtacaaacacacacacacagagctcccattgttgcagccttcctcagcccactgatcctaatatggaattcagcaggaaacccatgatttcctgacactcggcaagctggaggaagcaaagggaaaaaaactccattaaaaagcccagctttcctccatgttagatgtgacttggaaaatgagaaagatttagcaaaattccaccgtrtcttttgccaggctagagacagggagagcagagtaaaaccctcaggctgctgaaatttctaggctgttaggaagcccctcgaattctgtgaaaatgagggtttcttaactcacactgagagcggaaaggggcagacccttttcataactccctcaagtgtgtgttacctttctttaccagcatggtaagcaacaggacatatcccagcctcggacatgtctgtatgatccaaggtacccaaagtcagacagagtaaactcaagcctggcactggctttctgccgcttcatgtgctttggaaaaagcaggagaagcaatagcagcaggagtccccagcagctggagccgcaagaatgaactgcaaagagggaactgacagcagctgcggctgcaggggcaacgacgagaagaagatgttgaagtgtgtggtggtgggggacggtgccgtggggaaaacctgcctgctgatgagctacgccaacgacgccttcccagaggaatacgtgcccactgtgtttgaccactatgcaggtaagaaaaagtgggaaactctctgcatccagacaaacgatgcagggggcgagaccctaagttcagaggggcctggctcatttctaatgtcagtattgggtgcgggcctggcagtaaccagggagcttagcgtagcatacaacccaggacttgactgttggtagaacaatttgtgcatcaatgtgtatggtaacacttttcccccktaaaacgaatggyaacgccaggaaaatactctgacgtgccctctagatttgggggccagagcttttactcaacatttgcctcaacattcattaaagttttactgtgaacatttttaaatgcagtggaattgcatcacaattcttttctgccaaaaaaaaagaatcaccactagacacacaaatggtgaaaggattgttcttgccgctctttgcgtattcacctcatgccatttataaatgaaaatgctaagattaataaaacactcattttttctataacaattggtgctataatactatagttttgttttcctgaggttgtagattgggrgagagtttttaaaaggttttaaatatctattaggcaatctgtatcttaaaagaaaaatatttaattaacatgtttttaaaaggaaaaatacaaataaaatctgaatcactttaaagtatgtcctgagaggacaaaatgcacataaaatattttaaagcatggcagttaagacattgtagtcacaacttacaggggaccttttgttttgcgagtgttctaaagtttgtaggtgtacttgtctgggtgatagcattatctaaattcttccattttgattctttctttttctgttaatttccaaaacaaattttattaagtttatcaaaagcaagttaatgaaattcttcaagcttatggtagcctacattttataacttttttatcatagtgatctttatcagagatctgagaccttgtgaatggaaaatttctcctccttcattttggctttgggtcaggttcaacaaaggggaaatggcccacaggaaaccagcatgagtgtctgcttggcaatgtggccatttgaaatcctccttctatagaaagtagcttcttttccagaactaagccatcacctaagtcactgcttccccctacacttacatgatgtatgaaaatgttacacagcagacagggagagaaccacagtgaatacagtatccatttcccagcaggtttttctatatttgtagaaattaagagcaaattttaatgctggctcacttaagcctttctgaaaatataatgactatgcccagagaagaacattttaatgagaacagaataaagagaagaacaggttgactttcatcttgagaaaaaaactaattataaaatttgggggtctgcgccttgagaaagttcctcagattcttctcctgaaaccatcttagcaaaagttatttactctacaccttctttctgccaagaaagggaaagtggctaccttatttcaaaaacttttaaatcaaaggtggaactgaaaacctaaagggagaggcttcaaatgcctatgaaacttatgtatccaaatccccatgtattcaggaagccagttacagtatggtatcaggaaaaaagagaatcaagtcagcctataaaaaatctacactagaaatcaaacaaaggctgaaccacaactagattccactaggctccaataattttatgttttaataatgtacatacttactattgttgagcattaaagcatcttaaagatttcggctagtctattattttagctcccaagaaatcacagccactatactcagagcaatactttgcacatagtaagcattcctaaacatggttactttgatgtacactttgtacctctttaagtatataatcgtctcatgtggtttcagtaaggttaaaaagaggatggagacatgaaccacatacatctaggactgtaatgaagtggtcatttcttttcttttcttttcttttttttttttttgagacagagtcttgctctgtcgcccaggctggagtgcagtggcatgatctcggctcactgcaacttccacctcctgggttcaagcgattctcctgcctcagcctcctgagtagctgggactacaggcgcacgcaaccatgcctggctaatttttgtatttttagtagagacagggtttcaccatgctggccaggctggtcttgaactccttacctcgtgttctgcctgcctcagcctcctaacgtgctgggattacaggcgtgagccaccgcgcccaaccagaagtggtcatttctataagcagagggatcttstccaccacaaagacttgagttccttttaccaccactctcctggtatatgacctggttgaacataaatccttaggcagtcacgtgagaatctacaatcaattgtaaaaaactaaatgccctcttctccatttggatccagtatctaattcctgggtcctactggcctactttaaaatgacaacctgcagttgagtgctgagactttagaagctataatttaagtcatagagagcctatccattgaagactttttactaataactgcccaacccagaaaagtagagataaaatagtaaggatggaaatacaacctactgtgcaagatggtgatctctgaagtcagacagcccggttctaatactggctctgtcatttactttgtggccttgagcaagttacttaacctctctgtgcctcagttatcacaaatgagaagcagggacaattaaggtattagaattgtgtgtgagaacaaagtgattaacatatgtaaagttcttagaacagtgcctcatgtgtgataagagttaggtacatggtagctattaagaatacagtctcgatacttgcatacagccaggaaaaggaatgaaaatgtaattaaaagataaagactacaagaaggaaaaatgtaattacaagagtatcctttagaagagtaaggtaggatggagtgtatgtattttcttcataaaatagttaccatgtttactgataattaacaatatgtttatatgaggtaatagtaatrggatattaaattgggaggggaaatatcagttttgcatgagtaaaaactacgcaaaattattttgaatgagtttatttttgcaggaaaaatcaacgaccagctacaaaaaacaatttttaaagttctacgaattctgatgtatccctacctcctacctaccaaaatccaaaagcacatctgctccatgtagctttccttgactccccaagaataattccctgttccatctccaatccagtttcacaaatttgtttacatctctaggatcttccactattgtataacaatttatatgcttccttattttcccatctctgctgtgctgggaaccccttaagggaaaggagctgtgtctttcatgtcctgtgaaatccaacagtcaattctaggtcctcctcttgatctcttggaagctttttttatggttcattaccctccttcctaaaacattttcttggcttggtttctgggatgccacattctcctggttttgtttccactcaacagcaaatctttctccatctccaatgccacctcccctctgtcttcccaaccaccaaatgttcggaaacactgaaacctcagtgttcagtccctgggtcctcttctttatttacacttagggtatgcttgattgtatctagttttgtaactttaaacatcattcatatcctgataacggcaaaacttgtagctccatcatcaaaaccctctgagactcagattcatatatccgactatttgaatatctaataggcatctcattcttaacctgtccaaactgaattttttaacttccccaagctactcttcccctaggcttccccatgtatgtacatgaccactcttttccacccggtttctgaaaacaaaaactttggtattgactcctttcttcctttgacaacattcccctccctttccatttaaaccattagttatcatcccttcctcctaccaatcagctcaacattcaaaatacatcccaaacctgatcacttatcaccgtcttcattgccttcattcttgtccaagccaccatcatctctcatccaaactactataatcaattcccaattccctacttccaatcttgccccctatcatcaattctccacatagctggcagagggactgtcccaaaccccaacttctccaatcacttcccttaacactcagacccaaccctatattatgttgtatatgatrcactccatgactcagtccctgttatctctccaatctcatctcttaacactctcctcatcagtgtttttgctttagccacactcaccatcttgttattcctcaagcacacccaactccttcccttgaagagtttgtacttgctttttccccagtctcatactattccgctagatcccccctagcttcaattgaccacattatttaatgcatgtgtgcttgcacacacacacactctctttctctctttaacctatcttgccacatctttcattataatagttaatactacctgatattatatatgtatttgctatctccagcttcaaaaaacaaagtcctgcatattatagacactcaacagactctcaactcagattattctcaactgaataaatgaattactatgtctttgcaatcttagtccttccaacacttagatagtttctggtccattaaaactttgatgaataaatgaacaaattgcttgtccaatagatatctgtttaggaatgaacatacaaaaatgtttattatatttattatatttctgaactattttattcatattttaaataatcattttatccccactgtaactgtaatatagcattgaattttctttttttttccttttttttctttttttttttttcttgagacagagtctcactctgtcaccaggctagagtgcagtggcacaatctcagctcactgtaacctctgcctcccagattcaagcgattctcctgccttagcctcccaagtagctgggacaataggcacgtgccaccacgcccagctaatttttttctatttttagtaaagacggggtttcaccatgttggccaggatggtcttgatctcttgacctcgtgatctgcccacctcagcctcccaaagtgctgggattacaggcgtgaaccaccacgcccagccagcattgaattttcttgacctaagtggccagtgtcacatctactgaatagcttaactatataatgtgtaaatatcacttgggattccttcatctacattatrttcaaaagctgacatacattttgggtgcctcactcaaactcctctagttctaatatacagagcatatttcagagtaaccctaagttcggctgacggctaggtctaaagggtaggagcagtgggatgaaggtgggaaaagtcactcttgtttattacaagtgtgcctaagaaacaaccctgggctctgctccttactcccttccagggatgactcaacgcgtcccaacaacctttagagctttcacagcttaccatggaagaattgcatttcttcccccatcctatctttagttttgagttttgtagcagacccctcactggtaaaatattcttaccgattaatgtttcacttgacatatagcataaggataagagctccattttgaatttagattgtatgttgagttagattgtgtacatggtttatatgtcggggtacataggtgtgtaaaataagctcattccagctgaaacctctttaygatgttcaccatttccaccatcctctgtattattttgtctgtgaatctttcttctatcacycaccctcctagagcttctttgttgaaagccatcaaatttggaaaaccacatgaagccactatttgcaaacccaggctgcctatgcaggaaattaacacaattcatggaaagaagagaaatccagttactctatcagctgattgagatgtaaaaggaagttgtttttacagaaagctgaaagtcagttctaactttttccacttagttaaatggtgatcagcccaaggtagacagtcataaccttaatggccagagcagggrgtgggaaacaggtccaatccacagggggaaaaaawaacataattataataaatagtgaataaaaataaagtcccaggtttataaaaggttgtgacrtagttctgctcatttgggaaaatttattcataagtttctcttttgctctttctgaagacacccgagagtctctcatatctgtaatcccagtgctttgggaagccaacgcacaaggatcccttgagcctagaagttcaaagttataatgagccatgatcatgcsactgcactccaacctgggcaacagagcaagacttcatctctaaaaaaraattatggatacattaatggttgttcttatttacttatagagtatatgtgatgttttgatataggcatataatgggtaatgattaaatctgggtaaatggtatatccataacctcaaacatccatcattactttgtgttgggaacattctaaatctactcttctagttcttttgaaatatacaataaattattgttaactatagtcactctgttgtgctactgaatactagattttattccatctaactgtatttttgtaccttgtaccaaaaagccaacccttctttatcataaggtgctatcattttctcaactttcctgatgaacaattcccggcacaaagatactactctatttccctcaaggctaaactgcttgtaatggggtaagtgraggccatggaatagtaaacaatatgagcagtgtatagctaataacaataaaagagccactgttagttaggacctgctattaacaagtaaaccaaacatgtaagggattaactcaatggcaaggtattccttgctcatgtgatgctcctgagcaggtattcaagtcagtagggctgctttcttccatgtggtcatttaatgtctcaggcttctcacatctggtaactctgacatcccctaggatttcagttatctgcatccacacagctgaatgagaaacagcatggagaaacttgaatggaaagttttatgggccaggcctggaagtgacaaacatcrttttcaatcacactgcataggagtttatttagtcacaaggccatgcctcactgtaaaggaggctggagggaaagcccccctctgtgcccaaaagagggaagaatggattttgatggaagctagcaatctctgcctgcatcagactctgtggccaccaaatatccttgcacattttttcccacatgtaaaaaaaactcactcttttccccagaaggaccacctagagttgcattctggcactgcaactgtgtcaaagaccagcatctgttaagtgatgcatgattctgttcatttgatctaaacgtgattccttgtgatccaataaaagacaaattatctacccatatacacaatttgccccrtgcggtggtgggacaggaatgggataatcaaaacattcaaactccctttcagaaagggaagaatgggagacacattgcaataatagaattctgatgacaatcctgatagtatcatctattaatggaatccagaaacaatcattttctaactctttgaacccatgaaaatctgtgttctatcaatctcagctttaaaaacaaccaattcatctcttccctttcttataacaccttgctaaatatgtaaaataacaattaatacatactaacattctgtcattttccggtctcttcatagagtgctatggactcagtgggaagtagctttaccttccaggtttcacaaacaatagttttacaaaatgttttgccacagtataacacagatcatctttccaacctgctctgttttgtcaccatctgccacctaacagctaagccaacagcacatgtatttttaggtttttgtaatgatggcaccatactactakgtaagctaagatgctgtaacagataggctaaaatatataagggttcaaactattagaatcctattttcttacataattgcaacatgtattttagatttagagggtacatgtgcaggtttgttatctgggtatattgcatgatgctgacatttaggatatgaatgatcttgtcacccaggtggtgagtacaatacccaatagttagttttttgacccttgccctcttccttcccttcccaactagtggtcctcagtatctattgttgccatcttcctgtccatgtgtacccagtgtctacctcccacttataagtgagaactaacgtagtatttggttttctgtttctatgttactttgcttaggataatggcctccagctgcatccatgttgctgcaaaagacatgatttcattctttttaatggctacataggattctgtgttgtatatgtaccacattttctttatccaatccaccattgatgggcacctatgttgattccatgtctttgccattgtgaataatactgcaatgaacatgtaagttcatgtgtctttttggcataatgatatattttcttttggatatatacccagtaataggattgctgggtagaatcctgcttttggtcatataagagaccttggcaggtcttcaggttggtgagatagttctgttccatgtagtcattcagggatctacttttttccatcttggtaccctgccatcatctagggctttgtggtgctctgtatctagacactagaagatgaaagactatggaggagtaagggtagggagtggtggtatgggccaggctgacaggtggcatgcatcacttctgttcacatttcactggagagaacttaaactgtaggccacacattatcacaaggaaggccagcgatgtgcccaaagaagggacaaacagactttaatagacacttagtcatcttcaccacagtcattaagttgaaattgcttataccaaatacaatacgcacagataaacatatcaactgccttagcaccatgtttaactccctatttattccactacatatgacatacctatatttcccagacttgcctggccataagaaaagcttacttgttaaaaatgcagattcttgggtccatgtaagggcttctacaccagacccatttagagacagagctgtgaatatgaatgtcaataagcttcatagaaatttctaattaggtagaacttgtgacactgctgttttagagttcaaacccatttagatatcacaaatgtatatagtttcagctaatgtgacttagtaggttcagaaaacccttctttatgctgtaatggtgcctatgaatcaagccaaaaggagcaattctatagtcaaccatccatcagtaaaaagcaatttaaaaacagatatgcatgtaaaatttcttgacttgggagtttccagcagatcgtatcaaacagaaaaggcctttagtgcctcttggaaacggctagcaaactcctaagtgaggaaacagagtgttctcaaaaaagatctgtacytgcggtgggggcatagagagctcctggaagaaggagaatacagaaggctaagaacagaaagaattgggagagggctggtgcagggtgggaggagaagcctcagggagtcagactagaggcaagtgggaattctgatgcgtagcagtaaggagactaaccttacttacccaagggcagccatgggtagccaagtaccagctgctgggggaaaagccttgagcttgggcataatctgcaaagctacatatgggtgaatcactccgcaaatgaaaaaaataatcaacatgactctaagaccttcagaggggtcastgagggaaattagagagcacctgccctcatgggaagaaacaaaggaatcttaaaaaaacaggaaagagcctgggatctttggggtggttttgatgcagttgtgttttggaagctatgatttgttgttccacattcatccagccttgtgattatgaaatgaacagtaaacatctgtttcccctctgcaaatccttctgttcttcttcatgctttgacctaacatttggggaaaaggaaagaaaacaaaaacagaaaacctcttacagtacaagttctctgagtccaaaaagacctctacttaggtcttcctgaaagaaagatgcataaatctggggagagacagatcttttgtaaccagaactcagccacccttatctggacagccagtttacaatcactcttactaaacgggtaccaagccttcctttagtctctccagctgttttaatacaaactggtaaatcaactgaatccagattgccaacaagagaaaaacaacactctgcatggcctgagcagaatgcaccacagtgaacaaaatgattcctgatctttttgcagcaagttacttaattagctaacattaagtagctgagtatttactgtgtgtccagccctgtgttgcctttgttatcttgcttgagcttcacattttctctaggtagtaagtatcctcattccacagacaagaaaaccgaagctcagagaagtgacatgtccaacatcactcagcaaagaaatggcagaattgggattcaaatctatcagctccacaaagggggcccactctgattaagttggtccccctttcaaaacttatttaccttctctgtcattataattttctttgtttatttaattttccatggcttgtctccccctagaatatataattcctgaaggcagggccctttctgtcttgtttacttttatgtcctccatacctgggaatgagcctacaacataatagccacccggaactgtttgttgaatgaatgaatgaatgacatccaagagtctcagtcttaaccagtgcactacactgaagttagcatcctatgtggacgctcaggataattttctatgttgaaattattttatcctcccacatgctgaaaggatatattgtaagcaccatgagcatacattaaaatagattatattgaccttatttaaaacttgtaaaaaaattgttttctctggaaaagaaaacaccaaaaggttttgcttccagtcaaattttaagcttatgagttctgagtgatttagctaggcataaagttgttttcctaattatattgaggatttctgttctacctctgttatattctgatgctatatcctagaggcaaagggaaaaacttaattacttgaagtatgtgctgcatacattttttcaaataatgagattaattaagaggaaaaataatcagcaagtagtctccttaatatatgccaggtacaaacctcctaagaattatgaagaatgttcataaaatgtaactgttcatctcttagaaagtacaccaattttcaactggtatgcttgcaagagatgcaatgactatgttcacattcattaataatggggccctttatacttgtcaaagtaagaattattaggaggaaaacaaggctatgctctctctcctcaggagtcctcctctctgctcatattgaattagcttgcactggaagcactaaatgcttttttttctaaactaaaatgaatttcaaatgacatttgcaataattcaagctggtaaataagagccttaagagttttccatagtaaacacacttttaaccaaacttttcmaaagagacaaagagttgatgctacatcttcagtgtcaatattaggcataaactttgctgtaaagatcctactctattcatttcattcatttagcctcttaataagtctccatatcatgttctttcttttggataaactaaatctgtcaggctggttagagccattttctttccctcaagctgagcaaagatgaagaacacctcattattatcctcagaataattactcttcatgtatttcaagacctagaaaattctcatccctgtcatcctcagatgatacacccagatccttctcactcccccatagctacttgacctattctttcccgctttttttttctttttttctttttttttttattattatactttaagttttagggtacatgtgcacattgtgcaggttagttacatacgtatacatgtgccatgctggtgcgctgcacccactaactcgtcatctagcattaggtatatctcccaatgctatccctccccgctccccccaccccacaacagtccccagagtgtgatgttccccttcctgtgtccatgtgatctcattgttcaattcccacctatgagtgagaatatgtggtgtttggttttttgttcttgcgatagtttactgagaatgatgatttccaatttcatccatgtccctacaaaggacataaacctgagaaaaacaagcaatggggaaaggattccctatttaataaatggtgctgggaaaactggctagccatatgtagaaagctgaaactggatcycttccttacaccttatacaaaaatcaattcaagatggattaaagacttaaacgttagacctaaaaccataaaaaccctagaagaaaacctaggcattaccattcaggacacaggcatgggcaaggacttcatgtctaaaacaccaaaagcaatgccaacaaaagacaaaattgacaaatgggatctaattaaactaaagagcttctgcacagcaaaagaaactaccatcagagtgaacaggcaacctacaaaatgggagaaaactttcccgcttttttaatggacagcttttcatgtattcactgcaagtcaatcacaaatgacttgcatttcaaatctacagcaagcacacagtcactcttgcactttttggtgggaatagatatcttgtcgacaygattacttgcaggcctaacaggatgtaaactctaaatattcttttagattacctctttttcttttttcccctttttcttttttcccctgggtatgcaagttaatttagatcaaactaattaaatgtagacaactgaagtcaccaatatgagagtactacatttctcttctggcattttaataaatctccattcaattatcccaggtttatctacattataatatcatgttaaggctttcaaaagacaggatttctttagatctaagaattaatatcattgtgggatcttcatataagttcaagagaccacatggcacctaattagaaatgcctatgaagcttattgacattcatattcacagctctgtctctaaatgggtctggtttagaagcccttttatggacccaaaaatctgcatttttaacaagtaagcttttcttatgaccaggcaagtttgggaaatataagtatgtcatggcacttgaagagcatacttaatcttggctcaacagtttttggtattaaaggatgcattttcgtccctgtgattaccatagatcactgtgttttatagtaatgaatatggtatcattttaatagatagtctagttttactaagatttagtatgcagtatattccacctcatcttaagttattcttttgcttcattcccgtcctatcagttaacacattaaaagcttcttaagggtagtgcacatcagccaaacatcctatttagcaacctcaccaactgctacagatccaattccagtttcacaaaagatactctataccagggtaatctagaactcagcagattttctggacacaggaagaaatcttaggctctaagctgtaaacaatccctgagacaactacagttgaccacaagttatcttggagcctactacttcatcaactagccttaagtatagtcgtatacacagcagaagaaatggctttgtgtcatcataaaagtttttatatgtagttcctcaagtaatttccaagactctaactgatgtccgagtgctgcacttayggtaggagaggaagagtagaagagggttgggatatagataaatagatatatcgcttcaatgtcacaaggagctagtaaacttaccatagttttcctttgtgatatcctwactgmctcagctttcctatctttcaccatctcttgagcaawttagaagcytgttccctgtgaaatgaggaagagaattatattttattggcagacacttagctccaattttacagccagtatctagttattcccataaaccctgcaattaactcagagcccagaaaagagcaccacacagagcattttgagggtgaaaagggtcagcccacagaaggatccatttgttcagtaaaaaaaagttagcatttttcgacttctttgaaaatggggaccagcaacctttaaacaaagtatctgataatggtgacttcagaggatttaatgcacttttttttttcatttcwtggttgttaaaatcaagaatctactaatcaagaaaaattgttttttcttatttagtctttttgccttctacttcttttttaaaggcttctaaactttctttggtaagtgcattaagagttctcttttctggccgggcgtggtggctcacacctataatcccagcactttgggaggccaaggcgggaggatcacaaggtcaggagatcaagaccatcctggtcaacatggtgaaaccccgtctctactaaaaatacaaaacttagctgtgtgtgctggcgcatgcctgtggtcccagctacttgggaggctgaggcacgagaatcacttgaacccaggaggcggaggttgcagtgagccaagatcgcaccactgcactccagcctggtgacagagcgagattgcatctcaaaaaaaaaaaaaaaggtctcttttcctccccctctgtagtatctctgtctggtgaatttctacatgaaggagaatgcgcatctccctaagagaaaggcagcagtacattaacttaacgagcagctcctgataagccaaatttcaccgtagtactatttaaatttcatcttttattaagaaataaaaacacttaaaatattttaatggtatatatgagaatcatagaaattcagttatgaaaattatgctgcgatgcaaggggaatgaaggaggactgcatatttcttcttcggtgaattaatcagagattctgaagaaataatgcaagtctatccccaagcaatgtctatcaaatctacagaaagataaaattaagtaatatttttctctgtgattcttcaaggacaaggtttttttaatccccattctttgttctgctaggattcattagtatcctctctttggtgcagacagtgatcctcctctattattccccaaacttctgctcttttctcattataatatcaagtctcttaatacctgagtaattaaaaaaaaatctgtacaataaacccccatgacacaaatttacctatgtaacaaacctgcacatgtatccctgaacttaaaagttaaaaaaaaaaaaaatctagttggttacgttaaatagaaaaaaaacaacaaccaaccaaccaaacaaaattcaggtctcagaaacaagaagattccatgtaatctagggaggaagacaagccgargaactacccagtgcccagaaatcctggctgggcagctccatctcattggccaggagatgtgcttttgaaagaaagatctgcctggaatcctgttctgttacatcagagtaggcatcataaaagtttttatatgcggttcctcaagtaatttccaagactctaactgatgtctaacttaagggagctggatattcttagaaaagatcaaagtgttccctggaatacaaaagactgcacttttaacttgacttcccaaactccttcctccctcatacacactatccttcaatggctaatgatacagaaattcaaaaagcaaaacggaattttttactaaagaatctgacactctgttctatttctaaatatctatactgtgtttggtctcttgaggcagtaagaccccacaaactttcctacttctcctctatggtctctcagctacagagacgccctctaaaacagctgctcgggctgggcacagtggctcacacctgtaatcccagcactttgggagtcgaaggcagagagattgcgtgagtccaggagttcgagaccagcctgggcaacatgaggagaccccgtctctacaaaaaaatttttaaatgaaccggacgtggtggtgcatggttgtggtcctagctacttaggaggctgaggtgggaggattgcttgaccccaggagatcgaggctgcaatgagccatgatccagccactgaactgagcttgggcaaaagagtgagactctgtctcaaaatatgtatatatatataactgcttctaatccctctgccaggctcttccttctaacaaggcaagcctctttcttcctgtcacacatgggcttagagtaggtacttggtaataaatgctgattctatttctagagaatgattctattactggagaatggtgatagcattctctgacattagaaataaaatcagcattatatatgaaaggatacagcactttttccagtgtcagaaacaaaacggattccccagtgatgagaactgtgttacgcatctcccatggatgtgcccaaggagttcattttaaactccaaaatgagaaatttaaactagacagtttgaatatgacattgtcatgcaatttccaaagtagtcatggcatcccccttcagaggctctgagaagatttcggtgtgagtggattcactacataatgggcgcagcctggtgttgtggtggatctgaatgtcaagagaacaaaggcagaagaatgcaacattttttttttaatactttaagttctagggtacatgcgcacaacgtgcaggtttgttacatatgtatacatgtgccatgatggggtgctgcacccattaacttgtcatttacattaggtatatctcctaatgctatccctcccccctccccccacccaaaaacaggccccggtgtgtgatgttcgccttcctgtgtccaagcgttctcattgttcaattcccacctatgagtgagaacatgcggtgtttggtttttttgtccttgcgatagtttgctgagaatgatggtttccagcttcatccatgtccctacaaaggacatgaactcatccttatttatggctgcatagtattccatggtgtatatgtaccacattttcttaatctagtctatcattgatggacatttgggttggttccaagtctttgctattgtgaatagtgccacaataaacatacgtgtgcgtgtgtctttatagcagcatggtttacaatcctttgggtatatacccagtaatgggatggctgggtcaaatggtatttctagttctagatccctgaggaatcgccacactgtcttccacagtggttgaactagtttacagtcccaccaacagtgtaaaagtgttcctatttctccacatcctctccagcacctgttgttccctgactttttaatgatcaccattctaactggtgtgagatggtatctcattgtggttgtgatttgcatttctctgatggccagtgatgatgagcattttttcatgtgtctgttggctgtgtaaatgtcttcttttgagaagcgtctgttcatatccttcacctactttttgatggggttgtttgtttttttcctgtaaatttgtttgagttctttgtagattctggatattagccctttgtcagatgagtagattgcaaaaattttctcccattctgtaggttgcctgttcactctgatggtagtttcttttgctgtgcagaagctctttagtttatttagatcccatttgttaattttggcttttgttgccattgcttttggtgttttagacatgaagtccttgcccataagaatgcaactttttaaaaagcattttatttattgccctcctcacctctgtgtttctggagaacacaaaggagctagggaaggaaggacacagctcctcctgctctcaactcacctatcattgatgaatgacaagggacaagaaggagtcagagcagagtttgggctcatgaccaaatcagtggaccttgagtttgtttttcacagaattcatagatgcaagtcgcatgtgaagatgctccatcttggaggcactttctccaagttttatccacactgctgggtagagttgagaagcagtggtcagccatctggactattggttctggtgggacctattggtctaggaaagaggtcctgttatcctctatctccaaggccccacccagcttctctgtgttgaacccccacccttgacagatgactcttccttagtgttacagatcacttttctctcctcttcatccaagtttacatttacacatgacatgtttaacaattaccctactctcccatcatctcaggatctacaagttgagtattgcccaaaactccattctctcatccccctgtatcagtgtttctcttaccgggaggtaattattatctgcagagtttcatgggaaagttatgaaatattcatagaggctaactttcatacctatctcattagttcagagctgggaaggatgttttaaatgtgaatatcccaaccttgaatttcaaggacacccctggaagaaaagacagagaaaaccagagacagagatacaaagagttcatctctcttggtggtacaagaaggagggagatatattaatatattcctcgagtattgtcctccaatacccctacacaaactctgctttttcagattagggttcaacctcatcgttaaaagatgacgtcaacatgttttaatttttttccatgaaagctctttaaaagtttttatagtctcatttcatagtccaatttcactcaatcctgagagcctctaaaaatagcttgttgagcaaatttattaccacagcttgcaatctctctccaatatttaattttacattgaaaccaggtatttaggaaataacctgtcttcttgataacatagcgctccaggggtccccaggcaactaatcctttgctagccaaacactcccaagaaatcacaaattatataatgcacatgaaagtgtttgtgtgctggaaagcacctaagaaatgttattgtttcttatgagtaataaatcacttaatttattaaatgtgccaggagtgtagaatgacataaggtgtaattagccacaaggcacagcaaaatcataaaaccaaagacatcctctttccccaacactgcatctctaagaatgtagttaatctttatttgttccttcacacatgcataagcaatatgaatacatgagtgccagaaatagggctcagaactggaggtctctgcttcatgtactgtaactcatgcgcacggtcttgttccttttatgggtagaaatgcctccaagctgtttgcattatctcagcagcagttggggggagggggatcggcacagcccacatcccttagctgcagtaccagaagaatcgttcctaatcaagcatgtaaatccatttgtatgaccttagaaagactcccmataagaacatttggatattaaaacactctattctaaaagacatcattgtaattgtactgttcactgttgatactatacctaaaacaatgtattgtctagtgaaaaatccaggcctgctttatacagaataattaataagcacaatgagttcctactaggatagatccagaatttagttatttggaagattttgtttgtttctttcctgattcccctagcattctgactttggaagttaatgcccactcttatcccacactcccagtttgggagccctgagctaacccccagcccctcgaccccatctcaattttggaagtgtttgaggtcaatcttcaaggaaagccacttttctcagatgtatccaactatcacttaaataaactatcatttatacttttttttttttttttttgagatggggtctcgccttgtggcccaggccggagtgcagtggcacgatctcagctcactgcaagctccgcctyccggttcacgccattctcctgcctcagcctcccgagtagctgggactacaggcgcccgccactacacccgtctaattttttgtatttttagtagagactgggtttcactctgttagccaggatggtctcaatctcctgacctcgtgatctgtccgcctcggcctcccaaagtgctgagattacaggcgcaagccaccatgcccggcctcattcatatatttttaaacaataaaggttagaaattgatgggggagaaaaattttcccttggagcaacatgaattgcctccagctttccaggagagggttatatttgctattgaagaaaaaagaaaacaaagccatttataagcaatctcatccctattcccataaacattgaaaatctttcatttttcaagcaatttcaactctcaaatgcgtactgagagtttctgaaaacccatctgatgttttcatttttacttctgtaaaataatatctcattgagacttctgatatgaccatgattgtataaatccagtgttcttctcttctgttcctgaaaactacccaaaagaaaaatgggaaacaaaaacacaaattgtattttcagtaaaactaggacacagactctaacgtattttgaaaaggatgccaaaaaaacaacagaattcmsmgaagagacaacagtgggaagtagaaagaaagaccagtgttgtcaggtctcagaaatgtcccataaaaatatacttttttttgaaggcaagggacaggcctagaggggaaaaggactacaacccatgtatataaaagaggttcagaaaaaagattaatcttgcaggtatcagaaaccttcaatagacccggttcacatcacagaagctaagggcttcaggaagaataatgcagatggagccatatttttctgaagacatagtctttgtaacaattgaaagtatcagccttttcatgtaaaaaaactgcccaacctggaatacccctttgaccccttctcgtgaccattcacaatagcttatacagaaaaattcacctctttatataataatcaatttttgaaagaaactagtattgcacttaaaggtgccagaagaaataaaggaggaaaaaatcagcaacatttattagcagctgagacttgctctcaggaaaaataatgccatatgataggtaaatattgtgaacaaatattttgctatgactgagaaaaacataatgaaacaattacctctatgaagaaagaacacaaggcaaaaatgcaagaaatcaaggagagatggcaagacacctggagaaaggggaaygtgggctagcaaaactcaggaaagaattagaaggaaatataaagccatcagagaaatgtaggtaaaattggaaacatcacagaaacagaccctgtagaaaacacatyaagggttatgagaatagagatatgaaaagtaagccagatgtaacataaatagtttaaaagaattagagagaaaattatatataaaacaatatataaataaaataaaatatgaatataatacataaataaaaytatatatacaagaataaacaagggaaactcagcatatgtataactggagttcccaaaggatgaaagaataaaagcatagtaatgtcatagaccagatttgaatattgctcaagaaaaaaaaaatatcctggagtaaaagacatgaatctacaccttggaaaatttttgctaggataattaaactggcacagtcaatgcaaatacaactcctagaaaagttaaagaatactagctttaaagacacaggcaaaaagatcaggtcacgtaatgagatgaagggagcatgttatatattactaagacctattcctaatactagaagatgatggggcaatacctaaagataatccaaaaaaggaagtatgagctaagtatttttttttaagacagagtttcatccttgttgcccaggttggagtgcaatggtgcaatctcggctcgctgcaacctctgcctcctgggttcaagcgattctcccacctcaacctgccaagtagctgggattacaggcgcctgccaccatgcccagctgatttttgtatttttagtagggacggggtttcaccatgttggccaggctggtctcgaactcctggcctcaggtgatccacccgcctcagcctcccaaagtgctgggattacaggtgtgagccaccgcgcccagccgagctaagtattcttatattcagcaaataatacttcaagtaatggctacaaataaactgttttgaatatgcaaggactctaggaatattrgtctcatgaggctttcttggggaaataaactaatatatttttaaatgtttcttaaggacaccaaaacaatgtgaacaaatggtaatacatacgaatataacaaagatccactcttccctatgtaatttatatatttagcacaatcttaataaaaagtctagttcaagtttatatagaaaaacaaaacaaactggaatagccaagaaaaatctaaagaacacaaaaaggaacaataccctatgagtcattaaaacagattataaaatctctaattacaacagtgtgggactgacaaataaatgtaccgaccatccaaaacagtactttatagaaagtcaaaacatagaaaatgcaaaggggactttcgcagaagaaaaacaaactattcaacaaatactttgagactgctggatctgacaatgattctagcttaataacacacttgactggcaaggatgtagaaaaataaacattaaagacagatttacatgaagctaatgaagattacgtttcagagcccctcatttgcaggagcaccttccaaggttctggaatggctctaaaaatgtgctcacatggtcatagatttattaatttgaatttagtcacatcggtatagggttttgctgcttttatgccccgttaagttattggtagccttcctaggataagaacggcttccaagaatattcctgtgacccacctaccaactcccctagggctgtaggacagaggtgaaaggccatagattctattgtcctatgagcatgtccaagcacccagcactggaagaataacttgcggagttgatacaaggtttgatatgtttctcattctaaataaaatatatgtacacttttacactaactttgtatttctattgttggattatctttcttaaagaaaactcatccattgattgatggtgggaatgtaaactggagagcaaatttatcagaatttcaaacacatactcttttgacccaacaatccttccttctgaaattttatcttacagctgttctcatacatgtgcagaatgacttacaggctcattcttggcagcgttgtttgtaatagcaaacaactggaaataatccaactatctaagaacaggggactgattccataaaggatgacacactcataaaatggaataccatgcaattgttaagaataatgaggaagcgcttaaagaattgatctataaataccttctgataaagttgtatgtgaaaaaaagtcaaactacagaaaaatgtgtatagtatgcttccatatgtggttaaaaaaaaaaaagacgaaaacagaatagaaacacaattgcaatgcacacacactttaaaaatccgaagaataaacaaaactctaagacaccaatcatctattggaggttgtaaactggataaatgagaaacatgagtgggaattagactattcactgcatgcatttatacatttttatgttttaactcatgaatgttattatgcattcacaattaagtaatttttgaaggacctcatggcagcattaccttccgagtttcttccagaagccttccagagccctcagtgaggatttcctgcttttcctacatgctctcataactccttcttctgacctgtcatagcacctatcacactgtattataatggcctatttactgaggtgtctcttccactaaaatagaagtttcataagaggaaccaaatctctaagcatctggcatggtgcctgcttcatacaaggtgtacaaaatgctcgtcaagaaaaagtcaataggaaataagttgtttcctttcagaagtaaaatgctcaacactgtttgcttagatrgtatatctacaaagtgagtccaaataatttgggtccaaataactgctttaaagcaaaaaaaagaaggaggaatgttagtttgaatttaactatgttagtattatgtattcattttctattgctgtatggcaaactaccacaatcttagtgacttgaaacaatgctcatttattagctcacagttctgtaggtcagaagtccagcaggcatgaatagattctctgcttaaggtatcataaggtcaaaatcaaattggtggccaggctggtcttatcaggagtctctggagaagaatctgcttctaagcttattcttttttttttgcagaattcatttccttgggattgtagaactgaggttcctgtttccttgctggccatcagccaagcactgttctcagtttctagaggtcactcgcagtctttgacacatggccccctccatctgcaaagctctcagtgaagcactgccttcacaacagattcttctcttgttttaaatatctaattttcccttctgctaccagctagagaagactctctgcttttaaagggaacatgtgactcagtcaggttcatccagataatctccttatcttaagggcagctgattggtaacttcattgcatctgcaaaatctcctttgccgggtaacagtaacataaacatggaataccacgggtcaaggatcactggggttattttagaactatttccaccataccgtgttggctcttaacatgtcaacactaattatccctaaggaatagtaacccaaatttaggccgctaagaattttctcccttctccacatatttctctctcctttcaatttctgggatttaatgacctgagaacaccagctggtgtgtctaaagattgtctcaaccacccttacagaaaaacagtgtgtgggagggcagagtggggtggcagtggtgatgcaagcaaaggtatgtgtatggacaatcctaaaaattgtcacaggagactgaacaacaaaaaacgttaaaaaaaaaaactagtaagtccaatttctataggtatctaagactgaccaagatatagaaggaaattccccacacctacttcagtagtggagtcctactgaaaacagaaatgttgtccctcacataaagactttgaagttgccatcaactcaactgactttggtgttttctagtttttctccctataactatgtttaagttctttccttcctttcttattatatggtattatttggcgtgtctattctctatttccctttgatttgacattgctcttctatataacagtaccatcaaaactagcagtagttcccactgcccagcatttatgaccccagtactcacatgactgtccttcacaccttcttcagaaccctgctcaaatgtcacgttagcagcaagatcttccctaatcatgctgtataaaaacgagctactctccactcatcttgccttatttttcagtagaatttatcactatctaatacattgcacacacatatgtacacacacacacacacacacacacacatacacacttctttattatctctctattaagaaaagggtgccatatctctggcatttagaagaattcctgcactcaataaatatttttgagtgagtgaatggaagtttacaagggtacaaggcttttttttttttttttttagatggagtctcactctgtcgcccaggctggagtgcagtggtgtgatctcagctcactgcaacctccgcctcctgggttcaagcaactgtgtgatctcggctcactgcaacctccgcctcctgggttcaagcaattctcctgccttagcctcccaggtagctgggactacaggcgcccaccaccatgcccagctaatttttgtacttttaatagagatgaggtttcaccatgctggccaggctggtctcaaactcctgacctcaggtgatctgcctgcctcggcctcccaaagtgctaggattacatgtgtgagccaccgcgcctggccgagactttcacttttaattatttttatgttagttcttccgcaattccaacaatgatttgtatccatccctacctttttcctctgatgttataagccctttatagtggatgtaagagagtacttatgaataagcacagaaacatttaccagttccataattcactagtgaacacaactaccttgctgggtgatgttaacaactactcaaataaagtaaaatcacttcctttataacatgctctgcttcaaccattgtttttcctggttccatgggcaaagaactagtcatgcttttgcaaaacttcacattacaataacgttgtatagccatgttaggaatggacgcacacacatgtacggtggtcaaaagatgtgattttaaaccaaatatgcacaaattaaacactcagctcggtattgcagtggtgacttgattttagacaagtcacttaaactctaagctattgtttcttcatgtatgaaatgaggataataataggacttatttcacctaaaacttatgaggattaattaagccaatgcatcaatatatgtagcagtgttgaacaaatatcggtggcttctgctattgttgtttctgttcatgtgggaaagatacttgatacaactttttttgtccttttgtaatatctcatctcatagactatattttctttggctatgctcagtttcctatatccagggaagagcaaataatacaaaatgtccacaaacaaaaccagtgtggattaacgtcagttggtttggctcctaaaacactgaaatgaggtgggaagttatggtgcacacatgtgtgacagtctcttcataaggagagcagacagtcatgacagttgagtgcttaggacactggcatgcccgaggcagggaatgatgcgacatgacttcctggggtctcttccaggcctacattttatttttcttgggaaaagctccatacactatgagtttcatcaaatcattttcaactagagaatcacagccgccaccctcaagtgaagtcttacattcttgggaattcaagcatacttttcttttctgatacttcaaaagattactttttcacaagtccttcttaaatttaaatttagaataagaaagctgtcttatttccctaaaaactacattttgctgatccaatataatctgaaagaggatttagatggtagcagaagggagaaaggtatgttaaggtacctgggaagtgggcaacaaggaaaacaagcacagtctgtgtgtcagagccacttccctgaatagctgtttagcaagttggccagaatctaaagccaatgcaccctggttccttgcaagaagctcttcactgcacagtctatatcaaaactcaataagccatagttggtttaaattaagtcacattatcatgtttctcatgtaagatcgagaggcaataataaatatgatttatgcaagcataataattataccatacaattcatccatttaaagtctttttttcttgccttttttttttttttttttttgagacagggtctcactctgtcacccaggctgcgatgcagtggcgcgatctcagctcactgcaacctccatctcccaggctcaagccatcctcccaactcagcctcccaagtagctgggaccataggcatgcaccaccatgctgggctaatttttgtgtttttgcagagatagggtttcaccatgttgtccaggctggtatcaaactcctggactcaagcaatccacctgtctcggcctcccaaagtgctgaaattacaggcatgagccaccgcacccagcctccatcactcaataaagacatattttcatgagtattcttaattcttcaaagttgaggwgagtagccaaaggataggtgaggcaatattaattgaggagaatgtgaggatcatgggaagtggtatgtaaaaagaaatggaaaagttgcttgggaatgaaaaaaaagagagggctttgtattctgaaacagggctcaagagcatggcctttgagctcacgaaataagtaacttcctgccaaatcctgacagacaaaaagtatattagtagttttcagggactgtgaaagggctgaatggggagtaactgctcttgggtacaaggtttctttttagagtgattaaaatattctgaaatgtattatggtggtggttgcacaactctgtgattctaccgaaaactattgaattgcactttaaatggatgaattgtgtggtatgcaaattatatcccaatgaaaatgctgaaaaaataattggaagggggaaaagtaaagacagtaatatgatgcctttgcttatgaaagtgaacctcaaactagacagtagctaacaactgaaataacaggagagaaaattttatttcaaattattagataaattcatcaatgtccttagttcctgaaatcacaaactagattttatttaatagctacaataacacctggctaccaggacaaataactcttgaatctgtcatctccattcctactgtcactgatttagtcatcctctcttccctggaccattatacagtaacagccctttaaccagcctggcttctcgcttgggactcattctccatattaccactagagaggtcttccaaacaacaacaacaacaaatccaagcacatcaatcctctgaccaatatcatccagcagctcccaaccgttcccagaatagagttaggaatctctagacaggcttaaaatgccttcattttctgtgctctgactcctcttttcaaccatatccccacctaccacccaagtgaaccctgggattgggccgcactgcactacatgtcagtcccacactctcatttccacatttgtgcaagccacctggtgtgtacaaccgtcattgtccctggaaagctcttgtacatcttttaatacacaactcaaactttacctccttcttgaaagcttctctatttccccagatgttctactgggtgattcccatactatgattccttaattcacccatgtattctacaaatatttattgagtgggtcaagcatacagtgggtcaagcatatagtaccttatctgcgcctttattacagcagggctcacactgatagaactttgtacatctctgctcctccgactaaactacgatccctcaagggcagatatcatgttctgttgttcatctttgcatccctgctcctaatatactgcctgatatattataggtacataacaatgccttggataagtgaaaaaagggcactaaagagattatttgaatatgctcaacattacctacaaatcatcctttcgcttcagtataaaagacctgatataaaagagatatgttttattggtactagtaatagtaatgccattttgtggttgttcagatctaaagcctttgaatatataacccacacatgtacacacacatataattatatagtttttcatatttgaacatgaaagagtttaaaacagataaaataaaccattaacataatttttctcacttttgacttttcacatatattttttccaaaaaatatatataaatttgtacttaagaaaagaaaggtgaaattctctgtccccacagagctccatccgcactattatgcaaataactgttttctttaaccacaatttatttggtaagccccgaaccaacattccaatcatttgctaaacatatccactgaggcatggtgccccgttaaagaaattagttcccttccttttaattttaaaatatctaggaaccagtaaactcagaaacattgtgatcccaaaatactgttatgtttcctgccaagtttcttctgtctaatctaaatctcctcgggtttctatgctaaggtgaaagcactttggtgactatctctttactaatatgccaaactaagttctcggggttcttctttcgggactctaaattatcaaaaggcatatcaaaactattactggtccgggatgtgatacattccacaagaaaactttcctggactccaaaaaaaaaaagaggcactatcgcaggaaggaaaaaaaaggtgaagagacagctatagattaaatgctctgttttaagctgattggatcctgattttaaaaagaaaaaaagctattaaagtcattttgtaggcaattaaggacattttaatatgcagtgatttagattacattaagaaattaatgttaattttcttggttatgatagtgctactgtggttatctaagagagtgctcttattcttaagagatgctgctaaagtatttataggtaaaatgtcaccatgtctacaatttactttcaaatggttcagggggcaaaatatgtgcatacatatacaaagagaaagtatttgtgggaaatggttaacactgctgaatgtagatgggggtcataaggtgttcctacaattctttcaactttttggtatgtttcaaaattttcaaaacaaaaaattggaataaaatcctctttgaagaaaaattttcttaaaataataactgtcccttctgctgcaacacacactatttcaaactgataaggtcatttagtattagagataagtctgttggtcattcattattaactccagaactgtgtttaaatcagaaaattgaatttgctaatcttaccatagaacttatcaaaagacttgaggttataattattttctcctagagaagaaatctcaaaatataagtttatagctttctgtaataaatgcttttttgcttgaacaagtattccccaggagaaaaatgtgcacatggaaacacatggaagaaattctccatccttaaatacatttcttaattatttcaatgttttaaaagcagcaatcatgaacaggttttattgttttagatttttccacatataacaaaccttcctttctacatcctctcttcttactctgaccctacagaattctcttttacggccaacaagttccaagagaggctacaggctctgtttcatgcatcacctgacatagtaccttttcttggaacaaggtctcttcagtaaagcctgctgtgtaagccagctatggtggtagaatacccagctgaatgccttctggaatatttttttcaaggtctgtgtattagtccgttttcacgctgctgataaagacatacttgagaccaggtaatttacaaaagaaagaggtttaatggactcacagttccacatggctggggaggcctcgcaatcatggccaaaggtgaggaggagcaagtcacatcctacgtggatggtgttaggcaaagagagtgtttgtgcagggaaaagtcccctttttaaaaccatcagatctcatgagactcattcaacaccacaagaacggcacgggaaaaacctgcccccatgattcagccacctcccactgggtccctcccacaacacgtggaaattcaaaatgagatttaggtgaggacatagttaaaccaacccagtctgtatgtggcatgaaatgttttctagttaccaacaagtagtgaagtgtcctgaattctctcttcatgggaagaggcttgaaacacacacacacacacacacacacacacacacacacacacagagttgtctctcaatctttgtaggaggattggttccaggaccctccacagataccaaaatccacagatgctcaagtctttgatatccaatggtgtaatatttgcatgtaacctaaacacatccacctgtatactttaaatcatctctaggttacttatacttcatacagtgtaaattctatgcaaatagttgttatactgtattgtttagggaatgatgacaagaaaaaaacatgttcagtacagatgcaattgtccctttttttcctgaatatttttgatccttggttggttgaatccatggatgcagaacccaaagatatggagggctaacctactgtgcagaactttaattcaaaggaacttgaatagacaaamgaagatgtttcatgatacacagcttgcctagagaaataagagaaaatatgagcaagagaataaaaaacaaagttttcttatttttttaagaaggagcttggacccgtatgaaataagatgatataacctagaaagcatgatctgacaaaatattaaccagctcagtttattttatgagaaaaaaagctttaaaatttaaaaagaataattttctttagtttccaaagtactctgcacaacacttgaaacagtataaatgtcagatcaattgcagtccccagataatttttaattttaaacattaaaaagtgtctgctcttgaaagtctttatcatttctaaaatcttcctagcttccctcttaggccaaagcaggagactagtatgtggcatgcatcctgttagccatgactcaaaaactccaatacacacttgttaagtttcagtttaacttaaaatttcatagtttcaaagggcaatttcgtcttctggttttccaaatagtatccaaatatggcagaaacaacagaaatagctgagaaatgctgatgataatttagctatacatttgtttaaagtttgattttttatgaatttctactggattcgaaggttagactgaattaatcggtgtggatcgtcagactatctccatcacacctggtcttgttatcacagcacagtgagacaaagggatttttcacatgcttctctttctttaacaagtacaacttaggtgtgagataaatttttcttgccgcttacgcctggttgttctcccaccctgctctgtcctgctggtccttcagctgccaagcattggcaagcttcagaccatattcaccacactctagattcactctaatgagttcatcccttggccttgatttccaccagcagtagatcacggcttaacatggcaaatctttcacatacggaaaaaaatctttcttgataattcgtgacagatgagaacaaaaaattgtacaattcaggtatatttagaaagttgaaatcaaattcattttagaagtactcttagaggtagctcctgtgttttgtttgcttgtttatttgtttgcttgcttgcttgcttgctttcctgggccaaagtgaaaaatgtagttcagaccagaccacttttaggaagccatgtaaactgttgaagcaacagtcatcatcagcatggtataaaactagcttttcaaagatcagggtcagaagaaagtcttgagctatgcattttatttattattattattatttttttagacagggtctggttccatcgcccaagctagagtgcagtggtgccatctcagctcactgcaacttctgccttccaggctcaagccatccacccacctcagctcaacctcccaagtagctggaactataggcacacaacaccatgcccggataatttttgtattctttttagagacagggtctcactttgttgcccaggctggtctcgaactcctgagctcaagcaatctgcccacctcggcctcccaaagtgctgggattataggcatgagaaactgcacctggcctatgtactttcagtagtgcataggatggtaaacacagtcagcatggagcttatggagccctgttcatgcctcaggaactatgaaggggattttcatatatatccgcacatattcctggggatcctggaaggtaactgtgatttgcccaatgctggaaatgaggatgatgcagcttaattaagaaacatgcccatggtggcatcatgcttgagtgggcagcagagttggaattgcatcccatgctcataaccttaaaccactctgctatgtcacaccctaggctggaaagtgggggcccaacttagcatgcggtctctccaggtcattagacactgctgggacctattcgagtgaataccaactcatggttttttttctgtttgtttgtttgttttttatttatttatttgaaatggagtctactctctcacccaagctggagttcagtggcacaatctcgactcaccgcaacctccgcctcccagattcaagcgattctcctgcttcagcctcctgagtagctggaactacagatggcagccactacacctggctaatttttatatttttaatagagacggggtttcgccatgttggccaggctagtctcgaactcctgacctcaagtgatccgcccgcctcagcctcccaaagtgctaggattacaggcatgagccactgcacccggccaacaactcattttaaagtaggaattgaaatgagcattcagacaacaaatttggcccatgttacagggaaactctggggagcccacagattttctgtaattctcctgtcattctaagaacatttgaagacaagaatccacatactcacatggactcctttgaaaaaattacaatggattcaaattgttgctgaaagttgctttgactagaaccactaacttagttatcagaagctgacttgactgacctactgcacccgaccagagcttcttctctgcttcaggggctaagacaatcatgtcagtgtgccttggctgccatttttgtgatggccactgctatccacttgcaggacagacttaaggaagcagacttctcttaagatgattagagaaagggaaagagaagcttctttaccaatctatgtgtggtattttctggaattaagggcagagaaaagggaagcttatgaagaaagtcagggccaggctaaaagactagagatgaaattctgaagaaccgaaataaaaacttgtgtggatgtctgaatctcactatttctaatcctcaggagtaaaggccctgacttgcatttcctttataaagtgccatagaatttttatattttatttcacatggtaaatactctgtaaatatggtagaatgagaaaatgaataatttaaaacattgaaaatagggcctttgagaaaacccttaaaaggttggatttgtttaataggaagaagcaaaggctgagaggtaattcgtggtgaaacaaaaatattaaaagttttaataataagagtatgtaaatatactttctttctggaatagcctaagtgtagttgtatctacaagaaagagagtaaaaaatctcatccttttcaaagatgcacatttattattgtcatcaaaaccattaagtgttttttggcatgagatactactatattagttgctatgcggagcaatttggaccgaaatcccacatttctttaggaattatagcctcattcctgcagaggctgctgtagcacagtataacaaatgcttgctggttgattgatctcagagaagggaaaagaaaaaaagatacagctgaagatgtatagggctccaggcatgagaagagaaatgtgaataaatagatactggaatatttacattgaatatgtggtaaaagtaataagggaaggagtgggtgattgatacccagcagaagctgtcaaaatacaaaaaaaagcaagcccacaaactatagggtcacttgttttataaacctgttattaaatcacacaatagatatttcataaatacctattacccttacagaacaagtaacaaaacataatgaaatcaagttatgtcaggattttccccatgaaattaggtttctcaaggaaaattattcaattcatttaatgtaactaagacatttataataggattccactgtattgcttttcccatttttgacaatggttccatgaaacggcaactcactaagaatgtgttcaacagtggactaagtatttaaagcttttggtttcaaattcaacccatggcaagtcctctccgaatatttcccttgctttctccccagagagctcaggagaaacagtaactaacataatatataaataccagataacaaagacatccagaaaatccctttgaggttaccatcagttctagagtggcttgcaaaatgctgctcagggaaaagtccagtgcagtggaggccacgccatacgcgcattcattccatggtcattgaagtctacgtttttgtaatgtggattttaagcagggagtcaaaaattcagtgtcatcctaaatgtattgaccatctgtcctctaagttttctgggaaagcaggaccaaaaatcatttgcatcctcccaagtcttccatagagccataaatactcaagaggcacagagacagggagagaggaagagattactaatcccatcaacaacttgccagttttatttttatattttaaaagaatacttgttacccttgtctctgggcacacattcagaagaatggcttgccaatagtttttggtggtttcaagggaaggtttaagatttattaatacaaaggaaagcaagtacaagcaaaagacactcgcattaactacctttatgtgctttctgcagccttgcagatgacaggaacatcaatatccagttaactttgcagagcagttagttatgttgttaagaggttacgaggaaaaaaagtacaggctggcaccagagccaactgggaagtcagcctaaggcctgcagggtatctgaaggcgcaaagccccatcggcactggttgatccagtagcaaaatgtcaaactaatttatattcaggccaggaggttccatggactaaagaaaaatgaataagtagtataaggacactatttttcaaagctacattaccctcaagtgaattaaaagttcattggtgaaatcaccaatgcctctcaaaaattttgaccaaatgtagtactttggcagaaaatgactacaaagtaaatgctttggtggtaagtccaaaggaagctgagtgacttggagatggtatgggagtgtatccagaaacagagagcacaaaatgtctttgaaagtccatgttttaatatccttgtgaatttggcattctacctcataatattgccttgtttaaagtgaaaatgaagcgtatatactttctttctggaatagcctaagtgtagttgtgtctcaaagaaagaaaagaatgatagctcaaagatgtaaaatgaaatggccacaattttttgctacatgcagtatttttgtataagtgaacaactctggcaaatgattaaaaattaaaggttccatttcctattgagttttatagttcaaatgtaatcccatacttgaggaggcaggagaatgacttaagaccaggagtttgagaacaccctgggcaccatgtaacatagcaagacctcatctctatttttaaaatttaaaaattagccagacgtggtggtacatgactgtagtcctagctacttggggtgttgaggagggaggatcacttaagcccaggagtttgagactgagtgagctatgattgtgccactgcactccaggacgacagagcaagatcctgtctcaaaaaagaaaaaagggggccagggggttttgttgggagttgatgtgcaggaagacacattccttctctgtgcctcactgctcaaacccacttggagaagcctggctgtgatgggaaggcacacattgacaatcaccataagtttctttgccgtgattctctttaagccattccacactccaattctgtgagaaaaaactcataagctctcatccaaaccaaactccactgtcaacagacctatacaaccagttatgttaaggacggtagttcaaagatgtaaaatgaaatgccacaattttttgctatgtgcagtatttttatataaatgaaaaactggcaagtgattaaaaattaaaggttccatttcctattgaattttacagttcagatcaatatgttgtgtcatccacatccccaaatacaaggaacccactggattccaaggggcatgacaatgcatattgtaggcataggaaagtggacaagcggtacttgcaccttctcataactttttaaattgaaataaaaaacaaattgaagaaaatttcaaagggaaaaaagtgataaaatataccttcaggttctctctagccccaatctgaacaagctcttttaaaagccaaagggaaaacaagtatttttcctcatctgtcttgaggtaacccagctggtgtcattattaactggtgtttcagttggagtgaagaaccaaaactagctgctcctattcccatgctgtttggaatggcataaggatataaaacttgacatttcttttttgttgttgttgttgagatagactcttgctctgtcacccaggctggagtacagtggcgtgatctcagctcactgcaacctccacctcctgggctcaagcgattctcctgcctcagcctcccgagtagctgggattacaggcacccgccaccatgcctggctaatttttgtatttttagtagagacggggtttccccatgttggccaggatggtctcaaactcctgacctcaggtgatccacccaccttggcttcccgaagtgccaggattacaggcataagccaccacgcccggccaaaacttgacatttctaatgcaccaaagaggagttaaccccatgaccaacaccatattttaagtctaaacggcaaggacatcctaaaaagcattgccatgaaacaactcctcagagagtgaggaaggcttaactcatgactcctttaaacacgttatgcgtaatacaacaatagcagtaactactctggaatggtgaactttttttttaattgggctatgagaggtcatacactctcttccaaggcaagcagcagtcatttgcgtaattgtgcaaaaggcactctttctgatgtgatgccaaaagattgacatgatgaaaagcatactttatagatgaccttctataactgactaacatcaattgattaacagtacatattcctactcagaacatgtacgacattcatttctgaaacagatgattctatttacttctcatcttcagtcttattagttccaacacagggatgatagagcttcgacttcatagatttgttgggaggaagacgtacgatacaacatgctcagaaaaatttgttggcagttggcatattgcaagaaggcaataaattttagctgctattgttgctattattgttgtttgtgaagctattgagaacattatcaaaaaaaggtaatgttctggccgggtgtggtggctcatgcatgtaatcccagcactttgggaggctgaggcaggcagatcacctgaggtcaagagttcgagaccagcctgaccaacatggagaaacaccatctctactaaaaatacaaaaaaaaaaaaaaattagccaggcgtggtggcacatacctgtaatcccagatacttgggaaggctgaggcagcagaatcgcttgaactcgggaggcaaaggttgtggtgagccgagatcacgccattgcactctagcctgggcaacaagagcaaaactctgtctaaaacaaaacaaaaagggtaacgttctgttgaaaattgtcatctttgaaaattagtaatggctaccatttttaaacacccatcaaatctcaagcattacattagtgatatttagacacattatctctaatccttgcaagaataacacaaaagtattaagataccaatttcaaaaacaagaaaactgagactgaaatacattaaataatttgcccaaggtcatagaactacttaaaaattaattttcaacaaataaataaaggagttctcaggtaggcaaaggcttagttttgatgtcattattcttgtctctgattgtgtccactcacacatgggtatttgtgtgtacacacgtgtgttcacacactccaaaagcagcacagcatattgaaaactgtatgagctttggagttcaacaaacatgaatttacacacagtgtccagggcttgctggctatatgaccctctctgcatatcactgtctttaactgtagaagttgctgaataactaaaatccaaacattccctcatcctcaatcatatatttggaaatattaaacccaaagtgtttccatcttgttctaaaaaactctgtaagcatcagggtactgaagcaacttcaactctttcagtgctgttgtgtctgagcattactacattttagttatcacatacaaactcataatagaaaagatgttcaagattgtcttgcttcattaaaaaaaaaaggcagaaaacacaactgactacatcaatacacagggtatactatttaaaaaattctcttggccgggtgcactggctcacacctgtaatcccatactttaggaggctgaggaggcaggagaatgacttgaggccaggagtttgagaccaccatggacaccatgcaacatagcaagaccccatctctattaaaaatttaaaaattagccagacatggtgatacatgactgtaatcctagctacctggcagggggctgaggagggaggatcacttaagcccaggagtttgagaccgcagtgagctatgattgtgccactgtactccaggatgacagagcaagaccctgtctcaaaaaaagaaaaaaaggggagtggaggggttataactgtacaaatctgatcttagaccaatgtataaatctggaactatgatctctttgttggtaaatgcttacaaactgaagggtctgggacactgcaaaaatccttaactaaccatggatgctactcgatagaagacgtccacaggtgcagtggcccaggccatcagagtcatcagaagaagggggtgattagagcccaagctttgaattcacacagacctgaattctaatcctggctctgtcacctattaatcaggtaatggatgttattattagatgatttatgaccttgtcataaacccaaaggagactccatagtgcaaggattcctggtgtttcaaagacccggcttaggagtctcctgattcccctcctccaccccagctgtctcctggcaacaacccaggttgctgggccaagctccagagaagggcacaaccccatgtctggttcccatcaccttcttaactactcactttctccctcctctctctcacatcctctctactcaccactcatttctaacccactacctttcactacagtcttggaaatatttctctcttaatctcaggcaatttcttttccctcccatttcatgtataagtaaacagcacaacctacaacaaaaacaaagataaaaattaaaagtctagagtgttcagggaaattgggcttaataataataagcatccagaggttttcttcggaatctctataaaaaccacatcgtaggtaaagcctggactttgaaaccagacaaactggtgttctattcycagctccaactcttaccactactgtgttcttggaaaaattacaaaacctgagactctttttttcctgtactattaaagtaagaaattaatgagataattcacataaagcacttggtacagtgcctacaaggtaagcatgccatgaacattagctattattcatatgattctctctctcctcctatttcttgcaccttgtttttctttgaccactaggattgaaaataaaattttcacaattttttcaaggtaacagtatgtagagtaagaaaaccttctgttttgctatatatttataagaagtcagctttactgtgcactattgtgagccagcctaggaatctaaacgtagaagtgacgaggaatggagggtgggcagctaaatatattccaggttccaaattcagcttgacaaactagatcacaacctgtttacaggtttatgagagggggcttcagagtcagcccttagtggaaatagggctttaattcattaattcattaatccattttaactgttccccacattcttacccagctccattttacagattttgagacagaactggaaggggattcagaacaagtctggaatcagaaagacatggagctaggctgggaggcttctaggagagaaaggaatcttggccttgatcttgggtgaagaatgaagaatggagtagccagagcaaagactaagaaaaagttggtagaattgtgttgaaataatacacaagttttctcagtgtaaacagtaagtagtatgtgggctcttttgaccctcaacaagtcccttaagcaatgaacttggaagaacagccttctagaacagcacctccagtggtgtttccctgctcaccaaatgtatctgagctttcaaagcatggaatttgaaattaaaacctttcttttcaggctaccctcttttcatcattcttccatttctacttttctctttcctgtagccctacaatctagtgtgttctagtgagtaggtgaaaaaaaatatacagaaaaaataaagaaactataatcttagaagaaatgatggacattttcattgtaaattctcttggaagagactactaagtttctattaacaaatgcaaactatccttattcccacttatgaaagtaaattgtctccttctcatatttgaatgtgcccttgggtagaataatgataggggcatcatcatggcttttggtaggatctgttttgccttcttctcacctattggttatgtgtgaaataagataaattcctcatataatgtatagcccctaatcaagtattgtattagtctgttttcatgctgctaataaagacatacccaagactgggtaatttaaaaagaaaaagaggtttaatggactcaccgttccactaaccrgggaggcctcacaatcatggcagaaggcaaagggcatgttttacatggcagcaggcaagacagagaataagagccaagtgaaaagggaaacgccttataaamccatcagatctcatgagacttattcactaccatgaaaacagtatgggggaaactgcccccataaatcaattatcacccactgggtccctctcacaacatgtgggaattgtgggagctacagttcaagatgagatttgggtggggacacggccaaaccatattaagtatcatattaataaattaagatatggatctttgactaggtgtgttagtcttgagtagtgtatcaaaacatatacatattttcttttataatacagtaattctataaattcaaatgggggcaaaattttgataatttatgtcaaggcaaatgcaactaaaagaagtggaacatttgtagagctaaagaaataataaaatactcaagttttggaactccttgacttacatgccttaaatctgagtcagacttccctagataccagtgttatggaaaaaagaatttgctccctcccatccattccactgccagatttattatttattatagctcttttccattttagctccctttgtcattctaaggtatccagaagggaattccatattttactatttcgagtagatttcagagacagaaaaaatgatgggaatttggcccttaatagaatggtcttttcttctgcaattatataaactcaatactgatttatatttcctaacattgctgtctttcctctgtttaccattcatttatttaacaaacatttattggcatggtggagccacagaatgaacaaggcagacacagtccctttaacactacaagttacagggttagtcctagcttcagatgaagctttaaacatcactcatatgacatctttcagccctgccttctcagggttgcttccattctcagatagatttcttttcacagttcccagatggctcccagcagctcctggagctgcctccttacttatgcactactagtcagaaagaggaaccattccccacttcccccgcatctccaccctcactcaaagaaaggacctagacttgagtattgttggtcccaattggtctgactcaggtcatgtaccagtgcctaagcaatcaatgtgatcaaggacatgggatatacaacaggtttaaactcatcagagcccattcttgcaaacagtcagagcccactgcatatggctgagaagctcagggcacttctaggaaagaaaagaaggcatgaaattgatgctggaaggaacaagacatgtccactgaagtccctgtccttacagagcaaaaagcttctaaagagttggcagaataatgggaactcaccaaccctacacacacatgaatcatttctgatagatgagggctaacaagtgcatagtcttgggaatcttcccacagcaacaggatgcagtccaagtgttctgttaaaaactaccaccgagcagccagcatatgctcaacactgctggcctctggcagtgatttagaggtgaaaccttttgtgtccaattagtctacgccttgactcatgcagtgcctaagaattcacctttatttatgaagttcagggtctcagataaatttgacaagagctgctgaaagttcaagtgtttgcaaggatattagttttctcatttaatcataatttaattttgattaacaagtggacctagttagagaaaactgaaaatagctccatttgaacctcatgttagtagaaatattccttctcaatcttgttttccaccttgaatgctggatttatttctaagcttatatgttatacctcatyaatctaatgctctaagtcagtggttctcatcctcggccacttggggagctttaagaaatatgaatacctaggtctcaaccccaaaacatcaatgcctggatatcgatagattctgttgtaattggtccagggtgcaaccaaggttaagaaccactgctcttagtagaaccacgttagagacaaagataatgtctcctaggaagcatgtcaaatttgcacaagcaacaaatttaaatgctgtagccagttaggaaacagttaaagttgacccaggattaaatcaaatttggaaatagggggaaatgttctccacatggacagcaagtcacccatttgtgcatgcttttgccccagctagacacatctcccacatctctactgctaccacctggtctaagctaccatcatcttttccctgggccactgtaatatgctcccaagctataaaatataaaagctctgcaggccattatctgcttactcccctcattcactacactccagccatattgacctttctttttgtttgtttgttttgttttgtttgagacagggcctcactctgtcatccaggctggagtacagtggcccgaacrtggctcactgcagccttaaccacccaggctcaagtgatcctcccacctcctgagcagctggaactacaggtacatgccaccacgccctgctaatctttgtaatttttgtagagatagggttttgccatgttgcccaagctggtctcaaactcttaggctcaagcgatctgcccaccttggcctccccaaagtgctgggattacaagcgtgagctactgcgcctggcctcacatctttcccatctcaggacctctgtatgtgttttttcctctgcctagaatgtccccccatacacacacacacaaatacaccaggacttttttccactatgcacacaaacactgtgcttgcacactcaacttactgctcagggctcagtttcaatgtcacttcttcaaaggggttgtccctgacccctaatctaaagtgagcctctagaggctgggtgcggtggctcacacctgtaattccagcactttgggagaccaaggtaggcagatcacttgaggtcaggagttcmagatcagcctcgccaatatggagaaaccccatctctaccaaaaatacaaaaaattagctgggcgtgatggcaggtgcctgtaatcccagctacttaggaggctcaggcagaagaatcgcttgaacctgagagggagtggctgcagtgagccaagatttcaccattgcactccagcctgggcaacaagtgaaactccgtctcaaaaataaataattaattaattaatttaaaaaattaaaaagttaaaaaaatcaactgagcctcctgttttacattcccctygagtcctgttttatattttcctagcaaggggttatttgtacagtatctggctccccttccaaactataagctccctgaaggcaaggataattctgttttcttcacccatggatgccctagcacccagctttgcccctggtccatagtagattctcaatacataattattaagtgtaaagaaaagaagtatgttttattgtaccacttccttaaactgaaggacattgtaagaaatggcttctgaagtatatagccatagttactcaagatcacrtttagaaccttgttcactacattattgtaagtcttctctttacaaaaacccatagaaaagaatttttcacagtctcaattctagaaatagtgtttttcctgagagaggaacacaagcctaagcttcaacaagctctctgcagacaaacccaaagagaaaggggaaggtgctgagcaatgcatacccagttactgctcccagatttaccaatcagatgattctctcactccactgggggcattcaagcyaagtgtgttgaccctaagtgatttccgtcacatggaaatattacgtcaagggaaaggaggtcctctctcccaaacatcattgacttaataacatttatttagtaagtattttataagataaagtctctattcattttctactgcttctgtaacaaattaccacaacttattattatcttataattttggaggtcaaaagtccaaaatgtcacagtgggtcacgcctgtaatcccagcactttgggaggccgaggcaggctgatcacttgaggccaagagttcaaaaccagcctggtcatcatggcaaaatcccatctctactaaaaatacaaaacttagccgggcttggtggtgcacgagaatcacccgaacccaggaggcagaggttgcagtgagccgagatcacgccactgtactccagcctgggcaacagagagaaactctgtctcaaaaataaataaataaatagagtccaaaatgtgtttcactagactcaaatcaaggagccagcagacctgcattcctacaggctccaggggagaattcattccttgcctttcccagtgtctagaggctgcctggctcatgagcccttccacagcacctcaacctctgcttctattctgacatcatcttctctgacaggttccaggaactaggatgtgggcatctttgggggaccattattccacctacaatagttatgtcaaataattagaggtctgtggataagccaaggtatatatttatgatgtgattaaaaccatatccaagaactgtctactrattcagtatccggtatcatccattcagaccagttcatgaattcaaacagttcagcccaaagacatgatataaaatacttttcatcctgaaaaagtagcccagggatattttcaaaacgttgttttaaccccaagaaaaacatccttcctaatcaatagtcctctagtgtgcagctgtgatgaaagaagatcttgttattcctcctgcctagaatttactactatctttgttgtcccccaatcccccatacccctgactctcactcctagccatctcctaatcttctccctcactcctccatgccttcccaaaaaggcaacagcatcaggaaagggacatgaaaatggaataagatatatctcttttttctttaagagatggggtatcattatgttgcccaggctattcacaaactcctagcctcaagcaaccctcccacttcggccttcccagtaactgggactacaggcatgagcctccacacctgatagaagcacctcttaagaataggaacatgaagatgagatcatttctaacagacaaattacaaaattctctgtaactatttargttggcatttggctggatttttagacaatttttctagctttccttctagccctgaatctgtatagaaattgtttatatcacttgcctattctttcttttcttataaactcttaaagatgaaggcctctatcattctcaaggtcatgcaaggggtcattcaatagatacatgtctgttatcggtcctgagcctaaggctgtcatytgcacatgccaactcctagttcctccatctgctaaaagtacacttccctgaatgctttgaaagcatataggctttagataattttttttagaggcagggtcttactctgtcacccagactgcagtgcaatggtgcaatcatagctcactataacgtcaaactcctgggttaaagaatcacctgcctcagcttcccaagtagctaatttttttttttttagagatggggtttcactatgttgcccaggctgtctcaaactcctggcctcaagtgatcctcctgccttggcctcccaaagtgccgggattgcaggcatgagatactgtacctggcccctagataaaatttgaaatcatttgcttagttattttcttgtattcatctaggacacttccccctccttacctatctctgctttcctccagccatttctatttttaggcaggttagcacttattgatttgtaaggctactcccttcttactgtttctaagatcatatgacaaaaacaactagttacaaatgccatggtcaaagagcagaagatctgatccttgcagcacagtctaaaagagaacattttttgttgactggtagagggtcaaccaatgtgatagttaaaaacacacacacactgcttgagtttgtctcaggaggtatggctaatatccatttattttcactaattcttaagtctggaacgtaactagcaggtatgttctgtttttttctctgtctcttcgctgggagtcagatttggaagcagagtcactgcagctctagaactgtccctgacagtgttcccaggcagcacagtggttggagtgatggtagagccagccgcttgtggaggtgggggtcaaggtcttgagctgatcccccaggacctgaaattgacaactgcaatggctgccttatgtcacacaggaccggatcagcattgtctcggctgtcagtgctgggaactggccaaacactccatcactgtctatcttggagtgagcccaagccatgggctcaatagccttccttattttctagaattgatcagtttcaattcaacaactgggtctcctggcatgcacaccagaaagtatcaccgtggccttctgctatgatttcctgggtgctgggaaagctacaagactccacaactcccttccagtccaccagatgctcctgagatccctagcagagctttatccgtttgatgtgatcccctgagaaatgtatgtgctcctgggggaggggggcatttaagccatccattcattcagcaaacctcgttgattgaatactcattacttgcaaggcacggtgctgggccttagaggcttctctttgcctgtaaggagttcacagtccagtcagctattaagcatttgtagtagctcattgtgtgggggaaaaaagaaaattggatagattttagtcaaggagaagagagaagcgggataccaatttccaaggctagggaggagaaagcagggaaagcggagctcacccagagaagataaacatgtgcaacttccccagctgctcctaaagccatgcccacacaggctgccatggtagacagatggacagatggacagagagcaacagtgggtacttccacaggtccagaagcacatctttaaaattatgtcagagaacttcaaaaggactcttgaagtccccatatagaagaaagcacgttgggtttttatagcgatccaagctgctgggtacaatctactgaaatattggactgaacaacagaaaagcggctcttttcccagccttcttggcccccatcgctcacttccctccctttactcacgctctcaaatgttgaggccatgatccccttaataatgacccaggggagcaagagaaaattttccaagacctaaggttactttgttataatttcatctctttcatctctttttggccaaagtcccttctacgcctcaaatccccccctgaggtaaccatcagccctcttgggaggttcttcccacagcaggtccctgcagctctctgcaggaattcatccgggaccatgcccccaccctcttaaggtctggtgactagtgatggggcaaggatgagcactccagctgctgtcctgacccagttgcctctctgcatttcctttgtggaatacactgctccctttatacgtaactgtcaaccaccttaggggctcagagaagctacatttaagggaaggatgagagccttgtctcttgaagtggggtctgcagaccagtagcaagggcactacctagaagcttattagaaaaatagattctcaggacccaccagaccatctgaaatagaaccttcacattcacaagaaccaccaccaccacccagccccacctccccccagccttaccctcccccactccatgctcctgattcaaatgcacttgtgatggcagcaggaggagaaaacagctccagccctgcttgccgccctgtctcacactcaactgaagggccaccaatccaggtgtgagctttcctatctctgttttggagccacacatttcttgcagccttaagaagaggctctggccttgacttcaccaagaatgccaactctaccatgaacagaaggatattctgtgtcactggggcattcgcaaatcattatggcacctttatccttttttttttaccttttttaagagacagggtctcactctgttgcctaggctggagtgcatggagtgcagtggcccagtagtagctcactgcagtctccaactcccgggctcaagcaatactcctgccttagcctcccaagtcgctaagagtacaggcacgtgccacctggctaactgttttttgttgttgttgttgtttgcttgtttttttggtagagacaaggtcttgctagttgcccaggctcttcttgaattcctgggctcaagaagcgatcctcctgctttggccttctgaagcaccaggattacaggtgtgagctaccatgcctggccacgtgtttatcccttattcctcaaccacatgcttccatagctcatccctgtgtcacttactccctgcactatatgccaaccgggggccggcatcagatctctgtgactaaaaatattcttttatttattatccatctgttgaatccctatagtgggccaaatactctgctagacatttgtcctttaagcaagagcttgtggatcagagtgcacagtcccactgtgtagccctcattagaaatttgtgattggaggggagggagaggcgtaagcttcacaagatagggatgccagagcgacagcaaaggtagtcagtatgctactgcagctcaccccaatcatactcacacrtggctcttctgtaacatcctttgtctcttggccagtcccttcttggagggcagggctcagtaatgtaccagtccccccaggaaagaataggctggaccgaagtgacaagagtctcttggctgggtgcagtagctcacgcctgtaatcctaacactttggcaggccgaggcaggcagatcacgaggtcgggagtttaagactagcctggccaacatggtgaaaccctgtctctactaaaaataccaaaaaatggccaggcgtggtggctcacgcctgtagtcccaaaactttgggaggtcgaggcaggcgggtcatgaggtcagaagtttgaggccagcctgacgaacatggtgaaactctgtctctactaacaatacaaaaattagccaggcatggtggcatgcacctgtagtcccagctactcaggagtctgaggcaggagaatcacttgaacccgggaggtggaagttgcagtgagccaagattgcaccactgcactccagcctgggtgatagagcgtgactctgtcccaaaaaaaaaagaaaaaattagccaggcatggtggcacatgcctgtagtcccagctactaagggggctgaggcaggagaattgtttaaaaccaggagctgraggttgcagtgagacgaaatcgcaccactgtactccagcctgggtgacacagtgagactgtctccaaaaaaaaaaaaaaaaaaaaaagagtctctttaccagctcaccccgacccagtccccagcatccctgacccctatccactcaagagccaagcccagctcaggctgagttgcccttccaggcagagccagcttagacaagaagtttaacaatcctccagaattcatttgggttttcccagatgaagggtcataggtcaagactgatggaagcagagagaggccacaggtcagaaagttatctgagcaacgaggtcaggttagggcaacaatgaagataccgtggaagctgtgagccaggcccgaacagcctaggaaaccagactgaaccagccccttcttctcaggaggtgctttcaaagatggattcaggttacagtagcccacggctccctacatcctccttccttcctcaccatattccttccccacccaccccatccttctcccctgcaaatatgacttttttcccctcctctgattttttttttcacaaggctgtcatttctctgcagttactggcaaagccactgaatatcacccctccccagcctttctcccgtgccaggtcctgaataccttgctccacggggacagaggaggggaggtgatttcacatccctccatccaggggaagtctcaacccctcatccacagggctccctggcacaacctcactttgcctctaacccattagtgactgactccaagagggctatcatctggctcacacctgtaatcccagcactttgcgaggccgaggcgggtggatcacctgaggtcaggagttcaagaccagcctagccaacatggtgaaactccatctctactaaaaataccaaaaataagccaggctcagtggcgggcgcctgtcatcccagctactcaggagtctgagacaggagaatcgcttgaacccgggaggtggaggttgcagtgagccaagatcacgccattgcactccagcctgggcaacaagagtgaaactctgtcccaaaaaaaaaaaaaaaaaaaagggctatcatcttatttctaattccctttcctatcctggagcctttaaccttctggtctaatagagattgcagtttcagccacccatgctagccttgacagtgtcatactttacgcagctgagcatctacaggttccaagagaaagatatgaggttagtataataagagagtttagcaaataaccccttgaactgtttaaaatatatatatatatatagtattataaatgttctatgttgggactacaagaaaaagtattaaattataaaagtttatcatcattccccttctattttcccctcctttgactgaggagagaaagcacccttggccacccagcttccctctccccaacagcccaaaggagagtatgagggtaccagccatgccctgggctttcctgagttgccagaaaggagactaaaccctttacacaggcatgctgttaaagagggtagaagcaaagcttcaaggctgtggcaggccatgaaaagttctgagaagaaggtggttttaagaagcagtgctatggttcaggatttgaatccactctggtgtctttatctttcaggtgagatcagaatggtttacaagcatttttggctgcaggtactgtgtgtttccttgtatgtgaagccaccatgagaatgtaccacatggttcccatttatatttgagttgcattttttaaatgctttgttttgttttgagatggagtctcactctgttgcccaggctggagtgcggtggcatgatcttggctcgcagcaacctccgcctcccaggttcaagcaattctcttgcctcagcctcctaaatggctggaattacaggtgcgtgccaccacgcctggctaatttttgtatttctagtagagataggattttgccatgttggccaggctggtctcaaactcctgacctcatgatccaccctcctcagccttaaatgcttttaaatgcacagaaattctagtgaattaattgtaccttacctaaaactgggcagaaacacatcagcaaagccaagaataaaaattcaaatcctcagattgctaatccagtgaacctactgaccccaggagccaaatatgcacaaggcatctttctatctttcagtgacaacgcataacataggttctgaaaggagtcaacattaagtgcatcctttcaccagctttgaaactctccttaagaggagtagctagccatgcactttatgttgctgataagcatcccaaaaattatatttttatttgtaggtgctttgaaggaaaacaattaggaaaaatatgtgaacaaggacagagaagtggtagacttcttaccttatacaaattctgagaacatacttaataataaaggtaacagtgaaagatggtcttgcatatacttattgcagaaaggatccaaccrctgttttatcgcaaattatcatatatayaatcctccccaatcataattaaccatcaaatgtgaatcagcagacatgaatatttcttgacatatattaagaaataaaaaataaggttacgttatttttatttgaaaagaacctatgtttcgttacctaaaaagaacccatattctggctggcgatattagaaaaagataaatgaaataaataaagggaaaaaccacaaatacataaaattctaggactgaataacaaagagacaggcaagtaaatataatcttaggatgacaaccatgcaccaaagtagaaaacagagaaaaacagcttaatggtctccaaattatattgtaatcatatggaaaagaagttattgagagcagaaacacacactaaatattcacttggctagtttatctcactatacctagacattgtcaataaagggctatatttagaacctaatttactatgttgtctttatagctcatatatttctttcagtttacaactaatacattttggcaaattcccacattctcaaatgcacaatattttcttggtacctttggaaagcaagtataggtagagcattagtggttcatcatagttttctgaaaaagatgagttgctctgcaatacacagtttataaacctccactgcagcagacctatttatcacacgttctactcgtaaaattataagcttggtcctacagcctaaaataaatctggataagcctaagacgaaagcttctgagagtcaatctaggagaaatgatagaatttaagtgatgggaggtaagttaaatgacatttaatccaatctgtatatacatcaacaacagcacaataaccatgattgctgagcatccaaatactagtttttctaactgttttacatgttcatgatagcaaagaatggaaaaaataaagtgttttctgtggttattttacatatacatgtagaattttatctcctgctatctgcacattatatcctgaatattttaccacattccccattattttttaaaaggttccatcttaaggctgctccgtaactgttaaggaccaatccctgattgttgagtgtgtaaatggtttccaactgttagctactataaacactttgatgacgaatagacttacatatacacattgttgtacacatgtacaggttttttttttttaccataattaccaaatgccctcttgatataaatacctgatagtacttatatcaacactacattagcttttattctgtcatgggggatacactgcagaaataagactgccgagtcaaatgtgaaaaagatgtttcctgtttaggctttgatctatattgccaaatggctttccaaaaaaatgaatccataaatttgcattttctccagcagtgtgaagtgtccacattcaccagcactgggtatttcttctcttcgtcattgccaatttgaatgacccaaggttgtatctctctttaatttaaattgttttcactccaatgttaatttgccctttatatttatttctttgtaaattgtctatattctttctttttttcttttgggttaatccttattgattagaaaacctgtttatgtatcaaagatataatcttctttgaccctcatatattgtaaccatttttcctggtgtatttacctttctttttgataacatcaaaagttatcttttctataggacagtaatcagttttctattgaacctaaccacctatgctaacattgccttttttcttttttttccttttttttgagacagagtcttactctgttacccaagctctggagtgaagtgccaaaaacatggctcactgcaaccttgatctcctgggatcaagccatcctcccacctcagcctcccaagtagctggggctacttgatacacaccaccatgcccagctaatttttttttttttttcatgttttgtagagatggggtctcactttgtttcccaggctggtctcaaactcttgagcttaagcaatcctcctgcctcagcctcccaaagtgctgcaattacaggcatgagccactgcacttagcctaacattgctttttaaatattataaatgcctagttcttcaaaatgctctttgaacaagatttaccatcttaccggttcactcaccaatgagttaataaatctttgacgtgctcatcctatattcgcatgaaagctgtgtttttaactttcctaaaattatatttctcgctatatccagaatctagtgtttcttcctccaacaaagcagctttgtggtactacatacaccacagtcaggcatgcctcattctaactagcaaacacagtacactagacacaataatgcagatagctggttatgtgctagcaactgaacggcacttggaggcgtccctataactgacctgacatttccaacatttctcttgaaagccatcttatagtcatcatattgacttcaaaagaccactctcggcagctgagacagccaacccaatgaggaaggggctttgatggtttacagggcatgaacgacacttcctcatccagatttgcagaacacacactgttttgtgagatgactgaaatgctaagggaagtagacgtaagttctacctgagctattttctctctgggtggaactcaagacagcaagaccaggacttagacttcattagcatctcataccaagtcacaaaattaaccactccaattcactcaaagaagaaagacaagagagtaaagagtttaatggatttgggggaaaggaccttcattttacatacttaacaggtcactgacaacttttcacactttattgagagaaccctctgagccattagcaggtcatttgacctactctctttaaaacctctctaagctcagaaagcaacactaatagctccaggaatagaaggtgatctgagattttagtctgaccactgtctgccaggcagatttgctggctagaggcacttcccagcagttccaatcttgccaggagcttcaagctgcccctccgtacatttcgaagaactttattctgcccctggtgctgtatatctgcactgtgtattcagcatctattatgtatgccaggaactggctgtgtactctggggtatactgggcatggagactctgccctcaaggatcttcctgtccagtggggaatatcagacagatctaaatacctattatagggtagaaaatgactagtaattcacaaatattaagatcacaccatgtgccagttaatgtgcactgagtattcagtggagagcaagacaggctagtccttgtccttagaatgggttcagtaagcatttgctgaaagaggaaaaataacagtcgtttagtacccaccataggtcagactatgttccaggcattttctcgtttaatttccttctcacaagtactttctttggtaggtgatgttatcccccatttttaatagataaggaaagaggggctcagagatggtaggtgactttctcaaggtcattacagtgatgaatagcaatgataggattcgaatacagaactatctgacttgaaagatcctgctctttgaacctcactatgtttaccattagcattttatgacaatagcttccttctgtgcaggtgtgactgactgatttccaaattaagaagcctcataggacacaggctggcaagcaataaggcatccactgctagtccaagataaggactcacgaagccatgacccgtataaccctcaatgtttgattgacatttgatctatctctggctgtcccttgacatcctctggcataaactgtgtgatctacttatcttccttctgatagaacgagagaataaaagggccgagaagaggaaatgaaaagttaagggcacaagctctgccccctctttttaggattcctccagcagtactggccccacacacagacagactagacagccactacacagcaaagctgaacatccaacatggcttccacacccataatggcatcctcccttcccccaccattttgccttaactcaaggaaattattttaagtcattctcttttactcattttgaggaaaagaataattcaggacttcaaagcttaacaaagccatcagaatgaagcctcagttagtgagccagggcagctccaccctgtgtgcctaccttcttggcatcatcttccccagtgcaccctgggcagctcaggaccacagctgttcctcccccagtgcaccctgggtagctcttggccatcctcaggaactcagctcagacaccccctcctccagaaagccttttctttttttttttaatttcaacttttattttagattcagggagtacatctgtaggtttgttccatgggtatcgtgaatgacactgaggtttggggtgtgatagtaccgatcacctgagtactatgcttactacatacccaggtagtaagcatagtacccaatagttagtttttcaacccatccttccctttctccctccccactctagtagtccccactgtctattgtcgccatctttgtgtccatgagtacccaatgttcagttcccacttatgagaacatgcagtatttggttttctgtttctgcattaattagcttatgataatggcctccagctgcatccatgttgctacaaagaacatgattttattctttttatggctacatagtattccatgaggtatatgcacaaggctttctttatccaatccatcctggatggacacctggattgatttcatgtatttgctattgtgaatagtgctacaatggacatacaagtgcatatgtctttttgggagaacagttttttggtctttggtttttttggatatatacccagtaatgggattgctaggtcaaatggtagttttaagttctttgagaaatatccaaactgctttccatgatggctgaactaatttacatttccactaatagtgtataaggtttcccttttctccacagtctgaccagcatcagttgttttttgacttttcagtaatagccattctgactggtgtgagatagtattttactatagttttgatttgcatttctctggtgattagtgatgtggaacattttttcataaacatgttggccacttgtatgtcttcttttgagaagtatctgttcatgtctttattaaaaagttttttggtttttgcttcttgaattaaattccttatagattctgaatattatacctctgtcagatgtgtggtttgtgaatatttgctcccattctataggttgtctgattactctgttgatagtttgttttgttttgtttttgttttgctgtgcagaagatctggagtttaattaggttccacttgtccatttttgttttggttgcaattgcttttgaggacctagtcataatatctttctcaaggccaatgttcaaaatggtgtttcctaggttttattctagaattctgatagtttgaggtcttatatttaaatctttaattcatcttaacttcagtatatggtgaaaggtaagggtccagtttcattcttctgcatatggctagccagctatcccagcaccatttattgagtagagtgtcttttctctatctcttatttttgtaaactttatcaaacatcagatggctgtggctgtgcagttttatttctgggttctctattttgttccactggtctatgtgtctgtttttgtaccagtaccacactgttttgtttactgtagccatgtagtatagtttgaagtagggtaatgtaatacctttggctttgttctttttgcttagaattgctttagctattcaggttcttttttgattccacatgaaatttagaatagtatttcctaattctgtaaaaatgacattggtagtatcaatgataaaaagtcaaactttgtaaaatatttgaagagayttattctgagccaaatataaaaaccatgacccatgacacagccccaggaggtcctgagaacatgtccccaagatggttggttacagcttgattttatgcattttagggggggacagaagttacagagacataaatcagtacatgtaaggtgtacgttggttaggcctggaaaggccaagggcttccaagtcataggtggatttaaacatttcctgactggcaattggttgaaagggttaagctctgtctgaaaagttgaaatcaacagaaataaatgtttctagttaagataaggggagttgcagaaaccaaggttctgcaacctatctatataatatataggtagatagttatatagatgaagcctctgggtagccggcttcagagagaacaaacggtaagcgtctcttgtcagaccctgaaagtgccagactcttagttaaatctctcctggatcaggaaaagacatggaaaggaaaaggaattttctatggactgtagacaagagacagtttttcaaggccatttcaaaatatctcaaagatattttaggggaaaatactttggtttctttcaaggcttgttctctttcatgtgatgctatactagagtcaggttgcaatttggtatcttattactacagagcctgttttgtcagtcacaagacctctgttttcatgttaatgctggtcagctgtgcctaaattccaaagggaggagagtatgatgaggcatgtcccacccagccccgcttcccatcatagcctgaactagtttttcaggtttactttggaatgcccttaaccaagaggagggttccattcagtcagttggggtgcttagaattttgtttttggtttacagtagtttgataggaaggctgttgaatctgtattgctttgggcagtatggccattctaacaatgttgattcttccaatccatgagcatggaatgtttttccatttgtttgtatcatctataatttcttccagcagtgttttatagttctccttgtagagacataggtattttatttttgtgtggctattgtaaatgggattgtgttcttgatttgtctctcagcctgaatgttattggtgtatagaaatactactgatttttgtacattgatttttatatcctgaacctttactgaagtcatttatcaattctatgagccttttggcagagtctttatggttttctaggtatagaatcatattgtcagcaaagaaggatagtttgacttcctcttttcatattttgctcagaaagccttttctgatccagctccacagtgtgtgtgtgcagacatatgcacagccagcagtgcccctgccgcaagcccccacacccctcacactacccctgacacagctcatgccacactgcacagtgcccatgctttaccaggaaaccacttgtctccatgctccatggcaggaagaattgaatctggtctttctgctcctaccattgagttcagtccaggaacctggtagactcttgaagaaggaaagaacagaggaaacagaaagcttcgtccagaccctctgcccaccacctcaccttcctgtgctcacttcaggcctggtgaaattcccagggatcaaagctgccataggagaaaagggtgaggcccgaggaaaaacagactggagagaatgactgagaaagcaaggactatctgaacaggcactccagggctcccataacataggtcagagccattgcttaggaatatttgcagtgcccagtggggcagtgaggatgactcgacttctaggaatcactccacagatggccccgggcctgtatgtcatgagacaatctaaggggtctctggaacagctgcccctgacctgcatgtactgggctcacctaaggttccatgctgtgatagctggatgtctcccttcatgcctaatccatgacaacttagtgaactggtcattgaagaaaccatttaggcagatttcagaaacatctgactgggctctcttctaccattgtgcatgaagaggaaaaattaaacaggacaagagctctgggccacacagcctcacctccattcctattgctagcctgacttgtgaaaggaagtgaaaacatttaaatgtccttcttctgtcagcatggtaaccggggtggacggagctgggtgtaccattttaaaatacacatttaacagctcatctgagcggctgcagccatgttatcaagctgaacacacgttgatctgagtagattataaaaatagttcccagtgtctggggacgtagcgcttttaaacaagtgctttgcttttcaaagaacgagccattaagaagttccttgtatacatgtagcccatgaacctgaaaagaaataaaagtaaaatcaataccgaatcagcaactctaagcagcaggctagagaatttggctgttagagatatggttataaaagattgctattcagtttatctttcatttcctgcacagctaatgataggaggaatcaaaaatcatcttcacactgaatttgcacattttgacaagagaaaaaactcacacttttcttcatattttatttcctttttccaaaaagcgattcaattttttttttggaaatttaaatttgctctttcctttcacgaaaagaattctattactcctgcattcaatctgttcaatctcagtttagtttcaagttgagactttcatttccagacatgtacagagtggttgctgtccctgttttccttctcattttcagggcacaattccttggcaaagtagtaagctactgagttaagtcaaactcactacttttcaccctctaagcgccctttatgtatgtgagactgaacccatacaacatcttctgcaactaaagttcaaaatcataatgaatcaattgtgcaaaagcacaggaatatctaattttaaaaaacttttcaaaatgaacgctaagcccttctcatttaactatttgccttgctttataggctataaaagtatgtattaataggtgtgataayattctttgtttttagggttttataaatatttcaaagacaaatacaagcagagagatttctaatagacaagctacttacacaattctgtgccctgaaaggtgtctcaaaccgaagaaaagaaggcaataacctaatgaaaaaggggcccagcattctttttcatcagaagcttggtgttctagagccgaataaggatcagtgggtagcccacagagtgtcctggtggcaccaataatatccatctcttttgagaaatttggacttggctcagaccatctgccatcactgcagcccaaggttacctttcatttggaaattatgctgtcaacttggtttagaatgtacatgagcgaggcatatgcttcttcttgctgcccaaggagatgctggcatggaaacaatgtgaaggctcctgattgaagcttgtgtttatggactctcctcttcttttcttttctcttctcccctagttactgtgactgtgggaggcaagcaacacttgctyggactgtatgacaccgcgggacaggtacatttttattatcttgattcattggagggcggtggtgtaggggagaaaaagatccatttgcttakgcagatgggactcatagcacagatattacccattctgatcatttggggccaatttattgtctgcctaaatgacraccaaaagcacatyctcaatattttaaaaattacaaaaatctaaattgttacatcattcaaggcattgataggtaaataatgattcttttgactgatgaccatcaaaaaccagaataacagatwtgtgaccacgagtttcaatttctttctgtggaaacctaytccagattcaggattcataggtcagtttcataaattttagttccacacatkttttttcaggttatttctttgcccacgctttatttgaattgcctaatgaactgtgaaaaggcccaaaaagagattggtgggggtgaggggaggagagagggagaagatggattacgtgttggaaggaagaaaagccaggatcctagatgttttccaaaatgagagtcaaccctgaataactggaggttgactctaacttccctaagattcttgaaatattctcactttgtcaggactgtttcttcaagttggagaaactggcccaccaataacacaagacaacgggctaaaaccctcaacaattaatcagctggcacatgctctttttgggtgaaaatggcacttaatctgtctttcccagcatcccacacatcgctacgaagtttctcaagttctaatgttctaatccagttcacggattggtggaggggaagtggttaagcaactgatggccgtagcccaatttcttggatagagcttttgttaccgtatgtcttgggtcatctatttaggtcaaaatcagcgggttgttcagtctgtccaaattcatacatcttaaattctttggagtgaacattttaccctgctatttctcagtgtgagtttcctgggaattgttatttgtagcgatgcattcgtctaggccttttttttttttttttcacaattgtttggatatacatcgttttgctcaacttgaaagttcttcacaagaatataaataaatggaattctctttggggatttctgtgaaaatttgtaaggaccactgtgtaaatgtgtgtggaacatcaaaggctggtgttggccaggctagggtgtggaacctggaaaatctagcaccagactcaaagcttctaagagcatccggcgtcccctcattggcagatgcctgttttggtaagctaccgccaggaactgggagtggtagcaacctctcacgccaatagcaagacatacgactaagaaaggaggccccccatgtgctccaatgaaaaaaatcatttgcccctctgatctaagatacaagagcctcgggataactcataccccaaacagaaagcattccagcaacaagggtacaccactttggaggccaaagttgcctgctctaattcactcacataatcactggggtgtccccattcatcaggaactcatagactgaaagagagaggagtttataccctcttgcctcatagtcaaattttactaatataatcctgtttgaaaagttcaatatggcaatgattatgtcatgactcggaaacctctctctggtccctctggcttccgaaaaagtctctctgtcccctgctgcccagtcagttgtcccctcttctgcagcaatccaacaagtattgcctcctgtgtgttaactgccccaagaaaaacctccacaggcttctgtttaattttaaatccaataaaactctttaaaagctcttgtggagtttaattatttttcccactgttctgtccttttaagaaaaaatttaaataatactggtataagagttgaagctgtaagacattgtaaaaatatctttaaactccacatcaaagcaaacagaatggcccaaacctctgacacaaaagcgatgaagactgataaaatataacaaatagattataagatattttttcaactaactctcacttgaatgctttatattcagaggtagacaaggctcaaaaggaaccataaagcatggggaaaaggaatcagaatatatcttaaagttccttctaggcctaaaattctgtgatgaggacttttcacatataatctcaagaaatcctgatagaactggagtaattaggcaaaaggatttgaggctagacccatgggagacctttcagctgtaaaagcttactaaataatgggaatgtgttacactacaggataacttgtaattcattttctagaacagtgattctcaaactggagtatgtgtcagaatcacctgtagggcttgtcaaaactcagctactgtgccccactccaagaatttctgcttctacaggtctagggtgggacccaagaatttgcatttcttttattttattttattttttatttttttgagacagggtttcactcccatcacccaggctagagcgcagtggcgcaatcttggatcactgcaacctccgcttcccgagttcaagcaattcttctgcctcatcctcccaggtaactgggattacaggcacctgccaccacacccagctaatttttgtgttttttttctagagacggaggtttcaccatgttgcccaggctcgtctcaaactcccaacctcaggtgatccacccacctcagcctcccaaagtgctgggattacagatgtgagcccaagagtttgcatttctaacaggttttctggcaatgctgctgctggtccctacaccatactttgagagccactcaaagtgtggtccaccaaccagtggcatcaacatcaccaggaagcatgttagaactgcagaatctcaaggtctatccccagcctactgaatttgcaaatccattttaagagatctccaaatcattagaatgcacactaaattttgagaagcactacctaaacgtttctggtggctgaggcattgttctgaaagttaggaggatgcaatggaaaataaccattactgaaatgtatccccgtagttctacaattcagctattaagactttgtaacaaatttaatttggaaacagtgtcccaaaatttccattcctagtcctaggtagaataatctgcctcttctcagttgtattctagtaaatgtgctggatagctaaagaacacatataattcaaaatattcatttggtcaattacaatggaagagagatgatttcaaaaccaattgattaatccctgaaccacaaaaagaaaatgtctctgaatccagctatagagtccatcttgcttgaataattagatttttgtgcgtgaataaaccaagaagcaatcctccacatctttgtcttgaactaactgaagcaaatgtgttctgagaggtaaagtaataggaactcattgtctcaaccctcaatgtcagcgctaaacaaaatcatttgacctgctttcccttgactttgaggcacctagtctgcctcagacctggctacagccccatgagccatggcctgagatactcctgcccctccgcaattcaggcaagcatgtgctaaagatagtttataatgggctgggcacggtggctcatgcctgtaatcccagcactttgggaggccaaggcagacagatcacaaggtcaggagttcaagaccagcctggccaatacggtgaaaccccatctctactaaaaatacaaaattagccgagcatggtggcgcgcacctgtaatcccagctacttgggrggctgaggcaggagaatcccttgaacctgggaggcggaggtagcagtaagctgagatcgcaccattgcactccagcctaggcaacaagagcaaaactccatctcaaaaaagaaagagagtttataatgaagtcacttgcatacactgtcaacatgtggtggctgctgttaaacattagctcccttccccaaaccctgaaacaaactaacatttggacttggagtggagccctttgaagatagattcttcacaactccgtttaattccctgttaggtagaattccaaacattagattaggcaatgaattgaggaatttttctcagggtgagtgcatgttacttctcagatcacactaggaaggaaataaggccaaccagccctgtaagccaaatctatttaggttgtgccaactcatcctgtacgagacatatccctagtagtgtgttactgaatgttaaagggatatctagagctcagatctttggctcagctatgaaagagtcccagagctgactttcccatgatgtccttgcaggccagtttgtttacaatgcttcaggagagaccaagtggacagcagggtgttggttgggttggggacgccacagccaaccctgggcattcaccagctgaggaacttcagactgggagagggctctttcccaggttatggcttgcagccagatgtcctcctacctcactgcaggtcattacagtggaaccagccatagtactaagacaaggtcttgcctccttctcttgatgtggcctcacctagaaggatgatgtgggcaaagccctaytcagattgtggcctcttgggcaagactctaggatgggcatatctcagacacaacacctgtgaaaatggcagctagcagcactgccagggaggaatgaccgtctcctggtgtcaggagccaggtgcagcctggccaggcgcctggttctgtggaagggtgaaccactgcatgtgggcaagcacagaatggtgtctgtcactgagaaaccacagcccacagcagctcagctgtcaccagtgtctgtgggagtagagaagcaaggaaggccatcagccgagcccctcactcgcccagggctgcttgttgcacatctcccccaggccctgatttctgaagtcccgctttcccccaatggctaaggaagcacgcaaccaagcaaggaagcaagcacagctagggtttatgaatggcaacccaggctccacttggaaggacacacataagccttcccctttgctattggctgatccaatggggccatctggagcacaggatctggcagcaaccctctatggaaagtttgcctaaaacctcagaacaaatgttttccctcaatgagcaactccaaatttcttgctcacgtgtatcttcatgtgggattttcaggagtaggcaatttgggagattagggagaagtttgcccacatgacagctgcttagtaaaagcaacctcaggacacaatcttacttctccccaaattatgaaaaagagagctgtaggaacactgagagttgcagttggagtttgcaaacatttgggtcttattactactcagttcagaaaaagttaatttctgaatcagccctggcatccaataagggtagggaaatgcttccaggaccagcagctgttgttgatatgggctggaggacggactcttttactggatcattaaagtacttactatgttcaagacaatggtctaagtggctgcaaatattaacgtattttattctcataacaactcataaggccagcactattagcctcattttatggataaggaaagggaggcatggagaacttacccaggatcacaccatagtcacaaacccagagaatttctacccaccacccatgttcttaagcaccatgctatgcacgcacactatacatggtgcccacatttttcaaattaagcctgatttatgggtgaatatgaaaatgagacttgtaccaaaaaatctgagataaatgtcattaaacccaagacttggaagcagaattctatttccaaattaatgtgggtatggcggggtgggaggagctcagcgcctctctttgctgctcaaagtgtggcccctggacccagtagcactagcatcacctggacatttgctagaaatgcacattcttgggctccattccagtcctgctactgaataagaatttgcactttagcctgggcaacatagcgagaccctatctctacaacatttttttaattacccaggcgtggtgtgcatacctgtagtcccagctacttgggaggctggagaaaggatcacttgagcccaggagttcaagactccagtgaactatgatcagtgcactacagtgtgagcagaaagtgagacccaatctcaaaacaaacaaacaaacaaaaacaaaattacatttttaacaaggtccacaggtgatgcaaatatatgtagtgtctaagaagtgctatctagaaaataatttcacttacctgtgtcatgatgcagcctataatatttagggcccaggtgtttggcgcatctgatgctaacactttctctgaacttttcgtgtttcataatcacccacagtcaccccagagcaccagatctgccttcaaactgaacatgttcttgccttcagggtgaagttgggctaaaggcactcaaaggcctactttgccccaaatccttccctgcactccccaatcctagcctctttgtctactttacctccaaagccccatttgagcctctcttttagattaaaacgctgtctcttcaagaagcaaataagcacctgttttccattctgaatttcagcattagaaagggcctcaaataccaactaaaccrcttatccacttctcgtagccgcttgacatcatctccacctgttaccatctaacccagggccaaagcatgctcccttgtgaaaaaayattaagttaccagctggcacaaattcaactccccccaacccccagtcccaaggggacactttcttttattaatcctgaccccyttaccatattttatagctgtagcccagggttagctcccaatagcccaggtgtgagccttctttaaaagtatttttgctctgttgtcctggttaaattactccatctgtctagacctttgtttcttaaaccataaaactggctcaggggagagggaagaacagtcacctgtggttctgaaacttgagctgcatcagaatcacctggagggcttgttacagcactgatggtgcagcctctcccccagtgcctcagcttcggtgggggggggcgggggctgcgtggcacctgggaatgtgtatttctaacaagctcccaggtgatgcccatgctgctggactgaagagcgtagtttggaaaccactgcattagctaatctttaaggccttttctagtgttggaattgtattttcccaattcagtcagataactattctacatcattccattttgagattagccagcaaagagtaagagaaacttaacctgtcttacttccacataaatcgaataatttcatgtattttcattttctttccccaactgaattgccaattcttattcaccttatatagttcatacagcatcctcaacagtgctacgcattcagtaggcacgaaatctttttaaatggaatgatacagcaggactaaggtttccacagaagagagatccagaatacagagcacggtgagcccagtgactgacactatcaaaaacgactcagctggagggccaggagggtaaatgatcagaaacagacttctctcacctgccccacctacagtcaacccagcaacccatggtcttccaacttttccataatgtaaatagaaatcctttgatagccactgggttaaaaaatcwgacaagcatactcctttccgactattaacawcagttatttgttcctacccaatctagttgtgacatttctcctgatgatgttttgctttggtttttggctttgaagttttaaatatacagtgttgctgccatccagtggtaatctgaagcagatgcaggccatcaaatagatgatccatcctgtggtcaaacattttgattgctgggtaacatatgagtcaagattcctagataagtgagttaagaaaatgcttaatctgtcactttaaattctgagctgcagaaaacagtgtggtcacaattgagagccagagctggatttaggctaaataccccatcctggtatttatgaactctgtaacattggcccatcatggaacttctctaaaccttaacttcctcttctatgaaatgtgaatgttgatggtaccatccttccagttccatcaggaggatgcaatgagaacatacataagagtttgaaacaatggctgacctttagcaataaccccttgggtgcatcctccattaatgttggagatgatagtgaagtacagccgtgttctcaactccaggtccaccccaaaccaattaagtcagaactcccagatacgcaggcccactctccagagattctaatttagctggttccagagtagaaaagggggtggagcaaggagttgattagcagagcttcaggatggtttaaaagctccccaggtgattctaataaaagtcactgcaataaatggcccacagaagtgccacgtgttcatttgcaggtcactgtagaggtcatttcttccagtctgtcaatagcatttattgaatatttactgcggaaagagtacctgtagggatgagaaaaaaatcaacatggtccctactccatttatgacaatccagatgggagcatgcagtggcagagggcaggtggtgtggtgaacagctgtagattatagcctgggaaggagacttcttggctcacgggccttacagctgctctttaagggaacactccagagagaaaagagagaagtggggagaccatggaagaggaggtttgtttttcagagctagktgtgtaaagaggagagggtagtgccaagaatttagctatccctttctccactgcctcrccagctacacaaacacacacacacacacacacacacacacacacacagacataggcacaacttggctgagatgcaacccagtagacctggcacaacttcccagtatgaccagtgattattcagctgtgcacccaactcccaattattgactagaaatgtggtaaattagccacaatagtgggggttttttttgttttgggtttattttttaggattttacttttcagcatcattgccmtcttgctttgcattttgcattaggtacctaaaacctgtgcttaagttttaatagtagtagcagtagtggccacatatactgagtcccgtgttctgcatactctgagtagctaaacaatagatcaatgcatgcccaccaacaggagtggaccatacttaacattctaaggtacttcctttcagtctcatgtgtatgtagtgtgcacatgtgtgtacttccttttctggtcttttttaaaattttttttattatactttaagttctgggatacatgtgcagaacgtgcaggtttgttacataggtatacacgtgccatggtggtttgctgcacccatcaacccgttatctaataaatatattattagagtcaatagaaaggttgatattaaaaatatatccatgatatattgttttaaaaaacacaagtggcacaacaatatgaacaatttaatcaatttgtttttaaactaaacatgtgtatgtggtatacatacataaatataaaatgggccaggtatggtgactcacgcctatcatcctagcactttggcgggggctgaggcaggaggattgcttgagcccaggagttcaagaccagcctgggcaacacagtgagacccccatctctacaaaaaaaataaaaattggctgggtgtggtggcatgtgcctgtagtccaagctacttgggaggctgaagtgggagtatcgcttgagcccggcagtctgaagctgcagtgagccatgatcacgccattgcactccagcctgggcaatagattgagactccatctcaaataataaaataaagtaaaataaaatgtttggaaggacaatgtttaagcagtagctccctctggggagaggaaatactattagacatcatatcagggatgaaaacaagctttcacttcaactctgtgtacttcttcaatgtttgcatttttgcaatgagcacatacatgttttgtaagtttctgaaatgtttcatgaagagtagtcatgcccctaataaatgagttaattatttattaacccatctctatgaatacatgtatatcataggtgtgaacatataagtttagttgcacatatagtatacacacatatatagtgcacacacatcatatatagtgtgtatacacatacaaattatgtatggtgtgtatggacacatgtcatgttgcgatatgtgatgtatatataaatatggtatgtgtatgcacgcttacacacaaagttactgtctgtttatgtgttactaaattctataaaaacatataaaactttctattgaaatatcaggttttaccgtggaacctcctaaaacattttacatacagtaaaagcccttgccaacattttcccaaagtcgaaatgatgcgcagttttactttgtatttatcaactcccactaaaatagcaaatacataaatatcttatgtaaccagaaactcttccatgagcatattctgctctgaaaaatctttagaaagaaaataattaagccagcattttatttggcctttaagtaatacttgaaacaaatccaaaattcttagctctaaaccctcactcaacatatttcttcaaatattgtggtgtcaaatttggcaataactcttgttttgcatgttagttcatttattctaaattaaatttggatataattttttttaatcgtgtgaggagaggattcctgttgccttggcaaatagctcactaatttaaatatagtatattcaatataacacaattccaacatgatggaagaattgcaataatctttactgaatgttacactttaaatgggtgaacttttggtcttttgttttattttgtttgttttttgagacagggtcttgctgtgttgcccaggctggagtacagtggcatgatcacggctcactgcagcttcaaactcccaggctcaagccatcctcccacttcagcctcctgagtagctgggactacaggcgtgtgccaccatgcccagctaattttagtatttttttgtagagatagggtctcgctatattgcccaggctgatctcaagctcaaggaatcaggtgatcctcccgccttggcttccaaagtgctgggattacaggcatgagccactgtgcctggtcaggtgaacttttgaatacatagaaacagagagtagaactattgttaccagaggcaagtaaggaaaggaaacggggaggttttgatcaagggtacaaagctgcagttagctagggtgaataagtctacagctgtaatatacagcatgataactatagttaataatactatattgcatactggaaatatgctaagagagtaggtctctggtcctctcaccgtaaaatatatttttaaaggtaagctgtaaggagatgaatatgttaatttgtttcactgtagcatatatatgtatatcaaacaccatgttgtacaccttaaatgtatacaatttaaaaataaaaataaatgggtgaactttatggtatatataggtaggtatataagttatatctcaataaaactgctaaaaatattttaagttcatcttaagaaggggcaatacataatctctgtacgtaacaaaaaggtatttttctgactgatggctcctttagttctagtagagaaagaactaccagattccagggttgaggaagaaacgggatcccagtgcgctgtagtggactcttacctgaaatctgaccttggaacyacatgggacacaccttacacaggctgtacaaacccttgtctgctcttcccacaggaggactacaaccagctgaggccactctcctaccccaacacggatgtgtttttgatctgcttctctgtcgtaaaccctgcctcttaccacaatgtccaggaggaatgggtccccgagctcaaggactgcatgcctcaygtgccttatgtcctcatagggacccaggttaaaatgtgggcgatggcagggtggagcgggctgcaaaaatgggaagaccctttaggtacctcgtgaacatcctattctgccaaacgctatggaagtgtgtctcagacatgtcaatcctatgaacagaagttcttaaggtgtgcgtgatgatttagcccatagtggaaaagwtaatagagctatttaatatggagcagaaagttttgatatggccttcaaaaattaatctctatgattttttttaaataacaaagtaatttttaaaatagacaccctttgccaggcttgaatcagagcaatgaggtgagggtgtcaattgaacatattatctagtattttttatatctgaaacccacagttgttttaaaatcacaaaataggtaggagtgtcaaggtgaccacagcaatcagaataggcattctatgacaggaactctttaattacacttccggagaaggaagataaaaattcaccattgtctattccttttaaacctcttggtcttccagatcttagagaagaagttaaaacacatataccagctaaacaaacctacgactgtgaaagcctttacagtgttctgaaagctaatcaatttccatagtttgagtttccagtagtaagccaatcacatcaaatgtattaaggattgttactgtttatagttttaaatggattttgttctttggcattttaaaatccaaatgactatcccaaagacataggaatatacgaatactgaagggcttcattgttatctgtttcatacgctatttctttctattattcatttatgttctttttgaacaagagaattttttaacacaaaggagagaaaagaaaaatatttcctgaagaagatatggacaggtacacagtagatgtatttacttagagaaagtagaggaatacacatctccataaatcagagtaatcatagttaacgcttctgctctgaaagataatcgtttgtttaaatgaagtcttttgccttgaattccagataataatatttgcccatattgatggagcctgaatccctgctgccaaatatgtgacagaacattcaatcacctttctgtgattcaagctgattttattagagataggcacaaaattgaacaattatcacacacacaaacacatgcacacacacacacacacacacacacacacacacacacaattagtagagctgagtaatatgcttataaaagggaccctaatatattggtctttctttaagacacaagcccttgctttcccacattcacacccactcatgaacacatggattcgcatacacagtgaggctttaaagcaaccaaaatatgtaattaaattatcaaatctaatccagatatataaatgctatcttcaaagttctacctttgaaaagatgaatgcttatcttgagcaaaccctttgaaaacttctcttagggacttgccttccagagcttgcagaacatttgttagaatatcctcacaggtagcaaatcttcatacctcctttgaggatgaagattttatttggaaaagcgaaaaaaaaaaaaaaaagatgggttcaaagccaggaaataaactagtaaataatgagtaatataatttgggatcaaataaggcctcactgaaaggtaatgagactgattggttatcttgcatgccctgtaagtagaatctagaaataaatagaaaattttgaaaaaacatctgagatagcaacagaatcatccgagtagtcttcagcttgcagggtaactgtttgaaggggaaaacgtaaggaaagtctgttgtgtacatttacaaagaaatggctttacttttttagacataacatgggcatgtgaatctgcttccttaaagaaaatttagcaacttcaaagatgttaacagggaaaaagactctatgatgtcacagtttaaaatatctggcaaggcctgagaaaacaaataagttttcacgtrtgttttcttgccagattgatctccgtgatgacccaaaaaccttggcccgtttgctgtatatgaaagagaaacctctcacttacgagcatggtgtgaagctcgcaaaagcggtacagtcagatttgaatttcattttaaatgtatgctgagagaagagtgtgttgtatgctttggaaatgggtgtgcaacaytgggttttgctttaaagtgcaatgtgtttagaatcttctctaagctttctattctccccctctgttctagtcgggctggaaggagccatttggttagccttcttgtcagccagcattgtctgtttttcattcagaaagcaatttggtgaatttaaacagctgaagcacttatcatttgatttagcaacctctagaacatctacttgccatatttagtatgaatatagggagtcgttagatatatatttgtaaatctcactgcttattatggatgtagctcatttaaataaccccataagaggcattttgtgattttcttgggagagacttgggttagcatctggcagggttatatttgtccagtatttctcaccatataatgaatagccacttagagagcctggattgtgtcacaaacagcatctggaaggataacagataccaaaaagtgactagctggggatctaagtggctgtttggcagataatagctcagagctggaactgttttcatggacctttcttccttcttgagagcttaacatgaagagttaagaaaatgctttagaaagtttttgccagacaccaagtctttgcctcccccattaccccgagatgtgagcaaagcagccactgaaaaatattcgagagggtggacgtgctttatgcaagaggaggccgataaatcacacctccagagcttaaatcggactcctcatcaagtcataaatctattgacccaggtcagaggtttggaaattttcaatcttactttctaagtgactaacctagtaaaacgcataccgcaggcagagttagaagtcactctcttcaagccagtcaagaatattaactacaaattcttcacttacaaaattgtatgcatttatcttattaaatcttgcttgcaggcactaaaactaagcatgatacactcaactagaaatgaattaaatacaatcatgtttttacaggtatcctgcatgagaacctctcacaacacctgatcgagatactgaactcttcctacttctatgcacagtaatgtcaatactaactagcgccagacgtccatggagtccttaggatcctaagtacttaataatatctctcacttcagcctcataataaccctcttaagcagatagcgttggtctcagcttacagatgaggaaacagtcttagaagacaagcacatagctaataacaaagtcaaaaacttccaatccagctctgtggacatcaccactcgtgtacctgaccgtcacgtaaatgacctccaactgtgtatctttccttgggtgaaatgggtttatgcctgtaggtgcttctaccttctcctcaaacattcakcctcaaatgctctcattaagatacctaaatatgtagctccataaataattgtaggtggctcctttctacacatttttcacagccaggatgtccccattggccggcaccagcttcttgcaggaactcgcgttctgtgttccttcatgccgtcagcttcctagcctcacttctcattggggaagttgttttttttctgtctgaaaagaagtcgtttcaaagcctcccatctcgtttcatrcttatttttggaacaatggctgagttcaccatttatattgccttttgctagtttctcctagcaactgctctcagatacagacggaatcatgtttagcttacaaaatccaatttagaagaaaacctagcaagattttaacttgttttatcacaattcatgtaattatagagatgctttaagtttctctactctctgacttttctgtcaagtagtttataatctcagctagcatttatggagtgtttataatgtgctaggcttggtgccaggcgccttacagcctttgtcttaattaatcctcacagcaaccccctgaggtgtgtatattattatctccactttcctacaggaaactgaggctcagagaggttaagatcgcccagctagcaagtggcagagtgaggatagaaaactgtgctttaaccacctgctcttctgcctccctcctataatctgaaaagaaacctttaggtttggggcttcttttttatatactggagtcccttattttcatgtgcaaagttcccccccaacttaaaggctttgcaagttcagatttttcatatctgattctttctgttcaatacttttccatttccaaagcattttccacctaacatctctttttggtctcaaagggtgttttattttcaaaggacatttttatatcatacacatttacaattctttatactccaaagtcaaccacatttacatattttgcactaatttattataaatattcattattctttgacttcttttattctccctcttctttctattactgtagtttttaatcctcagcctacttttcccattcttttacacatttgtaactgcccctattgctgctagaattattaaacaacaattgattaagcacctaatatgtgccaggtgctatgctggatgctacactgtttagctctaagattgtaattctttgtgcattctctttcccagttctatctaatacagtctaaacatgatcttctaagttcagacttcctaaggtattttttgatacaggaatttgccattttttcttttttaatctctgggttctctttgccctctccggccatcttcttcacactgtgccttttgtcgttgtcactctttaacttggcacctgctaagtttcctgctgggtttttaacatgcacaggtgggatttaaagcagcaaaattgctgcaaacaccctgtcatcaatgttcagtcacgttaatcaactggagtctttaatgccctcttcctgactggaagagtcactgccacctgccttgtgctggccattttccctttctcccttggtcattgaaagtcacttcaccactggtgtctgggttacaaaggccagaagaggagggagacaggcaaacaaaagcatgccacctggataaacacagtaacacacatctgggcaatgtaccaggtagcacagaagagagagagactaatacattcacggaaggaggtttcagagatttctttaaccaggtaacatcttatccaggtttgaaggatgaggaaaagtttttcaggtgggcaaaggggtctggggagggcataaaattctagacagggagaccaggacatgcaaaggcatcctttaaagcatagggagcagattggcaactgacgggccaaagttcacccacaaatgttttcattagtccaaacacatatttttattgcaatttagtggccaacatttaatagtttggaaacacatttctagcctctaaaagaaattcagaaggtcgagcaactctagcccagcatttcctcatcaacagaaactgttaaacagtctcttagattaagcatgtattcttcagtctgccacaatccccaccactccatattatcctatactcaagtaacacactttacattatccagccttgaattggcatctctgcattatagtcttcaaagatcagcagcaaatctgtctggcctagaaatgtttttcctctttcaccaatttgatcataatgctgacttgttgagatggcggcttttctcttacaacctgtttggttctttttctttttcttggctctctatttgccttctctgtgtgcctttgctaattctcaaatgaggaatacagaactactctgctactagccatttctttagatacgagcttactctgtttattccactaacatcttctcttcttttctctccatttacaggacatgccttccttcttcttcccttctctcatcacctttactatatccgtaacagctttgcccatttattcattaattttgctctttcagccacaatttcatgacatttgctagagacagcccaaaagagtagttaagactttggctcaggaggcagacaaattcgaatctctgccattttcttagttgtgtggccataagggaggttacttagcctctctgggtatcagtttcctgagctgtgaaatgaggatggtgacagatttttccttgtaaagttcttgtgacaatgaaattagctcatgtaccacaaggtccagctcagcaaactatagttgctgttaaatccatgagccctctcagacatgtctacagctgggaagatctctttgcctttatcccttccagttactttctatcttattctataacttgtcctgccccaactagaacaacatggaagaagtactaggttttcttttacttgattagtcattacggtttttttttttttttcttatcactcttgtatcttctgtacatcgctgataaatgtccctgcttttgagataataagttttagctattataaaacaataagaaaagtgttttttcagtttacaccctcaatctctacttttttcttgaaaataagtcatttgggtagaacacattccagtttgcttgcatgtgtatctaaacaaggaggcttgaatcctgaaccctcccagatggcttctaaatacttgactgtgtaggtcattttgctccaaggagcagatgaagttgctgctgtaataagggccacatttccttgagacaatttttcatttcacatctttgaggacacagatcattttttttagcaatctggctgtgctttttccttgaaccgggatgaattcttctccgaccctcatagcacttgacacatggtaacaatacctacctcataactggattgtttctcacacgtgtttcccaaatgacaccaataatctgatgactactttttctatcagtacaacataatgtcatattaactcagttacacaataatgcctttatctgctatttcattatcttcagaaatgtctgaattggaagagacaagcttgggctcctcccgctccatcgaaaggcaaagcctgacatgctgtcagctgcacactgggggcaggaggatggggagtgccctgcccctcctgcaggactccaggtgtgagtgagctcagcccagctgtcctggaattccaggcagaatcaatcctaggcttgggatccttagtggagaggtattccagatagaaaggtgctacagcagtttctaggtattttccagacaagtgccaccacgttacagtcaagtcattcagaatcattcagttggcaacgctgttgccattagattaatgtgcttttcacatgtgtttgaatcaagcattgaacacagtcccaaaatgcaatagaaggcatttcattatgttattaggaaaattttctctgcgctttattcctctcttgtatctaactgtttttaattatttaaaaaagttattttctaatctgaaaaccaaaccatggtcaaaatgaaagccataaaatagattttcaacatccaacatcgttttcttttggtattttcccttggctcattcagtaaccattcttgtcaggaaaaaaatgaaaaatgcataatctctgtcggagagtttaggaaatagtgtctgggcccaaccaaaaccactttatttgatggttagttttcatatttgtggcctttgaaataagtggacaatctcatttcattaactgtcaacttgaccagcttcttgcagagctgagtgataggggtcacagttactgccacagagcaaggaaatgaacatgtatcaagagacccagattctgggtctatttctttcactttctaggtgagtgcccataagcaattcattttacctctctggggttattcccgctctgttctaagctaaaccacaagttcacttagtccacacattgcaaactggctggctgctgccaaatatatcccacatcagtgtcttgcttggcccatggtaaatagttcataaactggtaaatattaaataaaaaatccaaatgtccaactcctcttgaaaaatacaaaaatgggcaatagtaaaccaacattaccacttggaagctgataagactgcacaccctagagggggcatgtgctttacagcccaccatagtcccctcctctccctattgtcttgcgccagccccactttatcatttacataagctattgggcataataggcctatgattttgctaccttgttttagccatttgtctgctgtagtttccaggaactcgccatttagccaacctcttctgaatctgctttaatttttcaaagtgattcttaaaatgcgaatcaaaaactaaagtcatttctccagatgtccttaatagtaaaaggccaacatcacatcattgactcttcctgagcttatgaacaaataaaaccgcaggtctccttcacaagaagctgactgctaaatatggtctgccctggtctgtgatttttaaatgagaatctatagttctggcctgaatttctatatttctcatgagaggtttgtgattatcaaacacaccatagtatgaaatcatcagaatatttaaaatgaagccctatgcaagtatgaaataccttatcatttaaatatatagactgtacactgacaggatgtctctggcattaaatgtcttttatgattatcgttacatgttttattgttattgttacatgttttagtgggttttttttttaactttttaaaaaatatgccttttaaagtgtgttaaggctggctgcagtggctcatgcctgtaatcccagcatttttggaggctgaggcgggcgcatcacatgaggtcaggagttcaagaccagactggccaacatgggaaaaccccgtctctactaaaaatacaaaaactaacccggcttggtggcacacgcctgtaatcccagctacttgagacgctgaggcaggagaatcacttgagcccaggaggcagaggttgcagagttaagatggtgccactgcactccagcctgggcaacaagagcgaaatccatctcaaaaataaataaataaagtatgttaaaactaaataataatgccaattggatattaccttgttgagggataccttaaaagaggtacattttaatcaagaatgacctataaaaccatatcattcactctctttctatctgctttatcaaccaagctgacactttgccttttatcataccaaagaagatacatttcacttgtacatgatttacacattctgcctacaaatgagaggatatgaaaaacaagatcatgcacccctgttyttcacaaaacatatttaaattatatcattggttttgaattgtctcctaattttttagatctttgcattttttatgttcttaggaataaatggctatgggtcaattttaggatttactgctttccagaagtaatccacaaccatttattgcaaataaaggaaagtaaaaaatacaaaaatacaaaaaaaaaaaaataggatagcagatacaaattgaaatggaaaaaaaaaaaaaaagacaaacataatccaaaccaccccacaggctgtttgtaggacaggcagaagtaagtgcttgtctgggcagtgagttgataccactgtgcttttctctcttttttatctctcatgcctttctctcttttgtgtttaagatcggagcacagtgctacttggaatgttcagctctgactcagaaaggtctcaaagcggtttttgatgaagcaatcctcaccattttccaccccaagaaaaagaagaaacgctgttctgagggtcacagctgctgttcaattatctgaggttgtctgggacctgcctccaccccatccagggatgagaatggcagccaatctctgtggccaagctccagccaaaaaggagggcacgaccagaaaggaactccctttgcacggaggcttgccccatcaccctctgagccctcccaacacagcacactagtcagcccactgccacgacctccctgccagccagaagcatccgtactgcacgctgtctgagaatgctgggcctggattgcagacagtgccgctgctgatcgcatcaaaaacaaagtcaaaggccatctcacattttacaaatccccagctcatgaacgtgaagctgataggaaatcaccccagggaacccgaaaaagaaacttgattcctctattgctggccttacttgatgtcttttataaaacttgggactacaatactaacctttttttctgaatctgctgttctacccatgtgtctcacattcatttgtattatttcaagaaatgtactaatttccagttcactcaggccttactaatccataccaaattagcctaaagacaaggcattttatattcatttctattttcagcatgtttctaccaaagctattagaaccaacacgtacctctgaatgcccgattataagaagacatgagaagactttaaaagttttggaaatttacagagccatgatttttgaacctaattgaaagaaaaccatctgaattgttgcaggtccacatttttgccaaagatacactctatagatgcttagtagtggcctgatttttttccatgtattgccacgacaaactaaaaatgaactgtgtttaagaatgtagtatttctgtttttcatccaagttgattgggggaagaatatggcaggatccatcttttacagtattttgtattcagtaaagtggacattcctgctcctcccttcccccattgcatgccctcttcctcccttgatttcactttctctcatgcccggatccttttattctccccagttataacccagttataaaagaaagatctgagcataaagatacgtgtttaaaaataactaaaagtaaaggaaagtgccttaatttttctatttgcttcaactgaaagtgcttctcagctcgccccatgtaagttctcattccatgtaaatgacattttccagttacaactggtactgagattttgcctctctctttccttactcatcctcccaaatgtctttgtgggagccatatcagtggataccaagctctgtatccatttgtcccctgccctccacaatgtgtgacatagaacagggactttggccctgggaaagcaaaagctcccagtaaggaatcctgtgcccaatgatgtaaaacaattccaaacatccaggaatttttgtatcatagagcgaattacttcctatcttttcattagaggctatgaggacttctaattagtctyagttgcttataagtgccctggaatcacccaggtaggcacttaatttttttttcagttgcatgagcaaagtgcttcttagtagtgtgaaattacaacaactttaagactttccagattcaagctcccactgttggaaaaagccagcctttctaatctcttctgctactggaataagcacttaagaattgcgtgatagccaggcaccgtggctcatgcctgtaatcccaacacttagggaggctgaggtgggtgggccgcttgagctcaggagttcaagaccagcctgggtaatatagtgagatcctgtgtctctataaaaaaattaaaaattagtcagttgtagtgacacatacctgtagtcccagctactcaggaggctgaggtggaaggatcacttgagcccagaaggtaaggctgcagtgagctgtgactgtgccactacactccagcctgagtgacagagaaagaacctgtcaaaaaaaaaaaaaaaacaacctacatttcaagtactatttcccttctctcccatctaattgctaaagattttctttcatacgcacacactccagtgactggaaaaacgggagttttcagtcaaagcttgacatttagagaaaacaaggactttctgcctttataaatggaaatcaactgtgtatgaactataactctgcagaggttatgaattcatcctttacaaacaataatgaacttttagtcctgtaataaatgaaatgttattaggcagctttgttgcatgattgcatagttatatcttgctaacgggccactcatttctcactgatgtggatgaaaaaatgagagcagtatgtttccaggtgtgtgcactcaacaggcaaatagctcccgaggtcaccacttccctaatgggccacaggaagtaagttgatcttgatggggagatcacgtcacccagaaccagcaactggatagagactgttgttagtgtctgggtagagcacaggctcccaggggtcttaagagctaattactgaataaaacaatctagaacaaagcaacctaaataagttgatgtcattctgccaaattaatcagttattccttgtttcacggcaagatccagtttgtttcactaaaaagtgttttctgctataagattaaactgtcttctgaaaccaaagataagaagagacatagaggcccggcgcagtggctcacgcctgtaatcccagcactttgggaggccaaggctggcagatcaccaggtcaggagatcaagaccatcctggctaacacagtgaaaccccatctctactaaaaatacagaaaaaatagctgggcgtggtggcgggcacctgtactcccagctactcgggaggctgaggcaggagaatggcgtgaacccaggaggcggagctttcagtgagccgagaccgcaccactgcactcccgcctgggcgaaacagcgagactctatctccaaaaaaaagaagagacatagaaatttgaagaaggatcctttaatggtctacaccgtcttccaaagtcaagaagtggcagctgatatccatttgaaagtagaatcctagcttttcagagctagacaaggcctcagaaactatagttgaattcctcattgtaccaatgagaaactcaggcctagatgggtaaaaagaggtgtgttgtagcagtgctgggacagatctcggtttttctgcttcctatacaatcctcttcaacccaatactacaatgtatttattatcacatattaagctggagatttgtagccatgttattagagttgcaactgtttatcctatagattccagccacattttaaacacataacttcatgtagttaggccactaaaaataaagtaatccatcaaactagtaatacactagagaatttgacctacatactaagatgcctgaaatccacagtatatggcaatttaacccccatctaatagtggctcaatcaagtagctaaacatatttatttcactcagatggttggttgtttggtagaaggaatggactccttgggctattttgggaacaaaaaaggactaggacacaaatcaaagccacatccacagtaagaaatccgggctgatctctgccaagaaaagttacaaagaataattacttgatcacgtggggaaatttcgacataaaagaagtaatggataaaaagaaagaaaaatgaacaattgctgaagacaataattatagcaaccctaaaccagaaagcactaagccaggaagtcaaaaactaagtcatacacatatgacaaggtgcgggggttggtcctgagacttcagtgagaatatgtccgatcaggatatgcaaagaaccatttggaagatttctagttcataagggaagtaccaaatgaagtggatgggaccatacgcaatttgcataggacccccaaggaggaaatagtatgacatggtagtaaaaaagcaatcacgactacactcacaattttaggagaaaataaaactaaatccagaatttgaagccaacaacaacaaaaaaagtcattatttagggtatacgttcctgtgggcagtaccttgcaaagtagaacatcttcaagaagaaatatttgacttgaggtaaggctttcaagattgccatattacattcataaaggcaaactcatccttgagaccaaagtgacagaagattagaaattaaggctttgttttaaagaaatgttgacatcatactggaaattattatccagctacttacacattcgtttttaaatccatccctatgtttagctgccaaaatgcaaactgcgcattctctctcaacggagagcgccacaggtcaccagctattattctcccaggagtcattgagtaggctgcccaagtacacataaggaaactcaacgaactattttcatttcaaggaccattagaaacagaaaggaaaagagaaggtcagggaaacttagtttctaacaaaggaagtgaggcactttgaaaaagaaaatatttagagaacggagaggaagctaaacccaaacaaccaaaacgcacagctgacaattattccgggaagttggtaacttctgcctggtctctagaagcacaggaagaaaggactgttagcgtgaagaacactccagggttctgggtatctaggcagagtcagtcaacagggctaaccatgtgataatcctgggtaattccacctcacagttcactaaaaaacaagcggaaccctgggcaaagccctttggggctttaatagcaatggaggacatcaccctgtcactttctctgcttctacacagcaggcaatcaaggaaaacttgccaagaaatatgagtgaataaatgattttgaaagtttcattgagcaggaacatgaaaaggatgatttggggatagctggaaggatagttacttgcatgaataatatttattcaccgtcagtgtgatatttctcaatagaaagattgtatttaaaatgtacaactacaataacagaaaaaaaaatacgagataaagcaacagttcacagtgccacaacggtcaacaaagaccagaaaggaaattaaagcacaagttctactcagcagcacttcagccatcagaagctccgccgtgctattttgaagatctctttctgttaggggacgaatgagtcaaagcgggattggctgctctgtgaaatggtgagattcaagttcaacaatagttcttggctttgaaattccactaccggaaattagagtaaaatctgcaccattagtcttggtcacaatctatgtttttgtccttagaggatattatgtcaaaaaactagggttgcttcagtgtgtgcgtgtgttttaaatatgttctactttgatcatttcattttgttctatgagttctgcagtgactcagaagttccatgatactataactggagtaattttgctgtatttttagccatgtcctccaagcctcccagtatatgctgtgatctttgccaaacagaatctgatcagtgttacaggggaaatgatgtgtgaggctctacaaggagagggtctccagggcccacacctgagtcatgccttgaagcaacctcagcacacttagcctcccagtgattctgtgcaagtctgtctcaatcttttgagcttatgttagttctttgggggaaaaaaaatagaaacaacttctgaatagggcagtatgtttggggcagctttgtgaatacatatctaaaattacctccatttgccattttttaaatcaattttttttcaagcaatcagattcttttctcctagaggagctgtgggcaagaaaactaatgaattctacatccttctcatcacctggtttaaattgttttctgctctgagtaaacagtaattactgtttaagtacatctcagcagaattttatcccaattgcaacagttcatgttcctcctaatgtaatctctgcagaggaaatgatcgtcaagggaagcaggctgacctgctcacgggatggcgttcttacaatctgcatcttatgtaatggtgattctgtgtgcctgtgtcataattattggaatattattttatgcttttttttttttgagacggagtctcgctctgtcgcccaggctggagtgcagtggcacgatctcagctcactgcaagctcccctcccaggttcacgccattctgcctcagtctcccaagtagctgggactacaggttcccgccaccacgcccagctaatttttttttgtatttttagtagagacggggtttcaccgtattagccaggatgttctcaatctcctgaccttgtgatccgcccgccttggcctcccaaaatgctgggattacaggcgtgagccactgcacccagcctattctatgcattttttaacattacaatttattttgtgccatgttctgacttttaagtcattaaatcgtcttttttctgttcatatttctgggaaatctgagggtgtctccatctgccattccagaaaattgccttctccaggcctttgttagaacaagaaattgtccagccccttgtgactcaagatgtggcctgggaaccagcagcgtcagcattacctgggagctaccaaggactgtggaatttcaggcccagcccagacctactgaatcagaatctgcatttttaacaggacccccaagtgatttgtatacacagtgaaataggggaagtactggtctcggagacaaccaagttcatcatcagtctttatatccaaacacatagctgcctaatgaagaaccatcaacttagcctgtctctcagatgctaccttttgagtgttccttaggctaatatttgagttgctcacatttactggatgaataaaagggctgtcagaagtcttttctttttcttgtcatgtgctgcccagctgcaggaaaggaatatgcatattttagaatcaaaagcagaaaagcagcatctggtttgctagatctgctagatctaaagtacttctgttctgaaagtctttttcatgtttattagggtgagaaaaaagtgctcccccaaaattattttccacgaagacataagaaagattcagggtacatgaagttttataaactcacaaagtaaagataaaacaaatttctgaggcatgaaacttttggtagagtttctgtcttcattgcttaaaacacggaactctagatgacagaataagggttgattacaaacaacctgtcctctaaacaggacacagattcatgccagagactcatgttgttattgccttaagcacagaccagagttttattaactttctagacatatttttactaaacatcactggggaccatgctttgttctccctgcccacaccccaccctgtgtacaagagccctttaaaaattgtacacaaccacatacagcagcctatccacttattcaaatcctattgttgctgatgaagtcctgaaggcaaatcacacctaccttcaaacgaatcaaaaaagagcacaaggaccacctgtgctcttgtacctgcaaatggcctagctaattttttcattaggatgtcagtgattcggtcccacaataaggacctgatagcactgtgcaggtgcagtcattaaaggcccaccccttctaggaagcaccaaccacctccctcttcctgcagcaggcttcactttccacttgcagacacacgtctgacgttaggacattcaatcaggtgttcctcatgctccaagcaactggaacccacctgtgttccaagattacctttcaactgaaaagcttttaaaggccaggcacagtggctcacgcctgtaatcccagcactttgagaggccaaggtgggtagatcacctgaggtgaggagttccagaccagcctggccaacacagcgaaaccccatctctactaaaatacaaaaattagctgggcatggtggcatgtgcctgtagtcccagctacttgggaggctgagacagga

SEQ ID NO: 94744 - DNA, 24796 bp, Homo sapiens
ttttttgagacagagagtcttgctctgtcacccaggctagagtacagtggcacgatctcggctcactgcaacctccacctcccgggttcaagcgattctcctgcctcagcctcccgagtagctgggactacaggtgcccgccaccatgcccagctaatttttgtatttttagtagagacagggtttcaccatcttgaccaggctggtctcgaactcctgacctcatgatccacctgcctcggcctcccaaagtgctgggattacaggtgtgagccaatgcgcccggccgaatccagtaacctcttaagtgaattccatttcatcagttagttacccccatttctcccatactcctacccacaaccaatctgctgttctatttccggaataacttattttcagactccagtttaattaaaatattgctcaagaattttaagtggtcacctgttattttataaatcaaatccaaaatataacctcttttaatatcatttgagggctctttcagggcctctctatcatttgtcatgttttaataataaaaataggtaacacattaaatattaggcaccatgctaagtactatatatccatttttaattgcacttaatcttctccacaacaaacttctgaggtgtgggtagttttattattcccacattacattaagaaactggtcacgtaacttgtgcatgatcacttgcatacccaataagaggaggagcagcgattctaatcaactcagtctgatcaggactcataatcactgtcaagccatatgtttttccagccatcattacagtattctaaagatagtctttttaactttactctttggataaacaggattttccccaacgtcataatggcattatttcctctctactaaagcatattagtcactttaaaaacccttctcaagatccattatttgtagtaggccactctacactgaccattcctcttaggtttgatttcctccatactcaagtttgtatgtaaatactaacattagctgattttttgtcgtctaggtacttagcatgtagttatcttcctagccaacctataaattctagagattgtgtcttctacattttttggtatgtcttttgtgcctggtggcattacaggcacaaagtacatgttaagaaaatgttttaaattatttttaaatttttgtcggtaaatagtaagtatatatatttatagagttcatgagatattttggtgcaggtatgcaatgtgtataatgatatcatggaaaatccatcccctcaagtatttatcctttgtgttacagacagtccaattatactgtttaagttatttttaaaatgtacagtcaaattattattgactatcgtcaccctgttatgctatcaaatactaggtcttattcattctttctgttttttttttatttttgtacccattaaccatccccaccaaactcccctccaccctcccactacccttcccagcctctggtaaccatctttctactctctatgtccatgagttcaattattttgattttcagattccacaaataagtaagaacatgcaatgttggtctttctgtgcctgtcttatttcactcagcataatgacctggggttccatccatgttgttgcaaatgataggatctcattctttctgtggctgattaatactccattgtgcatatgtaccacattttctttatccattcatctgttgatggacactaagttgcttccaaatcttggctattgtgaacactgctgcaataaacactgagagtgtagatacctctttgatatactgatttcctttcttttgggtatatacccagcagtgggattgctggatcatatagtagctctctttttagttttttgaggaacctccaaactattctccatagtggttgtactaatttacattcccacccacagtgtacaggggttcccttttcttcacatcttcaccagcatttattattgcctgttatttggataaaagccattgtaactgcggtgagatgatatctcattgtacttttgatttgcatttctctgatgatcagtgatgttgagcaccttttcatatgcctgtttgctgtttgtatgtcttcttttgagaaatgttgattcaaatcttttgtccatttttcaactggattattagattttttcctgtagagttgtttgagctccttatatattctaattattaatcttttgtcagatgggtagtttgcaaatattttctcccattctgtgggttttcttttcactttgttgattgtttcctttgctgtgtagaaagttcttaacttgatatgttcccatttgtccattttttgttgcctgtgcttgtagggtattactcaagaaatttttgcccagaccaatgacctggagagtttccctaatattttcttgtagtagttttgtagtttgagttgttagatttaagtctttaatccattttgatttgatttttatatatatcaagagatagggggtctagtttcatttttctgcatgtggatatccagttttctcagcaccatttattgaagagactgtcttccctaatgtatgttcttggcacctttgtcaaaaatgagttcactggatgtgtgtggatttctttctgggttccttattctgttccattgatcgatgtgtctgtttttatgccagtaccatattgttttggttactatagctctgtagtatagtttgaaatcaggtaatgtaattcctccagttttgttctttttgcttagactagctttggctattctggatcttttgtagttccatataaattttaggatttttttttccctttctgtgaagaatgtcattggtattttgatagggattgcactgaatctctagattactttgggtaatatggaaattttaacaatattgatttttccaatccatgaacatggaatattttttcattttttggtgtcctcttcaatttctttcatcagtgttttatagtttttgtgtttctttgtttgtttgtttttgagatggagtctccctctgtcgcccaggctagagtgcagtggtgcgatcttggctcactgcaacctctgcctctcgggttcaagtgattctcctgcctcagcctcctgagtagctgggattacaggcgcctgccatcacacccagctaatttttgtatttttactagagacagggtttcgccatgttggccaggctagtctcaaactcctgacctgaagtgatctgcctgcctttgccttccaaaatgctgggattacaggcatgagccactgcacccaaccagtgttttatagttttaattacaaagatctttcacttctttcattaattcctagatatttaattttaattgtggctattataaatgggattacttttttatttctttttcaggtttttcatggaatattttttcattttttggtgtcctcttcaatttatttcatcagtgttttatagttttaattacaaagatcttttacttcttttattactttctagatatttaattttagttgtggctattataaatggattactttttatttctttttcagagttttcactgttggcatataggaatgctactgatttttgcatgttgatgttgtatcctgcaacattactgaatttattatttctgacagttttcttgtggattctttatgtttttccaaatataagattatttcatctgcaaacaaggataatttgacttcttcctttccaagcgaatgtcctttattaatttctcctatctgattgctctagctaggacttccaatactatggtgaataacagtggtgaaagtgggcatccttgtcatattccatatcttagaggaaagcttttccgtttatccccattcagtatgatactagctgtgggtcatgatatatggctttattattccttctatacccagctttttgagggtatttatcatgaatggatgttgaattttatcgaatgctttttaagcatcaattgtgatttttgttcttcattgtcttgatatgatgtatcacattggttgatttgtatacgttgaactatccttgcatccctgggataaaccccacttggtcatgttgaataatctttttagtgtgttgttgaatttggtttgctagtattttgttgagggttttgcatcaatattcatcaaagatattggcctgtagtttcccttttttgatatgtctttgtctggttgtggtatcagggtaataacgtcctagtagagtaagtttggaagtattccctcctcctctattttttgaaacagtttttgagcaggatttgtggtagttcttctttaaatgtttggtagaattcagcagtgaagccattgggtcccaggcttctctttacagggagactttattatggtttcaatctcattacttattatttttctgttcaggttttgggtttcttcatggttcaatcttagtaggttgtatgtgtctaggaatttgttcatttcttctagattttccaatatattggcatgtagttgctgctagtagccactaatgatcctttgaatttgtatggtatcagttgtaatgcctcctttttcatctctgattttatttatttggatattttctttttcttcttcttctttttttttacttttataattttattgacttttttctttataactttaaaacaaaaacagcacatgaaaaccagtgtcttatcccaaagtctcaactcagctgattgccagatgaacatcaccgtcttactcctctgaataactagacacaaattacatagcaagttcgagtgtctgcccacccaagacacagccagcaatcagtcacagacatagacacagtcaactccaggggctccagctctctgcctatcttctctcagcagttcctcccatctgctaagatgcgccttcctgatggctgtctctcaaggtgggtcaaggctgaacaagacagaaaagcagtctaggtccaccatcacctcccactggccaccagttggccagccaggaaatcatttttgtacatcttttgtctcccccttttatctccctctctcttctccaaaacttgttgctatctatcactttcatgtaacaatggacttactgtccatccactaaactgcctgagaagtggtttgagcctgacatattttcctgagctaaaaaaggaaaagtacctctgtggccttcttgccattaagatcaagtaaaaaagggactagcactactgaaaagggtcacgctagaaaaaccttagaatgctctctccacccctgtgaaggtttctctagctgtagctcttaagggtacaagagggcaaatattctggtgtcaaggaggtataatggggaaacacatttattttccccttttaaacttccttgctgccccagtctttgccttcttcttagtggatccctttgattctggctccttgcacttagctgaagagagtgagccagtcaccttgaagaaatcatccaggcggccctgggtgctgccttaatgactcttactcagcctcttgaccccactgtggattcgctcctcagagaactgcttttcaccacacacgaacttgaccagctcttcttcatttggctcgctccacttcagctccacagactctgggcccagcacctcaggttccaagaagagctggtaagcctccttgtggagccgattttctggcaaagggtacttgttggggtcaagtcgctgcacgatctcctcgatgctcttgtgcttctggattagatccacagcccgcttgggcccaatactccagatactcttacagtagtcactgcctagcaggatgcacagatccacaaactgttcctggttctagctcctgcagaatccagctcaggtggaattcctggattggcagctttttggcttcactggcagtcaggtgttgcattagcacagggctgcygaaggtgaagcagtccatgtcctcggtagccacaggatagactttgccagccttcaccagggcagcacagctggcctctgcctcgatgggtgcatcaaggtaagggatgcccatgaggctcagcagatgtttgcacttatcgttgtgctgcttagtgaccttcaccagccacttagtgaatttttccaccacctgctcggccccagcagcctgagcctgctgtagctgcttctctgcctcagcccygcagttcactgcatttggccagctcgcctgacttgtgctgtggtggcgtgccctcaaagacatacatgggcttgatgccgttctccatcacgcgaatagtgcggtagaacatgcctatcaggtggctggtggtctcaccctcctcgttctgcagcasatccccaccctggcgaacagcaatcaggaactgataagtgctcatagaggcatcaatggccaccttacggccaaagtagctcttgatgtcattctcccgggtggcactgggggccacatcagcaattagtttggccaggccttgaatacccatggcaacacagaggagggatgactggcctttgggacacgaggcctcggcggctaaagcttgrttcagggttgccctgggcaggcggtcctaagcccactttcccccctcagcttagctgcgggtcgcctgacactcagcccttctttttcttcttagtctggctaaaggtttgtcaattttgttaaccttttctagaaaccaacatttttgtttcattggtcttttgtattgttttcttcatttcaattttatttctgctctgacatttattatttcttttcttctactaattttgtgtttggttagcacttgcttttctagttctttaagatgcatcattaggttttttatttgacatttttcttcttttttgatgtaggcacttgtagctataaactttcctcttcatactacttttgctgtatcccattggttttggtatgttgtgtttccattatcatttgtttcaaaaaatttttcacttttcatctgaatttattcattgacgcgctggtcatttaggagcctgttgtttaatttccatgtatttgtatagtttccaaaattccttttgctatttatttctagttttatttcagaagatgcttgatattatttcaatttttaaaactgttttaagacctgttttgtgacctaacatatggtctctccttgaatgatccatgtgctgatgagaaagatgtgtattctgcagctgttggatgaaatgttttgtaaatatctatcaggtccatttggtctatagtgcagattaagtttgatgtttctttgtcgattttctgtctggatgatctgttcagtgctgaaagtggggtgaagtctccagctatcatcatattggggcctatctctctctttatctctaataatatttgctttatatatctgggtgctcctcactataacctccacgtcccaggctcaagtgaccctcctacctcagccccccaagtagctgggatcacaggcacatgccaccattcctggctaacttttttgtatttttggtagagatggggttttgccgtgttgctcacgcttgtctcaaagtgctgagctcaggcaatcctcctgccttggccttgcaaattgctgggattataggcatgacccattgtgcccagcctcagtctatgtatttttattggagactttagcccatttacattcaatgttattattgataagtaggaacttactcctgccattttgttatttgttttctggttgttttacagtcttctcttccttctttctgtcttcctgtcttctgttcagtgaaggtgattttctctggtggcatgctttaatttcttgctttttattttttgtgtatctgttgtatgtctttcaatttgaggttaccatggggtttgcaaatactgtctygtaacccattatttcacactgatgataacctaacactgattgcctaaacaagcaaacaaaaatgtaaaaagaaaactaataracactctacactttaacttcatccccatgctttttacctttttcttgtttccctttacatcttattattctgtgtcttgaaaagctgttgtagctattatttttgattgcttcatcatttagtctatttaagtcaagagaagtttacacaccacaattacagtgttataatattctgtgtttttctgtgtgcttactataaccagtgagttttgtactttcaaatgattttcttcttgcttattaacatcctyttctttcagattgaagagcttccttgaacatttcttagaggacacgtctggtgttgatgaaatccctcagcttttgtttgtctaggaagctctttatttctccttcattgttaaaggatattttcagcagatatactattctagagtaaaagggttttttttttctttagcactttaaatatgtcctgccactctctcatggcctgtaaggtttccactgaaaagtctgctgccagacacattggagckccattctatgctgtttgttttttgctgctcttaggatcctttctttatccttgacctttgggagtttgattattaaataccgtgaggtagccttctttgggttaaatctgcttggtattctataaccttcttttacttgaatgttgatatctttctctgtgtttgggatgttctgtgatactatgcttttgaataaactttactgccatctctttttgtactgcttctttaaggtcaataactcttagatttgcccttttgaggctattttccagatcttataggtgtacttcatttttttaaaattattttttcttttgtctcctctgactatgtattttcaaatatcctgtcttcaagctcacttactgtttcttctgcttgatcagtgttgctgttaagatactctgatgcattgttcggcatgtcattgcatttttccaactctaggatttctgctttattctttttaattatttcaatctctttgttaaatttatctgatagaattctgaatcctttctctgtgttatcttgaatttctttgagtttcttcaaaacagctattttgaattctctgtctgaaaggtcacatatctctctttttctaggattcattcctgctgccttgtttagttcacttggtgaggtcatgttttcctggaggtgttctttggtgtctgagcattcagcagctaggtatttattctagtcttcacagtctgggcttgtttttgcctgtccttcttgagaaggctttctaggtattcaaagggactttggccataagcccgattatgctgtggtttttgcagattcgtagacctaccaccttggtgttcatggataagatggagaagaattctctggactatcaggcaaagactcttgttcttttcccttactttctctcaaaaatacagattctctctctctgtgctgagccacttggaattggggctatgctgatgtaagcactcctgtgggctgggactgtgctgggtcagacctgaagccagcacagcactgggccttcccaaggcctttcacttcgggatggtgagttccccsaggtcctgggtgtgtccagagatactgtctgagagactgtctgagagccagggattggaagagtctctgcctgtggccacgaccttcactggtcctcagggggttgtgccaagtcatcactgatgttcacttaaagcccaagggctcttctgtcagcttatagtgaatgctgccaggcctgggactatgcatccttcagggcagtaggctccccctctggcccvgggcaggtccagaaatgctgtcttaagagcctaggcctggactcagagaccccaagagcctccttgttgctctacccagccatgrccaagctggtacctgatttttgattcttgtgacagtacttttctgtgtgcagaaaagcaattagagtgcttttgtgtgtgcagattgttgttaaaatttggtgttcctgcagtgaggaccaatggtctaggcttctgttctaccatcttgcttctcctcccctcaggaaatgtttgttaaacataaaaaaacagttggttcagctgatgaggggaccgttcatttttctgtcttttcttacagaagcaggaagattgatggcttggtattatattacatttgagacagtgaagaaattttatacaatcagtggaaaagaaaccttatcagatctggtaaattaattttcactagaaaaaaaatacatagtggtatagtataaaataatatttgagaaacaactaatttgtgtatctcatataatttaagaatgaatgagcagaaaagaaagcatttctaagatatatcctctggtataattctgatcatgagatatggaatagtctttcttagaatatattatattttctgttttaactcttatcagagctaagaaaacttatatacaaaactaaaataggtatggcaactactttacaacttaggtgataatgctaattaccttggtagtggctacacaatgtaataatatgtaagaaagattccaagatgatgtggtgtgatatattaggaaagtctaccatgagtgaaggacagtgagttgcatgcagcatgtgtgccacgtacttgcaacccttccctaaatattttgggtgagaacagtgagaacaatggaaatagaatagtattggtgatgacctagataaaagaactgattgtagaaaaaatgggaataataacaggttatgctaaaatatcaacaatggggcaactttgcagctgcagcrgtgaatagaaccataggcatgtcattggtawatggcgactgcattggtcctttctccctttactcaggacatgaatatgaaacaatattcataaaagaaaatatttactctcaaatttaagccgttcatttttatttaaaatatctaatttgattactgtggtaagattattgtagtaaaaattgcacagtagaattccagttatgattgaggagtcacataaacaacaattgatgaaaaatagaaggtttgtatttttgtgtaaacattattcttaactaaggagaaatcaagagtcgaaaacayccactattaacattaactcatctgatcttgagtttagcaagtgtgtaagaaaattaaaacaagtgttagttccattttagatatgtgggaaaccaaagcacagagactgctttgtttgtcatctggtggaagtaggctctagaatccaaatttcctaatatctaaaacattctatgactaaattatcctcaattgagataatgatttgcaaactataraacagtagaatagcagtagtagtagtattaggagtaggagtaacaaaaacagtgtttattgaggacttatttattactatgtgataggcactgggctagatattttaaattctatcttgttaatctttaaagttttattggtatagtcctggtgtctaatgcagtgtctggtatataataggagtttgtaagcatttgttagtgaatgaatgaatccttaaagaagcaaaatgtataaagcaggtttttaactctgttatgttcattgataaaactgtgatggtttaaggcagtatgaaaaataaataaatttggagaaaggatgagaggaaataaaaaatagacttcattaaatggacaactactgaaatgttataggttacattgatagctggctgcaaggaatttctagatatacagttaaggataaatgaaaagaaaacactgaatactttgaacaaagatccaaatcggataactatcaggtacagaaattacatatgttttaaataattttaagaggttttatttaattaaaataaataataataaatgttttgccatgtggttttatttacagatttccaatggaaggaagaattaaaacaagagaaatgaaagtaaattggtaaagatgattcatacttatgaaagttttctttttttggttttaaaacatttttaatttgtttttcttaatacagaaaagattacataaaaatgagtcagaatgtggatgtgaaattaatttcttacaactctcagactttaaaattgatgatttgtgaatgctttttcttagcaaacatttgttcagagtgtattctgttgaggcaaggtggacggttgaatgaagacatgcttcttatgcttctcattgtcaggagctttcaagttagcttgagtgagagtagtacatttaaaaataatggacagtatgaaaacctgtgtaataaatgtctactgaatggtagtggcattctgggagagacaaagagtaaaagcaaaatcatgagtaaaggcgtgtatatgtgacagtggatgactgttctgccaaaaatggggagtttgtacagagactagtaattgaaagagtaaattaaggttacactgtaacttgtgacttttagcagtttgcagtcacaaatgcartgatactgttttctgctatactgagtgcttggctttctgagtatgtaggtcttagtgttatgtaatttaaggtgaaatgatctttttcaatgtggctcaataaaaccaattagccaaagaatttctttttcctccatagctagaggaggccattcyttctttgggattcttcctgacatctcattaaattttatcttccaaatacctttacgtctataagacagtcttctcattgttgtttacaactcatcaggcagatttgtagcttgtaccacagaagttaatgtttattttcttagctgtacttmtatattcaaatatttatttctataaattcatatatccttagagatcrtagtaaacttaagagatcatatagcccaatcctctcattttacaaacgatgtaagtgatgcccagataagttatgacttcgccaaggttatgttgctatctagaactcttgattttctcattttttcccccagtatactgtgttgcataaattattgagtcaaattaaatcaagtatttttccacattcattttcttgggaacactttatttgcactttcagtgcttccattaactttgccttaaattgggtagtatattcttttgattgaagctgtcaaattttaaagttaattattatactttataattgtttttatacatatcataatttagattcccattatcatttcccgcctttgtgcatcttatttaagcataaccaagaagagagaatgtgtgtacgtgtgggatggaggggtcttaatccaaaatttatagtcttttggtaggtgatgatggctaatagttacctttttcatggctttgtcatatccctgttactttgctgaacttcaaatctgttcttctccaagtagatgttaatcctcttagttttaggattttatccttcaagtttctggtttctkccctttttattatttttatttatttatttattttgagacagagtgtcacactgtggcccaggctcaagtgcaagggcatgatctccgctcactgcaacctctgcctcccgggctcaagcgattctcctgcctcagcctctggagtagctgtgattacaggagcacactatcacacctggctaatttttgtatttttagtagagatggggtttcaccatgttggccagtcttgtcccaaactcctgacctcaaaggtgatccacctgcctcggcctcccaaagtgctgggattacaggcgtgagccagcgtgcctggctctgcccttttaatttaaggctrtttttaaattcttcctagctttaattcctaggtcttccctcttcagcactagctctgttttctttaactggtatttttcagtgaactgacagggtatgatgtggagccaccatacraagccctggacttcccaactctggattccccttttacacacaagaataaactgtttgtgtgtaaactgatatggtctggtcatgaacgtaattctaaccgaatcaatactttatctcatttaattcttttactaaccctgggttagtcataactaccatgtaactctgcccctgttagttgaggtggtagagctgccacctcacctgaggctgtggcacttctgtttttactgaggacaagctcaggggtaagatcatagracatcactgcttgccttatctggtgcagagaaacagagagccctgccatggttctgtacctactagcttaaatccctgtccttcctcctatccctgttttattactgcttcttgaaataagatttctgacagggaagtatgatgttgaaaagtgtcctatttattattagaagtattgctttttaatataaataaatattacttcaaaagtcttatttttactccagcaatttcttactccacatttgtgcatctctaggtagcttaacaaggagttttatttacccagcatttaaaagcaccccatttacatttttccatcagttccttctttgatagtatactgtgtatctttgtaactatttcttaatagatgatataaaataattttcagaagcatataccatagccaaaaaaagtgaatagtttaaatttcagctgtatacatccattccaggaagtgagttgattacttctttcaattttcatgtatcttgtgctaaacgaaatcatgaaatataactattctgccgtttttctttgtatagctgactgtttcggtcttattgagagacctccttctactgaggagtttaggaagaaatttgttttttaaaagagatccccttaagagagtaataataagtacagtaattttagttagaaccatcagtgatttgcatatcaatgcctgattaggtaagtttatgggcaaaacaggtagcaaagaacccrggatatactaggcacataggcactagtgtcttttttccccttgaacaactaacacctcaaatttagtagcccagcagctgctggttttgaataaccagctaatatgctactgaccttcatacactgaatagaattatcagcacctaatactatgcctggcacttaataagcatttaataaaaatgtgttgattaaacaaattgtattatttttctctaattctttgaaaagaaatagtagagccaaaagatagatctgtattggaggagaatatgaaaataatttgagatagttgaggttaaagtaacagtctaagtgaaagtctcctgtaatttgtatcaatctagagattataatgaaagtctgagaagaaatgagatcttttagagagagattgagtgaataaagaagagcaataaataaataaataaataaagacaactttgaggatttggggaaaaaggaatgaacttttattattgacctgcaataataattatgcaagataatcatgtagtattgcagaaattaaggcagagaaaagttttaagaaggaatacttcagtgagtgatatcaaatactgggagatagataacccttaaaagggagtaacaattttttttctttcccccagtcttattcaggctcaactaggatgcattcccatacaagattttgctttgacacaagataccgcaaagattttcagacatggctcccgaattacaagatgtatgttacaggattagtggattttaaatattttttccaataaactggtatattagatttaatactggaaactttttttttagggttgtcagattttgtagctgctcaagaaaagaagtttgctgtactattgaatagtttgattttagctaaatgttttaggtgtaaactttgggaaaactctctgcatgtatccaaacaactggaaaaaattggtaggtactgaatacaggcaggcagtttggccatgtctgcaatttattttgtattcactgttagtaaaattattctgtgatgattacagaccttcaaggaaggtatgtgtttgtaggcttaaataagtgctgtactttcgaaaatctgattttcctttgctcctgcttaaaggattccatttgaaatcaactgaatgatacatgagtacatgagaaacctaataaaaattaatgctgtcatttgaaaattttttctcataccaagagggaaatttggttacagtaattaggyaactatgtgatgccctctcttccacttttttgatgaatattttgttttgatctcaattacaaggtggagttagcagtcccagccattcctaattcattacagaaaattatgtcacctctttatgtcttaattttttttttgttttcaataacagtagggtattaatactgattttcatagagattctgtagacaaaagattgtgcctgattattttgtctatagggaccttgtgyagtgtgtgctatgagactgyagggagtaccatttacaaaggattttcctgtttggtacctgtgaccttgtgaccctattctttcttagatagctagaattctaaaaagagagttactatctcatcactgacagccttgttaattttacaattttgtatgcatcttgggggtatcaacaaattaaataatggatttttagggatgttttgttatttatttgaacaaagattaccaactgtttatgaagaagacctaccttttgtatctggaaatttgaaatcagtggggtggcagagggctgactaggaagtcatgggagctggggtgaagtggggattggctggtgaaagtamggggagagattcctgatggaaaggctcaccttcttacagaagtcctggcaaccaaataccacatccatcccacaaaggcaagagttctcaattggaaaggtggttccatacaacatttagaaaatttgraattcggctaagtgattactagtaaatttcattatacttgaaaaagccaatctttctggctttctagagtattgtcaatatgggcatccattgcattctgtcccttccagattgttgawactaacctgttttcacacacactcattacagctgaacagaaaaaagcaaatattgcccagaaaaaaaaaatcatataaaagtgagagaatctaaacaaaaagtcaaatccaagttgttattgggcatcttgaaaaaaataatgcatacaaattaattttaatgttggctataaatgaaaaagttaaaagtcaataaacattttgaggggaaatggaaatgaacattaaggaattatgaatactagaagctgagtcttaagaagaactaagagaaattcccaagaacaagtaaatatatgagtaaggaaatagggtcataccttcaccagtaatacatgtaatatatgtgccttagacaaagtagtaatattttggaattttatactgttccgtgtcttctatttggggatttggataaattcattcataagcatataagaattgtaaattctgccttctgaaagtataaggaaataggaaagatccaaagaagaaaatgaacttgattttttttgttgtttgtttgtttgtttttgagatggagttttgctttgttgcccaggctagagtacaatggcacgatcttggctcaccgcaacctccgcctctcgggttcaagcgattctcctgcctcagcctcctgagtagctgggattacaggcatgtgccaccatgcccggctaattttgtatttttagtagagacggggtttctccatgttggtcaggttggtctcgaactcccgacctcaggtgatccgcccgccttggcctcctaaagtgctgggattacaggtgtgagccactgggcccaaccgaatttgatgtatttaaggaatagaatgaaagcaagtrtgactggagagtagtcagcaagaggagagttagaggaaattagatttgagacaaaggctgtagtcagattatataggtaaggaaatttggcyccagtaaggaaattgccacttcattctaaatacaatggaaaagcattggaagttttaggcagtagattaaaatagtctggtttagwtacagaaacatagaactgtatttctaagacagaaatggtcagagagccatagcttcataaagcagtattccctcgcttcattcaagcatgatccttgaatcatgttgcctttctttcaagcatgagtacaaaaatacatatctcttggtgattggactatggatgacgtatagtagaactaaacatccatcatgtggaccagagtttctctttcttttataaagcaaatgcatattttatttgtctgaataaatatgaataattgaataatgtcacaaacccaataatccaactgaaaactttttacaaaaactttaagttagttatttgactggatcttaaaattttttttttttactaatttagttgttaaatatttaaatatatgttttatttaaagtgcattatttttaagttgttgtttgattaattttccacaggtrtaacattgtcaaatgcaatcgtaaatgctggtttgacttcctttaaaaaaatagaagagacagatgcaagggaacttgaattggtagttatattcacttattcctaattccatctaaattctgaggcctacctttatttctattaaaagttattttccttctcatagttataagtatttcaacttacttttgggtgataagcattattaaagctatttattctaaaaaatattttactaaaagaatttcaagtgttgtggtaagaatataatgatgtaaatatttttagattttaaacagacatcccccctttggaacccagataaaagaaactgtgatgtatctaccaaaatatgaacttaaagtggaacaggtaaatattttctgtttcttagatattttattgtcttttcagaaataaagctacctataaataggcttcagctgagtatgagaagtaaggttatttttaacactttttatacttgtccttttttaaagattacaagatatagtgatacgacggcagaaatattagtgactgttatattaagaaattttgaacagctacaaactaaaagaacagcatcggattctcactatgttaccttaatcatcggtgacgcagataatcaagtagtttatctgcacaagattacgtaagtgtgaaatttctgatgtttgatcttatttctaagcatatactgtaaaagaaaaattctactggaaaaaaaataacaagatcattgtgggatcaactaaattacattttcctgacacaataatgggatggtttctctatttttctattaaagaagatattaacattgggtctgttgttttaaattgttatatttagtactcagatgaacaaagtataaaatctatcaccatgatctgaaacaagtgagtagattacctctaggaggtctttcttatttcactgcttttctccagtcatccatgaccctactactgtttggatgcagtctttctcctactgacctcaaaatataccttctacttccaaattaaaatctaacaaattactatagctccattgtaggatccaagcaaacaaagcaaatgtatagaggaggtaccctcccttatatctagttctgtagcatgccattctataatttttacttcagcatttttccaggtactattattttctcccaggatgtcataagcaatctctaaggatatcagttgcagctataactaatattatttagcacttagtaggttccaaatattgaattatttaatatttgtatgagacaggtgctgtccgtattctgtagaggaggaaattgagacaaaaagagtttaatgagtttgatttatgattaatcaaaccttaatcatggtcatatagctagttaatagcaaagtctagatttgaacccaatccagagcctagactcccaaccatattactgtacttgtaagttcaggaatggcagtgattctgaaatgggaatctcctaattgtgccagtatactggaagataccttcccaaaaagtcgcatgcaaggtttctgaagggactgcagtgaccaggatatccctttcactggtaactgctctcctgcagctaaccatgacccacttatagagaatatgctgttgtacaaatctttgttctctgtgactaataagtctatgactacatgagactaaaataagtttagtcataaaaatggttgctggcttgtgatgttattagatacaaaccattttatataaatttaaaaatactattgaagttgttctcataacgtatagccagtttaaaatggtagtgatttaggggcaagctcatgtgttattgatacaaagtatatattcttattgggactaaaatggtaaatgcaacttggaaacagctgtaattaaaaaaattagggattggatggggtggctcacacctgtaatctcagcactttgagaggctgaggcaggaggatcacttaaagcccagagtttcagaccagcctgggcaacaaagtgagaccctatttctacaaaaataaataaataaataatctgagcatagtgccaatgtgcctgtggtcccagctactcgggagaccgaggcaggaagactgcctgagcctaggagtttgtggctgcagtgaggtatgattgtaccactgcactccagcccaggcaacagagtaagattctgtctcaaagaaaattaattaattttttaaaaatcatggtcaagagagttccattgatactttattctccctccttaaaagttggggaaagcagttttcagtaattgatttcagtttactactagagagtatctttcttaagaacaatcagcccttcaagattaatatgtatttcattcagtgtttggatcactatttaaactatactatttttcagggattctgttttgctaaaagctggaagttgggctaaaaagattgctgtgaaaagagctcttaaatctgaagatcttagcataaatctaataagttctgaatttggtaagttaattgaagtaatgaagacatgaatataaataatataattgcatttaaaaattacatcctttatgctggtacagaaaaacagtataaatggtattatgcaaaaataatatatttagataatatgaataaacttcaaaggaagtttcatgtatttagatatgtaaaacataacatggaccagatgacataattaaaagtttatcttttcatttatagatattttattttcctagatagttaaattgcagttattgttggaagatttttatttttataatgataaatatataattttttagttgtcgtattttttaacctttcaacatattttaactttctggacttcttagctctagaagttataaaaatgtaagagagataaaaagaaataagtgttctcatatgtggatttatatgacaaataaacatttgtgtacttttttttcattttccagttgggcttgatattcagcagaaacttacagtcttttacttagaacccaagaggtttggaaatcaaatcactatgcaaagaaaatctgaaacacagatttcccattctaaacattcagacatatctacaatagcaggacctaataaaggtaaatagctgtattaattcctattttatattaaagcaaagatatggctaggaaggagtatcagtgttatagtactgcaacactcagattgaggatactctggaataagatatttaagcttcatagtaatttcattaatagtatatagtagagattcttcaagttagtatttgtcaaattggggtaatggttgggggacaaatttttttattcatcttttggtatatgtattagtccattttcatgctgctgataaagacatacctgagactgggaagaaaaagaggtttaattggacttacagttgcacatggctggggaggcctcagaatcatggcaggaggtgaagggcacatcttgcatggtggtggcgagagaaaaatgaggaagaagcaaaagcagaaaccccgataagcccatcagatctcatgagacttactcactatcacaagaacagcgcaaaaaagaccagcccccatgatttggttacctccccctgggtccctcccacaacacatgggaattctgggagatacaattcaagttgggattttggtggggacacagccaaaccatatcattccacccctagcccctccaaatctcatgtcctcacatttcaaaaccaatcacaccttcccaacagtcccccaaagccttaactcatttcagcattaacccaaaagtccacagttcaaagtctcatctgagacaaggcaagtcccttctgcctatgagcctgtaaaatcaaaagcaagctagttacttcctagatataatgggggtacagatattgggtaaatacagtcattccaaatgggagaaattggccaaaacaaagggcttacaggccccatgcatgtctgaaatccagtggagcagtcaaactttaaagctccaaaatgatctcctttgactccaggtctcacatctaggtcacatggatgcaagaggtgagttcccatggtcttgggaagatccacccctgtggctttgcagggcacagcctccctactggctgctttcatgggttggtgttgagtgtctgcagcttttccaagtgcacagttcaagctgtcggtggatctaccattcgggggtctggaggatggtggccctcttctcacagctccactaggcagcaccccactagagactctgtgtgggggctctgaccccacatttctcttctacattgccttaccagaggttctccatgagggctttgctcctgcagcaaacttttgcctgggcatccaggcatttccatacatcttctgaaatccaggtggaggttcccaaacctcgattcttgacttctgtgtacccacaggctcaataccatgtggaagctgccaaggcttggggcttccacaagccttgaagccacagctggagctgtatgttgacccctttcagccatggctggagcagctgggacataggacaccaaatccctaggctgcacacagcacagggacctgggcccagcccatgaaagcactttttcctcctgggcctccaggcctgtgatagaaggggctgccgtaaacatctgtgacatggcctggagacattttccccatggtcttgaggtttaacattaggcttcttgctacttatgcaaatttctgcagccagcatgaatttctccccagcaaatgggtttttcttttctattgcatagtcaggctgcaaattttctgaacttttttttttttttgagatggagtctcactctgtcacccaggctggagtgcagtggcacgatctcggcttgctgcaacctctgcctcctgggttcaagcaattctcctgtctctgcctcctgagtagctgggactacaggcacccaccagcatgcccggctaatttttgtatttttagtagagacagggtttcaccatattggtcaggctggtctcaaactcctggtctcaggtgatccacctgcctcggcctcccaaagtgctgggataaattttctgaacttttatgccctgttccccttttacaactgaatgcctttaagagtaccatatcacctcttgaatgctttgctgcttagaaattttttccaccagatgccctaaatcatctctctcaagttaaaagttccacaaatctcttgggcaggggcaaaatgccaccagtctctttgctaaaacgtaacaagagtcacctttgctccagttcccaacaagttcctcatcttcatctgagaccacctcaacctggaccttattgtccatattgctatcagcattttgggcaaagccattccacaattctctaggaagttccaaactttcctacattttcctgtcttcctctgagctctccaaactgttccaacctttgcctgttacccagtttcaaagtcgcttccacatatttgggtatcttttcagcaatgtccccactctactggtaccaatttactatattaatctgttttcacactgctgataaagacatagctgatactgggaaggaaaagaggtttaattgtacttaacagtttcacatggctggggaggcctcagaatcacatggtgggagttaaaaggcacttcttacatggcggcggcaagagaaaaatgaggaagaagcaaaagcagaaacccttgataaacccatcagatctcttgagacttattcactatcaggagaatagcaagggaaagaccagcctccatgattcaattacctccccctcagtcccttccacaacacgtgggaattctgggagatacaattcaagttgagattttggtggggacacagccaaaccatgtcagtatacgtttttccttttccatacttatgccattgttatagccattgtcaggggagatcaagtgatgtacaagaatcaacagatttgttaaggcaaatcagagtgaaaatgaattattattttttattatgggaatttttcaaacatatacaaaagtagatagaagtgtaagatgaattttcatttactcattatccactttaaacagtgatcaattcatggctgctactgtttcatctatacctctctagtttttttttccatccatattttgaagaaaattttagatatcgtattatttcctctgtaaatgtttcattataactctatctaaatggtaaagatttttttaaactacattacttttacacataaaaactaatattatccaatattaagtcagggttcaa

SEQ ID NO: 94745 - DNA, 38834 bp, Homo sapiens
tcaaaaatcaattgaccataaatataagggtttatgtttcacttttctgttccgttcatttgtatgtctgtccttatgccagtatcacactatcttgattactatagcattgtagtaagttttgaaattagtttatcttttacctatactaattcttagcaaaatccccctggaaatgtcaatactgtgaccatgctgatgccataggcacacttaactagctcttacttggctgggcgcggcggctcacgcctgtaatccctgcactttgggaggctgaggtgggcaaactacttgagcccaggagttcaagaccagcctaggcaacataatgagaccccatctctataaaaaatgcaaaaattagccaggcgtggtggcgtgtccctgtggtcctggctacttgggaggctgagataggaggatcacctgagcctggggaggttgtagtgagctgcgatcacaccactgcactccagcctgggcaacagtgagaccctgtctaaaaaaaacaaccagaaagctcttgctgtagtatttgattagtttttatagcctacaaggaaccttcatgtcaactgtgttctttgctcttaactgtaaccttatgaagagtataaggcacagtgcagtggaggatgcagaggcttacaaaggctgagtcatttccagagagatacagagccttgtggttctcactgatgatcttttcactaggaaatggcaagttgtactggtcatactggtgagtcttcttaaacagaagtactgataagacttgttttgtaaacgtgacgatattttgaaatggtatttctcaaactttagtgtgttcaagagtcatctggaaaactagttgaaaatagattcctggaccacaaccctagagattctcattcagtatgtctggagtagggctggagaatttctaacaagctcccagttgatgctcctgctgctggtttgtggtgcacactttgaatcccactgtcttacttgacatagtgttaagagtttgcatatatagttaattcagacttgtcaactctttcaccttcagaatttgcttagatactgaggaagcaattttcttgaaatagtatacttttaaaaattgtttcctcacatgactaaagattgtaatacattcaatcattttttttaaaactttgactgaatgcttaccagatgtataccagatccagagaatacaaaaatgagtcagaattgtccttaagaaaattttctgcatcggaattataaaattataaaacttggaattacaggctgggtgcagtggctcatgcctgtaatcccagcactttgggaggccgaggcaggtggatcacttgaggtcaggagttcgagaccagcctggccaacatggcaaaaccctgtctctactaaaaatacaaaaattagccagtcatggtggcaggcgcctataatcccagctactctggaggctgaggcaggagaattgctcaaacctgggaggcggaggttgcagtgagctgagatcgcatcactgcactccagcctgggcgacagagtgagactccgcctccaaaaaaaaaaaaaaaacttggaattaattacagcaatgaagagagggtatatgaaacactttgctatgatttgaatgtgtccctcaaggttcatatgttggaaacttaagcctcaatacaacagtatagagaggcagggcctttaagaggtaaattaggtcacaagggcagccctcatgaatggtttaatgccattatctctggaacgggttcattatcttgggagtggttccttattaaaggatgacttgtgtccccttccctctcttgcccatgtcatgccttccatcttgttattacacagcaagaaggccttcatcagatgccagccccttgatcttggacttctcagcttccataatcataagccagtttctgtatgctcattatagttacccagtttgtcgtattctgttacagtaccacaaaatggaccaagacacctcgtaccttggttttaccatttcttttctgtgtcgccttttccttttgttgttttcgaagctggctttacttctcatatgagtttactaacagtataacttcaaggagtccagaaataagcatttctttttttttttttactactccaggcatctctgaccaatgtgaatagcaggatctcagctatatgacattgtccaaggccctgtagaatgggccttatggacttacttgaagaagatggatatacatgggtgtcaggcaggcactaatattaaattatataaataggggaatataaagaccaaatgtatgcattatatatcaaacaaagcattctgatgagaggtggtctagcgaggagatctaaaatggtaattacattttctctggctaaggactggagaatgaagagataaggacaaacactggccctgtgaagtacatggagaacatgtgatccctagttgtttttatgtcatattccttatccctggcagatggcagacttcattcttaacactgtgcttcatacctttctctttaccttccagtgactgtcatgtggcatgggtctctgcccaagctcgtaatgagactatagcaaggcggctgtgggacgtcagttgtgacctgctgggcctcccaatagactaacaggcagtgccagttggacccaagagaagactgcagcagactacacagtacttcttgtcaaaatgattctccttcaaggttttcaaaacctttagcacaaagagagcaaaaccttccagccttgcctgcttggtgtccagttaaaactcagtgtactgccagattcgtctaaatgtctgtcatgtccagatttactttgcttctgttactgccagagttactagagatatcataataggataagaagaccctcatatgacctgcacagctcattttccttctgaaagaaactactacctaggagaatctaagctatagcagggatgatttatgcaaatttgaactagcttctttgttcacaattcagttcctcccaaccaaccagtcttcacttcaagagggccacactgcaacctcagcttaacatgaataacaaagactggctcaggagcagggcttgcccaggcatggtggatcaccggaggtcagtagttcaagaccagcctggccaacatggtgaaaccccacctctactaaaaattgtgtatatctttgtgtgtcttcctgtttatgtgtgccaagggagtattttcacaaagttcaaaacagccacaataatcagagatggagcaaaccagtgccatccagtctttatgcaaatgaaatgctgcaaagggaagcagattctgtatatgttggtaactacccaccaagagcacatgggtagcagggaagaagtaaaaaaagagaaggagaatactggaagataatgcacaaaatgaagggactagttaaggattaactagccctttaaggattaactagttaaggattaatagcaaaagatattaaatatgctaacatagctatggaggaattgagggcaagcacccaggactgatgaggtcttaacaaaaaccagtgtggcaaaaaaaaaaaaaaaaaaaaaaaaaaaaatcctaaaaacaaacaaacaaaaaaaacaattcttcattcagaaaaattatcttagggactgatattggtaattatggtcaatttaataatattttggggcatttccttacattgtcttgacaagattaaaatgtctgtgccaaaattttgtattttatttggagacttcttatcaaaagtaatgctgccaaaggaagtctaaggaattagtagtgttcccatcacttgtttggagtgtgctattctaaaagattttgatttcctggaatgacaattatattttaactttggtgggggaaagagttataggaccacagtcttcacttctgatacttgtaaattaatcttttattgcacttgttttgaccattaagctatatgtttagaaatggtcattttacggaaaaattagaaaaattctgataatagtgcagaataaatgaattaatgttttacttaatttatattgaactgtcaatgacaaataaaaattctttttgattattttttgttttcatttaccagaataaaaactaagaattaaaagtttgattacagtcaaaagaagaaaacactgttcattattatggttgtgcaatgatttctcattctaaagaataatttgttccagagtctagctacagtgtaatctcaatccacatgctattaatttaggttgtgtgataatctaattgttcattcaccatttcctacttaaccttttttgacactcttcacagacactttttccacatttcttgatcatcccgggccatttttttttcctttctttttaattagagacagcgtcttgctttgttgcccaggctggcctcaaactctgggctcaagcgatcctcccaccttggcctcccaaagtgctggggtacaggtgtgagccgcagcgcccggccccaggctattgatcctttttttgcacctgccccttatttctgtactgtgacaagtcccagcattgtgctgtgggacttacacagtatactgactatcctcagacttggtcatgtctatgctcagtgcatattaagagcttaaccaaagtgtgttgaatcaacagccaatgaacttgatctaataaaaatgagggcccaggagatacaaattagcaaagcattttctcctgagcagtcatacatcttttaatatttgtaggcagtttaaaattgaactcccaagcaaacatttgagaacagacaccttgagcaaaccgtgaaatcggtgaaaataataatttattttaattttttgagatagggtcttctctgtcacccaggctggagtgtggtggcacgatctcagctcactgcaaccactgcctcccgggttcaggcgattctcctgcctcagcctcccgagtagctggggttacaggcgcccaccaccacgcttggctaatttttgtgtttttagcagagacgggggtttcaccatgttggccaggctggtcttgaactcttgacctgaagtgatccgcccgcctcggcctcccaaagtgctgggatgacgcctgagccaccatgcccgacgtgaagacaggaatttatacccatggagtgcaagaagggaccttgtaatttttaacacgtgacacttagtggcagatgagacctaatgaagccaggcccaccttccacaccagattataaattcccctggagcagagattaaatgttttattcaccaacatgcccagatccctcgcaatgcctacgcttgacaaacacctgttgtcaacaagtgcacgaggcagcctaggaggagaattagtctccacgaggagaattactcgggcctagcagctagagtatttcgaggtcatcctaactgggttccacttttgaatttttggtttttgggttttttgtttttttggagacaagatctcgctccacttgggagcaaggtctcccaaagctggagtgcagtggtgggacctcagcctccgggggtagctggggccaaaagtgcgcgccaccatgcccggttcttattttgggtttctggtagagctctcgctattgtgcccaggctggtctcgaactactgggttcaagcaatcctcccacctcggcctcccaaagtactgggattacaggcgcgagccactcgcccggccgggttccacttctgaaagcttggggagccgctgggccttccaagaaaagtgctccacctcccgacggcaggcagagcccctggcccggctatctttccagggccgaaagctaacagtcaagacgcgaaacgaggaattcgggtcagggtggcaaagcaaagcgcgatgacagtgaggacgacgtctagacgcaaacatacatcaaatcgggccgaagcccgctgtcgccgcgcgggctgaacctggcacccggagcaacgcgcgaccccgggacgagacgctctcgtccgagccaaactacatccyccggcgtgcactgcagcgcccgcccctcgccggccggcggggcccgggaggaaggcggccgcgctgccagtcccgcaggtcccctaggyccctttcgctgcggcctttccccaacccggacccggcacttctcgggttccgcgactgccgatcgccccggcgcggcaccgctccctcaggagtcgcctaggccgcgcagtctcccgacttctcgtcaggctttcgcgccggcgctccagcaatcactggctggagaaggtgggcgttccggctcgagaggaccctgccgcggctccggaagagcctcgtcctgggcggcggtggtgcggcggtcgccgttatggccactgggctgggcggctgacmgccgggctaggaaagggcccagggccccgaatctcggtggccgctgctccagcgcggcctgcgccatggcctcctccgccgcctcctcggagcatttcgagaagctgcacgagatcttccgcggcctccatgaagacctacaaggggtgcccgagcggctgctgggracggcggggaccggtgaggcgggggtgggccacgccgtggggagcgcagccctgcgcgctttggaaggaagattcycccaccttcctcccagaccygggcccgcgtctcctccctccrcgtcctcagacacgccccctagggctggcttgtcccagccccaggtctccctgctgmcactgagagtaaattggacctcgggattcagttccctgggatccttctatggccttccacattttctcatcttttttcactgtggcaaatagagcagaggggcttttgcatctgcggtcctgtaatgtagagtgggtttctttcatagctgtttttgtttgttttatgcatttaaaagcactagtctcaagacaggtctagttttcaccagactgacagaggatccgtagcacagaaaaagggttaaaaacccaaaggagtcataatttgggggtgttggtaaataccagttattggagggtagagagctggcctttaaaacctgattgtggcatttagatgtggtcttgttttgaacgtttttacagctgagactgtttactaccccttaatttcatgattcaggttgctacaagttctgtctggaggagctagagttttccggccctaaatccataggaaaagctgctatagttcttggcctccggatatatagaatttgatggcaaggacaaaactttgttttattgcttttatttaagagtcagagcttgggtgtttgctcaacgaattactcaaggtcataggaattgaatgactggtgagaatgaaattcatgtatttaatatatatttattgtgaggctgctgtgtgctaggtgctggtgaattgtgaggcaccgttctaggtgctggtgaatattgcaaattacagtgaaaaagatacgaacatccccattctagtgggtaggtgataaacaatatataactattaagaggcagtgttaaagaatacaggaaagtaaatcagagtaaaagaataggggatgggacttcagttttattttattatttatcatttttttttttgagacagggtctcactctgtcacccaggctggagtgcagtggcacgatctcggctcactgcaacctccacttcccagattgaagcaattctcctgcctcagcctctggagtaatagggattacagttgcgccaccacccctagctaattatttttgtatttttagtagagacagggttttgccatgttggccaggctgatctctaactcctgacctcaagtgatccgccttctttgggacttcagttttaaatagggcggttgtgaaagtcctctctgaggagatggcgtttgaacagagacttaaatgaagtgagggagtaaaccagaaatcagggagaagtgagtgtcagaaggagggaatagcactgcaaatgcctttaagcagaaatgagcttggtgtgttcagcgaagagcaggaagttccatgtgtttgggatggagtgagcaaaggagagcgataagcagggccagatcatgtagggccttgtggaccatggtgaaagacttgtgcctttttctaaatatgatgggatgcagttaaaagatactgtgcagaagcattgtgggatctgatttatgtgattgaaaagtagactgcaggcagggtacggtggctcacacctgtaattccagcacttggggaagccgaggcgggcggrtcacttgaggtcaggagttcaagaccagcctggccaatatggtgaaaccccatctctactaaaaatacaaaaattagccgggcatggtgtcagttgcctgtagtcccagctactcaggaggctgaggcagaattgcttgaacccaggaggcggaggttgcagtgagccgagatcatgccactgaactccagcctgggcaacagatcaagactctgtatcaaaaaaaaaaaaaaaagaaaagaaaagaaaaaaaagtagactgcaggccaggcatggtggctcacacctgtaatcccagcacttggggaagctgaggcaggagtattgctgtgttgaacgattttgagaccagcctgggcaacatggtgaaacctcatctctacaaaaaataaaaaaattagccaggcatggtggtgcatgcctgtagtcccagctcctggggaggctgaggtgggaggatcacttgggccctggagctggaggttgcagtgagccaagatcgcaccactgcactctagcctggaccacagagcaagactctcccaaaaaaaaaaaaaaatgtagactgcattttcaacctggcactgaattaatttttgcaatgcccatttctataagtctaaataatgcaaaagaacattgctttgaaaaatagaaaattgaattcattattactatggtttgaatgtccccctctaaaacttatgttgacatttatttgctattttaatcgcattaagaggtgggacccataagaaatgattagaccatgagggctccatcctcagagattagattgttatcctgagagtggcttggttgttgagagagtgggttagttcagccctctcttgcttgcctgctctcttgatctgttgcccttccatcttctgccatggggtgacccatgggtagcaagaaggcccttgaaagaatcagccctctcagccttgggcttcccagcctccagaactctgagaaatacatttattttctttataaattacccagactcagctattctgttatagcaacataaagctaagatagttacattcacctttgttgtctacccagcctttttctccatcctgcaaagaggacaatcagaaatatgtgaatttcttttcttttttctttcttttttttgtttttttgagatagagtcttgctctgtcgcccaggctggagtgcagtggtacaatctcagctcactgcaacctccacctcctgggttcaagtgattctcatgcctcagccttccgagtagctgggattacaggcgcatgctaccacacctagccaatttttgtatttttagtagacacggggtttcaccatgttggccaggctggtctcaaactcctgacctcaagtgatytgcccgccacggcctcccaaagtgctaggattacaggtgtgagccactgcgcccaaccacaaaatactctaagttgctggtaacagacatagttgtttaatggataagtaaagaaaatatatacatatccctagaattataataagtccaacaactttacctcttattcactacctcattcacactgctcaataaatgtttgttgaataaattgaatttatctaagcaaacacatggtgcctcatctctgaatcctctttttctagttcagagaccacatcataaagttttcagagctttaatgcccatcatgaattattaggcacagcataatgtacataatacagtccttgcatgtagcttatgctctgtaattgaattcagtcatttttcaataaacactgagaattattatgtatcagccactgtctrggctctgaggacttccagagttcttaccttaaaaagaaacaaacggccgggcacggtggctcatgctggtagtcccatcactttgggaggcctaggcgggcggatcacaaggtcacggatggagaccatcctggtcaacatggtgaaaccccatctctactcaaaatacaaaaattagctgggtgtggtggcatgtgcctgtagtcccagctactcaggaggctgaggcaggagaatcgattaaacccagggggcagagattgcaggcgacagagcgagactctatctcagaaaaaaaaaaaggtaacaaaccttacaaccaagtgtgtgattaatcctaaaataaagttctctgagaccataaaaagggctggacttgagcatggggaagagggggaagcttcaaaaaacttcaaactgaatataagggattgaatgggagtttgctagatgggaaatgcgaagaggcaacacaggagtaaaacatggaatactcccaactctggagcttagaatgtatgtgggaaagtagtagtagaggggcaggtgaaacagccagattgtgaggggatctcagtgtcacattgagacatttggacttgatatggaaagtcagtaaaggacgtaaagcagttgattgatgtggattttcttttagaaggagggcattaatggctagacaggacaagagagagcacaagaatctgggtacaggggactgtgttaagagccttttgggcagtcaccttgctaacgggaatttgtttgacacaggttctcactcctgtctcccgtcatccaggctggagtgcagtggcaccatcactgctcactgcagccttggcttcccgggctcaggtgatcctcccacctcagcctcccgagtagctgggaccacaggtgcatggcaccaggcctggctaattttttgtatttttagtaagggtctcccatgttatccaggctgttctcgaattcctgggcttaagtgatccacccacctcagcctcttaaagtgctggggttacaggggtgagctacagttcccggcccaagagttggttttgaggcagaaattaaccagcctcaatggatatgaggagtgagggagaaaggttccagggtgtctgcrttttttcacttggtcaactgggtgaatgatgaacttaagtaagaaacataagaggagaagcagagtttgggttgtggatgagaatatcaaaggtacctgtagaacagagatcatgacataatatagccttacaaaatgtttcttcttctgccattaaaaataacataygggggccaggtgtggtggctcgtgcctgtaatcccaacattttgggaggctgaggcaggaggattgcatgaggccaagagttggagaccagccttggcaacatggtgagacctatctctacaaaaaaaaaaaagctgagtagtgtggtgctgctcacttgtaatcccagctgctcaggaggctgaggcaggaggatcacttgagtctagcagtttgaagttttagtgagctgtcatcacatcattgcactccaacctgggtgacagagcaagactccgtctcaaaaaaaaaaaaaaaaattatgaagaagtatgtgaattgagaggccatatagtataatatttaacagcaagaattcaagagccagattgcctgagtttaaattcaccttctagtagcagtgtgaccttggacaggttactttaacccaattagtttttcctgccaaatggggataaatcatagtatctacttcacagggtttttgtgaggagtaaatgagttaatatatgtaaagtccttagaatactgcctgataatagagctactagccattttatttaaatgaaaattaagaataccagccctgtatacaactattcttacctttttttttccagagtacttattttctgacatattagacactttccacatttatgatatttacagtatattgtttgtcttcctttcactaggacagtggtttcattgtggtccatgaaccagctgcatcagcatcatttgggaacttgttagaaatgcaaattctcaggccccaccccagacctattgaatcagaaagttttaacaagcagtgtgttttcacagccctccagggggtttctgatgaaggctaagtgtgaaagccactgagctagaatataagctcaatgttgtctttttttcactgtgtttcctaagtaccagaacagtgcctagcacagactaggtgcttcatagatacctattggatgatggaatgtgtgaattgttggaaagaaaatattgatatatgattgtgatttatttctattctgttgtccacattttcattactttaaaaatgggtatattccacctattaaaacaacaaaaactgtatttctccraagtacagtctccattcactttctgcctttgaatgatactagagacaatgtgtcctgttttaggaagtttttgtgtaactgtccattaccacttacaataattattaatccatttaatatttcattaaatacctayggccataatttctactcttggttttacaacctctgaagaggtctctccarttacctcagagtactataatgtgctataatttcttaatctaatcaatgttaaatgcctgtggtcatgatttctagttttggttttgtcatacctgaagacatctctccatatgtcttaacgtgtatcataaaaatattgaaagttttccattttaaatcatttagatcagtatgtataacacaagaccctattattttcagagccagaaaaaatagtcactatggagtactataatcagctggccgataaacaccaattacttacagactgtagaattttaactattctaactcctcattttttttgtttgtttgttttttgttttttgagatggagtgttgctctttcacccaggctggagtgcagtggcgcgatctcggctcactgcaacttctgcctyccgggttcacgccattcttctgcctcagcctcccgagtagctgggactacaggcgcccaccaccacgccgggctaagtttttgtatttttagtagagacagggtttcactgtgtcagccaggatggtctcgatctcctgacctcgtgatccgcccgcctcggcctcccaaagtgcagggattacaggcgtgagccaccgcgcctggcctctaactcctcatattttctactgaatttggtttttgctcttaggttcttcctaagtatttactttcagaaacaatggtggtttctatttattgagcccttattatatttggcacttgctaagtgaatgttatgtgtattatttcttttaaccctttcaaacaacccttacaaggtcagtagtcttatagtccctatttgcagatgaggaaacaggttggttgagagggatctctgttgcttttaactcttgtatggtgtgggatctagtcagctgtcacggtgtacaaataaagggtgtaagtcctccattttgccacagtgaggcaccaaaagcaaagtaaccacatatttatgagctggtgaaactgaagttatttccacaactttaaagggccaagattaggcattcttgggctggaaattcaaatccccataaggaagagaggctgcccaccttggtcaaacattaaggtaggctttctgtagtgctgtttttcagagctgtctgtttccattttactccatgtcagcatccacccagtttcccaaaggagacagagttggtcccagagagtccctcacatgtgactgatttgggcaggcttgtggggtgggggatagtggtatttgaagtggttcattcttgttcatggtgcccattctccccaggatgccaccttgctgtttgtagttgattgtagcatcaattctaactccctaaaaagaggaagaggttttttgttttttcaacagattttaccagttgttaaaggctatactctgggagcacaaaaatgcccctcagttgtatacagtatacagttgtttaatatacagaaaagccttggactgggagtcagcacacttgcattccagaactagtgctgccatacatttgctgttccaatgactgtggggcaggcactcagtttctccagggtctagtgtcctcagtggtaaaggcaggaagttagactagatgatcgctgaggtacatcctagctctagcattcattggtttcataattctgagcctaaagaatttttaaaaagctgctattgatccctctcagttgggtagagatcagtctcttgaattatctgcctccctggctttatcatcacaagaaatgatttcaaaggtttctgttttgttttgttttaaatcttagaagtccagaaaggatctcataaatgtagtgaagttctgtaaaagtatgttgttatagagcacttataagaggaaatgtgttttatgaaatcaggtaggaaatggaatattctagcacacagaagttagtgaaaggagagaggttctgtggtcttcttctccccctttcatttatgtagttacattcctggaatcattctagaatttgcctcttgagaatgcggattttcatacccattaacaaaggaagaataaaggaggagaatttatgactaaacacagttgtagaaaagtctaggaaaggaaggagctaggaagggaatgtacatatgtgtacagtactgcttcttactgtctggcttggatcaggagtgagcatgcctgagtttggagatgtgctgactcagagcagtgatgatgctcagcacttttgggacagcttattacaaaataatacaatactgctccatggaagtagccgtttttgactgtcggtattatttcagtactggtagctaagaacacatccccctcaggaacagtaatagctgccttggtgctcatttcagttacatcatagatggtcaagagtcataccatttgccatggtgaaccttcctctacctttttttaaacaacaaacagccatgggttttgtgagtggtatggagaaaattgtctgaagtatcttgtgtatattaagggggtggcacacaacaatgaatgagacatagtaaagggtgtgttgtcatttgccctttcaggcagtagccacatctaaggaggtttatagttctaggatctatggcacagtaaaaatgacaaaataaatttccatgtttcagaggaacttggtctcaagttgagattatagaatatacgcatccaaaatgatttatggtcacttaaaaagtgggatacaaggacaggtgtggtggctcacacctgtagtcccaacactttggtaggctgaggtcgaggattgcctgagcccaggagtcaagaccagcttaggcaacatagtgaggccccatctctaccaaaaaaaaaattagctgtgtgtggtaacctgcacctgtagtctcagttacttgggaggatgaggcaggagaattgcttgagcaggtgggaggattgcttcagcctgggaggtcgaggctgcagtgagccgtaatcatgccacttcactccagcctgagtgagactgtctcaaaaaaaaaaaaaaaaaaagatataactgacattagatgctgttgtgattaacaaaatgtaaatccatataaagcattacagtgacattacatcttatgtaggattgggttcaaaagtcagggcttggccgggtgcactagctcacacctgttatcccagcactttgggaggccgagatgggtggaccacacaaggccagcctggccaacatggttaaaccccctctctaccaaaaaatagaaaaattatctggttgtggtggtgcactcctgtaatcccaccactcaggaggctgaggcatgagaatcacttgaacccaggagttggagtttgcagtgagctgagatgacgccacggcactccagcctgggcaacagagtgagacacagtctcaaaaaaagccaggtcttaagatgaaaatcagagtagacaaatcatctaagaaaatctcaggacagcaactgaatacccacatgccatttctccataagcccggctcatctgttctcttttgcagcggaaaggctgaggtggatggatcacttgaggtcargagtttgagaccagactggccaacatggcaaaaccctgtctttattaaaaatgtaaaaaaattagccgggcatggtggtgggtgcctgtaaccccagctgctcgggaggctgaggcaagagaatcgcttgaacctgggaggtggaggttgcagtgaaccgagaccgagccactgcactccagcctgggagacagagcaagactctgtctcaagaaaaaaaaaaaaattgctctttagttggtggaagtgctgctggcttgtgtttaggagtcacattgaaaaatacatagctttaaaaggccatatccccatacgtgcaacagcatagatgaaccttgactttgtgctaagtgaaataagctaaacacaaaggacaaatattgtatgattccacttaatggtgtacctggagtagtgaaattcatagaatggggaggtatttgatgggtacggaatttcagtttgagaggataaacaagttctggagaacagttagtggtgatggctccacaacggtgtgaatgtacctagccactaagctataccctcacaaatggtcaaaatggtaaattttatattacatgtattttgccagcctaggtgaccagtgagactctgtcttgaaacaaacaaacaaacattgtaaatgatggtaactttatggtgataagtagattatgtgtagatttccagggagaacagtcatttggatgtataaatttttttaaaaaatcaagctcctcttaaaaggagctaatttttgcttgttagatataagggaatgacctacttcctcattttgtagtcaatgaaggagaatgtgaggtcccaaagaaatgaaggaaattatctaagtttacatgctgaggcaggccygaacctggcaccagaacctcaccccgctgactaaccagaaaaggtgcttgtatgcctttcccccatacaaatgtttaccaggtgacagcattctggtaccaccttcataatttttgccatccgcaagtatcattattactgtcacttacattttatttatttatttatttattttgaaatggagtctccctctgtcgcccaggctggagtgcagtggcacaatcttggctcactgcaagctccgcctcctgggttcacaccattctcctgcctcagcctcctgagtagctgggaatacaggcgcccaccaccacaccaggctaattttttgtattttttagtagagatggggtttcaccgtgttaggcaggatggtctcgatctcctgacctcatgatccgcccgcctcggcctcccaaattgctgggattacaggcgtgagtcaccgtgcccagccttgtcacttacattttctttatgtcaacttatttcatgtaaaatacatttatttaaaacaatgttatttaaaaatgaaacttgctatcatattttagatggaaaacctgtagtataaactatcagaaaatacaattaagacaatactgttttagttagatgtttgttttgaagctgaagcctgttctatttttgttcaaaggggagattagtaatttttaggtattaaagatacactcaaccaaagggacagaatgggaaaggctgaaaggggaatgaataacgttctcatcgttcaagtcattgccggtgccacacccagagaaaaacaagcaccacaccagacagcctctcagcaagccgagtaggtggaatttttattttgcagaaaagtagtgtacgagttaacatagaagtggttcactgtgggagtggtgaggggtttcagagagtcactattggtaaacattctttttttttttttttttttttgagacagagtcttgctctattgcccaggctggagtgcaatggtgcaatctcggctcattgccacttccacctcctgggttcaagcatttctctacctctgcctcccaagtagctgagattacaggtgcctgccaccacgcccggctaatttttgtatcgttagtagagatggggtttcaccaggttggccagggtggtcttgaactcctgaccttgtgatccacctgccttggcctcccaaagtgctgggattacaggcatgagccaccaggccctgccataggaagcttattcgaagcagagggaatggcctttacaaatgtgtggaaacagtaataagcatttgaaacttatctatcttttctagaagaaaagaagaaattgatcagggattttgakgaaaagcaacaggaagcaaatgaaacggtgagaacarggaacaaattttgtttcttctacctggtgttggtcttttccagaagtaatgctatgagctgatcacaaattaactgttcctgtccattgatcttgattttgactatttcttactaaatgaagccagttgatggggatggttgttgagggggtttggcaaacaaatgggtgaagcctgaagatgctcctgaaatgtgactctttggtaatatattgctgatgtgagtagtaagggcattctcatacttttacccaagcagtcttttaaaatctgttgtttttttttttgttgttgttgttgttgtttgttttgagacagagtctcgctctgttgcccaagctggagtgcagtggcacagtctcggctcactgcaagctccacctcccgggttcacaccattctcctgcctcagcctcccaagtagctgggaatacaggtgggcgccaccacacctggctgtttttttgtattttcagtagagatggggtttcaccgtgttagccaggatggtctcgatctcctgacctcatgatctgcccgcctcggcctcccaaagtacagggattacaaggcatgagccaccgtgcctggcctaaaatctgtttttaagagctggccattaagataggttactggtcagtgcggtggctcacgcttgcaatcccaacactttgagatgccaaggtgggaggatcacttgaggccagaagttcaagaccagcctgggcgacatagggagaccccccatctctaccaaacaaaaaaaaattaccgaggtttggtggtgcatgcctctggacccagctactcaggaggctgaggtgggagatcacttcagcctgggaggtcaagcatgtggttagccacagttgcaccactgcactccagtctgggtgacagagtgagacctgcctcaaaaaaaaaaaaaaaaaaaaaaggttactgttctttgttaaacctactgtcacagaaaatgtagtttagaggtaattctaaccatgtccctttctgtcttaagagacaacataggagctggagttggtacctcaggcaagacatgcatgagtctcagttggtacccaaagtttgtcagaagttggttccgtttactgaacagtttaacaactgcttctcttcacctgtggcttttctttaaaaaaaaaaaactttttttttttttttttttttgctctagccctatagaagcaagagtcctttgactccatctcatcatactctagcttcagcaaactcattaagattggggccaaaattctggtcgctgctagtactccgcagaaatagttggccctgtatttgctacccgagagcagatggagaaaaaattctcttttggccagcgaacttccttcttgcttgttgaagatcagtgtttcaatttcccacttatcccaatgaagttctgagaaggaagcacatctgcatccttttctctgttttgcatctgttttaagaaagaccaggccactagactgtgggaactatcttcttcctaatgggagtactgggagcttttcttaatacctgtgtacagctgggcatatccatgatacctgtttgtagccattctcctgtttcagttaataccttggtagcatttttaaaatcttctagctgctactgatttgtttgatgctcagatacttgttttctccaaactcagcaaaagtaataatcctatgctgcccattccaggcagatgaaaataatttagggcctcttgtggatgtgtccaggtgttacattttacttaccccagaaaaatggaagtctgattcccctaaagcagactgctctgggtaggcccctgttctctctgacatggagacaaacttaattgattttcagaaagaggagcaggagaagggaagaaccctgatgccagacccctatcatttttaatacagtagacttcaaagcacttcttgatggcaatgttcaatcataccaggctaaaaacttggtatattgaagagagctgagagaatttgaagattttgaatcctgactccttttctgtttaattttttatatatatatagagatgaggtcttgctatgttgcccaggctgtgctcaagtgatcctcctgcctcggcttcccaaagtgccaggattacaggtttgagccactgtgcctggcccggactcctttttgtgcgatcttcagaggtttctttaagtcttatatatgaaatggagcatttcctaccttattgatttgttgtgaggattaaatggagaatgtatataaaagtgtttagtaagctataaagtacttctgtttttccattcattcagttcatatactcgaatgcctgctctgtgcttgctgggcactatgcaaggcattcagaatgaggggaacatgccagacatggtccctgcctcmtggagcatatggttatttacttggtgtagtccaaataaataagtagtttgattagtccaaactaggcatatttccaartgagtgagggaagaaccaggctatctgctcactactttctgccttcccagctggcagagatggaggaggagctacgttatgcacccctgtctttccgaaacccyatgatgtctaagcttcgaaactaccggaaggaccttgctaaactccatcgggaggtgagaagcacacctttgacagccacacctggaggccgaggagacatgaaatatggcatatatgctgtagagaatgagcatatggtaagttttagctgttttgtttgttttttttttcctttaagggcctgtggtacaaaaattaactatattgttggggtatttcatgttatcagtgtatactagactcttgtttcatttttttcacccttatcctcttttctgcatccagttcctgttaccccttggtatctgctctatttaaggcaggcctttcgaactatatgcatatttagatttctttttatccttaatataatacagtcttataataaaaaaaaaacagtgctttgtatgtagtagaatgtaaatgttacctattcttattatctggattctgactcattgatctaatttcttttctccttgatcttttttattctctcatataaattttagaatcactttctcaggtatgcctggaaaattcagttaggtttctaatttatcagaatattgttacaaaatcaatccaagctttcctttaccttaatgtcaagatggcccagcaactgagatacagtagccaatgcagggcgcttctcgagaaggagctttttatcattttattctgtggtaatagaaagtgagcaagactccctctctagctttcaggattctgatttataaaattggactaattgaacatctgtattctgaaaccatctagagcagctagatcgttaaaggaataaaacgtctgaaagattaaatgtgctgcatttggtctgtcttccacaaacacaacacaaagtagaaattctctggcaagtagcatggcagagaaatggaaaggggcccaccagtgcagactgaaaggctcatactacaattttaaacaaatcctgtttcacgatgcatcctgattatagtttaagagatattcaggatgatattggcttgacattgctgatgccaaaactagatcccttgagaatgaagtacttaaaattttmaaatggatgcgcgagggattatcacagattagaagctgacagaagatcacttgtaaagggagactggaaacaggcaggcaggtggagctggttaaagtgggagttgtaaaagtgactttagtcatgttgccaaagttggggaggaagtccaaacaattttgctttaaaattatgagtttcagaaattattattattttttttgagacggagtctcgctctgtcacccaggctggagtgcagtggcgcaatctcggctcactgcaagctccacctcccgggttcactccattctcctgcctcagcctcccaagtagctgggactacaggcgcccaccaccacgcccggctaatttttttttgtacttttagtagagacggggtttcaccgtgttagccaggatggtctccatctcctgaccttgtgatccacccgtctcggcctcccaaagtgctgggattacaggcatgacccaccacgcctggcgagtttcagaaattattaaaacataatttaggtatccataccttcagaaaaagtattgttccaaatctgtctgaagttcatttatgtgatctgatcttttcttaagtcattttttagcctactcagttgaaaatctgcatcttttattttgaaaacctttttccttcttcctttgcgctaacctaactggttttatttgaacctcattcagtggtttcctcgtctactggtctgtatgccatttattaagtgaaaatgctacagagcgccgggcacagtggcttacgcctgtaatcccagcaccttgggaggctgaggctggtggatcacctgaggtcaggagttcgagaccagcctggccaacatggtgaaaccctgtctctactaaaaatacaaaaattagctgggcgtggtggcgggtgcctgtaatcccagttacttgggaggctgaggcagcagaattgcttgtgcccgggaggcagaggctgcagtgagctgagatcttgccactccactccagcccgggcgacagagcgagactctgtctcaaaaaaaaaaaaaaaaagaaagaaagaaaatgctccttgctacttctgttctgggagccaatcttttggctccttgatggtcctactgccagtggtcacttgctctgtactaggcctctgtgagctgggtcccttttgattttgtgtgtgtrtgtgtgtgtgtgtgtgtgcacgcgcgcgcgtgctttgaacagctaagaacttggagctgcctccgtttctgtcagtggttgttaattctggcctgacaaggctacttttttcttcctgctgtctgtatttaggattacaggtggagtaaaacttcggtggggatttagaaaattagggcagttgagaaattagggcaggtggggaagcttgctcaagccccagatactaatttccctgagaccaaatcacccccagtgtggcaggctcaaggttttttgtttgaccttaggtgaagttctttctggggctcaccaagagggtaaccacatacgttttttccagaatgtggtagtgtctcagacttctacatgctttctttagaagctgaaaaagaagaatgtagtcatctaggcaataccactctgaacctgcctgatctcagaagccaagtgagtcaggccaggttagtacttggatgggagaccacctggaaataccaggtgctggaggcttaaaacgaagaacagaatagcttattcatggtccgtcaatcctcagtaccagtctagtgggaatcttcagtgaattaacctttttctagggctgcagagtttagttggtttgcccatagcactatcgaagttacaggctatatgcattatcaggtagctcccacatctgggctgccacctttcagaagttgatagtccaggaggcacatggaccagttcagattcattacaaacacagggaaagtgctccagtatttttaatccatctttccttgcctcgcgtaagtgtaaaaggcagtggagtgggggtattgtgawcctattgattggatttcaggtcctgctttagtctgtgaccttgaaaagaatcattagcttctttggttctgtcttaaaaggaatgaaaattattgctcactatatcccttctaacatggggaaggtgatgaggaatrtgctggcaatgaatttataatggaaaaagtctaacatttctcttccatacttctttcagaatcggctacagtctcaaagggcaatgcttctgcagggcactgaaagcctgaaccgggccacccaaagtattgaacgttctcatcggattgccacagagactgaccagattggctcagaaatcatagaagagctgggggaacaacgagaccagttagaacgtaccaagagtagagtaagtctgggcagacagggaaaggggcaagtatggggtaattagggggccactgcacctggaaaccgtactaaggccaaaagctacagcagttctgtattcagggaatagtcttttttaagttcttatgcttttctcaatttttatttattaattttttttttttttttgagatagagtctcactgtgtcacccaggctggagtgcagtggcgtgatctccacttgctgcaacctccgcatcctgggttcaagcgattctcttgcctcagcctcctgagtagctgggattacaggcatgcgccaccatgcctagctaatgtttgtatttttagtagagatggggtttcgccatgttggccaggctggtctygaactcctaacttcaggtgatccacctgctccggcctcccaaagtgctaggattataggcgtgagccactgtgcccggccgctttgctcaatttttagtttgcttggctgagagatgtcccttagaagcaattttacccctaagatttagacatcactggaaatttttgcttcagtgaggggaaaaaaagatggaaggacctgatttctacacttacaagattacagaaattaataaggataaagtggctgcattctctctttggcaagagaaataatatgtcaaaaggcacttaaggattcaaagcttccaatctgagattttaatttctcacacatctaatagggtattctgctattcttacgaaaacatcatctgcttatatcctgttatttagagccaaggctgttttccagatttcataaaatagtaccacagtttatagatttataaattatgcttcaatcctggactataaccctttactgttatgtaagtaaaagtaaaaaaaaaaaagtaatagggaaaaaaatgtctaaggattatccagtaaggtaagctggatcattgtggaaagaaaacaaatatttaaatcaaatgatgactatatcagggatctctagtctrctgtcactctgagagcctcagaaaaataactcatttattttttcctttccataaatgagttaacctacataggaattttttagttttttagagacagggtcttgctctgtcacccaggctggagtgcagcagtgcaattttaacttactgtagcttcaaactcctgggctcaagtgatcctcatgtgtagctgcgatacaggcatgtgctactgtgcctggctaattgttttaattttttgtaaaaacggggtctcattatgttgccaaagttgctctcgaactcctgggctcaagcaatcattccaccttggcctcccaaagcgctaggattacaggcatgagccactgtgcccagctggaatttttttttttttttttttttttttgagatggagtcttgctctgtcgcccaggctggagtgcagtggcgcaatctcggctcgctgcaagctccgcctcccaggttcatgccattctcctgcctcggcctcccgagtagctgggactacaggcgtctgccaccacacccggctaatttttcgtatttttagtasagacggggtttcaccattttagcaaggatggtctcgatctcttaacctcatgatctgcccgcctcagcctcccaaagtgctagaattataagcgtgagccactgcgcccgggcaaaattttttaattggtacaatttaccaatggaatgctgtattcttaatagcagaaggcaaatcaatttgaaaaacatactgtggccaagatttggacaggaaaatactagctcagtgtgaagatttgagtagattttcttaatagcttcagttctccattaagtcagagtaatgccctgccctcttcagtgaaaattcacaataaagtactacattcaaggcaagctatggagaatgtaacttgcttacagattgtgtgggttttggtttttgaacataccaggtagattggttgaatttaaaagccaaggaggccgggcttacacctgtaattttagcactttgggaggctgaggtgggaggatggcttgagcctaggagtttgaaaccagcctgggcaacatagcgagacctcatctctatagcgagacctcatctctactaaaaatcaaaaaaaggagcagggtgtggtggcgtgcacctgtgatcccagctacttggggacatgtggggttattgcttgagcctgggaggtcgaggctgcagtgagctgcgattgcagcactgcactccagcctgagtgacggagtgagaccctgtttcaaataaataaaagccaaggaacgagctgagaggtcagcttaccaaggccactggggaatgggaacagatggcaagtagccatctgctggaggtgaaatatcctccagctgtccagattagtagcaagcagttgaaagttccatggaggttaattcttttcacagttcaatgtaactgtctcttaagagggtaaagaaaaaaaccagatcccaaaagcagtaacagaccagcctacaaaaacaaatgccaactcaagaggctgtcctggaatttggctgatgaaattcaaatcttaagttgctctacagtcactggctggccagtctgctggctacacttgaagccttcccttttggagtagccacggtagaagattagctcagtctcaggagtccatccccagcagcaacctgggaagatgattcttaagcctacttgatgagtactaaaatatcttgtcctttccaggttcttctacttacactcaaaggccatcatttaaattggcttgatttcttggaatttttcaacatatatcccttaatgcctactgttaatctagggatattcaattgtacagagtatactttttaaagagggaaataatcactattttctcttctcagctggtaaacacaagtgaaaacttgagcaaaagtcggaagattctccgttcaatgtccagaaagtaagttttattaaagtcatgaaatttctcttaactcagtggctttcaaccaaaaagcttaaaatagtgacttacaaaggtcctcataaagcacctcagcagttgacgcatagtccctgtatactcagtaccacccagcagaccagaataaagacgctaaggaatatggtcttggataattaaataactcaggataaaatcatttgttaaaagtatatactgctttgacttggagcagtgaaaaatttctccactgaaaggacatttaatcayagctgatgttctttagagaaggcaacacatgggaataacagcttcctattccttgaaatatatttatataatctcagccccrtgcggtggctcatgcctgtaatcccagcaccttgggaggctgaagcgggcagatcacaaggtcaggagttcaagaccagtctggctcaaatggtgaaacccgtctctactaaaaatacaaaaaaattagccaggcgtagtggcgggcactgtaatcccagctactcaggaggctgagacagaattgcttgaacctggggggtggaggttgcagtgagccgagatggcaccactgcactctagcctgggggacaaagcgagactccgtctcaaaaaaaaaagaaatatatttgtaaaatcttgattagaaagtagttttcacttgcatagtacttgcttttggctctgcttgcccttcatgggagtcagctccttttctggaagttctatattgtagggaagaagtagacttttaaaaataaaacccttgtggagttgtcagggttcttgggcagtaactgagtcaagatgctgcagaatctgctggcactgtcaggttgcccagaggaccatgagcattgcttcatgcaggcattttgaaaataaaggtccagaaaacacaagctgtttcaggagaagaatggaattccagtgcatctaaagggtggtagagctgatgacctcctgtatagagccaccatggttctcagttagtgaaacagcatatgccatgcatcagctggctgtggtttcatttcccaagaaatgggattgacttcagtcatcacagcagtgacttgattcagtttcattcagctctgtatggactcctagtccatagagaataaataagtccttctttgaagacaatatttgaattgtactaactgccaccaatacagtagtctttaccaaaaataaaaaacaaaatcctcgagtgctaacagcaacaaatccagggcagaaatactgccactgaggttgaagttgggggtaagagggtattgtacgtgaccttgggcacaggtggcctagcatgaaacaaaactacaacccactcatggaactagcaggaggggtgggattttcctacagtgataaattccttgtggactagggagaaacctagagtgaacatgagaaccagaggttggattctttatgtaaacaacagataggaaaatttttaagctcctatactacctttataacatacccatttgggttgataggagagcaaagggaaaaatagggcagagggaagaagtttacaagggattgaaaggtattacccaggcttctagttacttatcctagggcaggacccatcctgagctggatgtctatttgattactttttctagctaacccttctttctagaaaagctatttttaaaggaagtaactactatttgaacaacatttcagaatccatttttatgctttggtttttattgtctcagtttaacatttctgtgaggtagacagtgttatcmctaagtgacagctaaagaaccttatgagtacttcctgctaagtggctgtgtgatcaaacatacagcctcagagtatccagccgtggtcccaggtctaaccccaaaatgtttagaaggaaggttatccaaacttctgactactccccactttgcttctctttgtagagtgacaaccaacaagctgctgctttccattatcatyttactggagctcgccatcctgggaggcctrgtttactacaaattctttcgcagccattgaacttctatagggaagggtttgtggaccagaactttgaccttgtgaatgcatgatgttagggatgtggatagaataagcatattgctgctgtgggctgacagttcaaggatgcactgtatagccaggctgtgggaggagggaggaaagatgaaaaaccacttaaatgtgaaggaacaacagcaacaagaccagtatgatataccaaggtaataaatgctgtttatgacttctttaaatttacatagtactgtagcatattaataccctgtgaactgcaaaaaaccaaatacatttacagtagtattggtcaccaaaatagaggggaaactttacaattgtgagaatgtgtaaatgttctmattaaggcagtattgacccagacaaccatttagtattcatctatcccctcaatgcctcataattctggaatgcctgttgtgaaayatgtcagtgcacagtgtctcctaaattctcacacgtgcttgattttctgattcatctggtgaactgggagtaggaagttggtcatagacaatatgccctccttctcttgtctgaccaaagcttgaagcaatcacatctactgccaggttagctgtagtcttcgcctcttcctctgaggtggccaactgaggattgacttcaacaagatccagtgctgatagcaaccctggaagaacraagtgtgacaaaacctcaggttcccttgctgctactctcagtgagggtcatcccactgggacagggagaacaagccaaagtaaaaacaagagtccattttatagtagaaaatacctatttttaggaagccccttgcacctcatcctcttggccatgaatttaagttaaaacactgttgtgctatagtagattaaaagaaaccttttaagataatgaaataaaccatccctgttcaactaacataacaggcataattgtcaggcgttctggaaaaggaaaaggcttggtgttgggtgggggaggttttcatcctgcttgttggcaaaatgtatgccacctccagtatgactaggaaccttccagatgcctgcctggaaatgaatcaagtatgaaggcagaggaaatctgccacttkcactagccaaactgcattcccacttttgaactctaatgtgttatctgtatctgttagagcaccacaccatatgccctgaaatgtagttattactgcaaacttcattctcacccctgcaggcctgmgctctggaggcaggttccacatctaacaacatctttttgtctcccagcagactgacccagtgtcttgtacttgatcaagagaaaattcagccatatgttaattattttatctggacttcagttaccttctgttaaggtttgagaacttgtgtcaaagttctcggtagtgttcctttggcctggagcaagtggaagggaagcttaaaccagaagaacctatccagacctgctactatgctcacccctctaaatgcctcacttctctatagaatttaactttttagttggttattctggatgaagggtgatctgaacaagctagtattcaggaatacaagtatctaagaatatttagggtggccataaagtctggaaacacaggcaaatgtacctaatggtttattgatattacactatagtacatgatgtgctgaatgccatcatgtccgttcagcatcttcccttattagcaatgcatagttgagtgtacagtgccaaactgcaaccaacaggtgtattactgtagcatttccatcatttcctgcacatggacctgtgttcctgatttgtctctgatttccactgactaaacctgcacctttagcatatcccagaagtggtcatcaaagtttgcactattagaaatatatacatgacttatgtttccagactattgccaccctataaattaagcaaactgctttatgtatctagttgacagcattataacagtgcagtggcacaatcatggctcactgcagcctcaacctcccaagtagttgggacacctggctaattattttttgtagaaacggggtcacactatgttgcccacgctggtcttgaacccctggggtcaagtaatcctcttgccttggcctcccagagtactgggattataggtatgaaccactgtgcctagccccatgagtgtcttttggagtaaaatattgtagcataggaacaaagagacaagccatgccatatataagtgctagaggttattaacccctgctctaagtggtgtttttaggaagcaaagcagagaattgaacccccaagttctctggccaataacctaaggaccactggcaacatctaagattgcagatctgagaattagaccagtactgcctgcctttttgtactgcctaaggttctggcaggctgtggcgctaaggagaccatttctcaatgtgagtttctatcccagctagtcaagggttctctatagccctgaacctttcaatctggggtctctatctataccctagttccatcagatggttactgaagcagtatgatttggtagttctttaaattttggaatgaaaggtcatttgaagtagctttaaaaccagaagctttctgacagaaatggaaactgtttgcaaacaagtatgarttttggaaaagtagccrgtcttgataacgtagaattcatcttagtactctttccatcagccattctcatctaactgtatcccccttattagaaatcctttcaggctctagtacaagacctaccctacataaaggacccaagatattgtccagtttgcagatttcttcaagagatcagctttagctccaaattcacaactcccaatgaaccaatctcttagagtgcaaattacagccttgcactcttatcttatcttgccttcttatcttaatctgcctttagataactcaaagaactgcatcagtttgacaatttattcttgtatttaattgtttaaatatacaattttttactcattattaccttagtgtaatttggtwagagccatgtccaagcatgactctaaaggactatatcctttttattagcatggcsatataatttttagctacaaaagtttaagcaaaaacaaacyctgcaatgatgtggaatagcagaaaagatcctttgcaggcaagagactctagcatatttacctatgtagttaacaggctgcagacctggttgctacatacctgtattgtgtatttcctcagcaatatacatgccttctcgataggttagtcccccgacaacaggagttcctgtggctggagccagtgtagggtcaaatgcatcaatatcaaaactcaaatggattggtctttgtctcctaaaaaggaagaggataaaataatacttaaaataatacttaactggttgtccttggacactcatccttcttatggttgcaactccttgattttgttgctattagtcctagtactttgttaataaagctgttaatacatttccaggcttcctattcttggaagttactgagattggcaatattaacttcctacataccacttcatgatactgccatttgttctgcatacctcagacagactaactccaatgtatatttctgccttacactgggtattagaacctcttatactaataactgtcaatagagagatttcttcacttctagatgagattgggctctcatctagagacaatttaattagacaatttaaattagtctaatttaaattggcttgatgtaagttatggttgctcttattctctgaacgtaacagcagctgaagtgaactctaattttaggtctgcagttttaacatcttccatttctaacttcattatagccccagtgtccaaaggctgaagctaacaactaagtttcttaacagcttatgaaatgacatactaccagataacaattctgacattaatcacccagaagtaaagacttggtattgggaaaatgctcttaaaattaccatttgattagtattcatctgccatctttctacactgccaagatttgcttaatataaaactcagatgaaacaatcgtgaggctgggaagaatgggacagttgaaacaataaatgcttgtcatctcagaagataagcattaaagatggagataaagaaaaattcatgagacagaagatctaggcaatgatttagaggaaacctcctcccaaaaaccccagaggaagaatatgacctgtgtttcaaattttgcctttctgaactatttaaaattatgtgtatgtttttgctttgtattttaaaagtaaagctgctgtcctcaagaaacaggctaaaagtgtgttgcccattgggggtttgccctgacatcagttatagttacttacttgccaatcagcagatcaaatgttcgttccatgaccttctggataccaagtcgatcaatatctctcatggaaaaatactggatatcatagttctttaaaataaaactgtgatgagatataaagggaggagtccttagtttaaagagcatttttaacaaatatgtatttgggggagagggtgggtttgttgtagtgacctgcaatagaccaagttaagcatcagcctttcaaatagaacataattggctaggacaggccctaaacttcagccaaatgcatcaacttactgttcaggagggtccacgtctctcagaccaatatacacaatacttgcagaagagatacaaggtttgatccaggaaaatcctgggagttgtggtacctatgaaagggagaaatggacaggattaatcaagaattcttgttctcaccaagatcattatcatgtgcgtccgtgggtatgcaatctgctttcttctgccacccacagggtaagtttagagcaacacaggacacacttgatctgggaaggagaagtgacacaaggtggaaatgtttcagaagggcagctgaggaacacagtattgctttctcaagacgaataaaatctctaaggttgtcttggtttctcattaacttacctagtagcaggaatactgctgattagcccttttctatcccattgcacattactgacttgtttacagattggttcttgaagcataacctggttgccatctcaagttgccaacagccgacacaggacttccgcccaatgaataatctttgtagtgtcctggtttgacttggtccctcactgaggggagggatatacagattctagtctgtgcctaacatggactcccatatattctgaactgctcaggaaaatattacccagaggtcatggttttatttgtcttctagatcagtgtgtctgagagtatggcctgggagcctctaaccaagaagtcctcaggctgtgggtatatcagtcgctattgttactaccccctccttgctttcttacaaagaacagagactatgtctagtctttatacccctagcatctggcagactgcctggtccataatagtgatgaacaaatgaaggagtggtaatccacactcaacccacccttcaccaaaatcttaactgaactagaccaactccagcaaaaccctgcaagccattcacctttcttttcgttttggcccactgaccttatcctgtagttctctgaggagaaatgaaactggctgtccatggagatttcctgatgaagtggtaaggggtgtgttgatgtcagcatgggcatcaacccagacaacacaaaggtctgggcagtgtcgggcatggccactaatggtaccgattgccaggctgcaaagaacaagtataatcttgaaggccctctgcttggcaaacatgaccgataacaaacgtcctcagccaaaacaacttatactctctccacagtgcaaagccagggcctagatggagactgggtttgggtgaggcaagacctgtagttgtagttctcaaaaattaatcttgagtgataaagccctagagattcgaagctggtgacttgctaccctgcagtgtgacagatgtcactgctgtcctgtccccaaatccgtataattttatccattagccctgctcagaaaagaacctcaaatatttgttcaatgaatgaaatcaagttaagccagacaagatggtgtacacctgtaatcctggctactcagaggactgaggtgagaggatcacatgagcccaggggttcaagaccagcctgggcaaaatagtgacaccctgtctccaaaaatgaaaaaaaaaaaagaaatctaggtaaatggtacagtctataggtaacgactcaccaaaatctgtaagaaaagctcttggagacattaacagggtaaaccattaaagacctaatttagaccactgagtaaaaagatgtattgcatgttaccttatatatattagcatggcatttaattttttttttttttttttaagacggagtctcgctctgtttcccaggctggagtgcagtggcgcaatctcagctcactacaacgtccgcctcctgggttcaagctattttcctgcctcagcctcccgagtaattgggattacaggcacatgccaccatgcctggctaattttttgtatttttagtagagatggggtttcaacatgttggccaggctggtcttgaactcgacctcaagtgatccacctggctcagcctcccaaagtgctaggattacaggcgtgagccactatgcccagcctcaaatataagatcttaaagtgtatttctgtttttgcctttccttgtccttgggctctgcttacattagccaactgttctgtctcaattctaagaatacacctgatgaaataaatgttggaaagcttcccagtaaccaaggaatttgacatagatgggaaatgcagcttaagcatcttaggactgcaaccatccttcttggtcaatatagcatgagacagctattctaggtgccatgtcccacactggttgggtcttttgaggaatagcatggtctagtgaaaaggcagtggattaagtcagaatactagagttttagtcctggaagagctgtgtgactgaagacaaaccatctaatttctttagatttcagtttccttttctgtgagatagggataataataatacttggcctgtgtaaatcagagttgctttgatgattaaagtagtaatatatgttaaactacataaaaggagcagtgacctaaaaatggctcttcttgaaaatgttcaacagctattcaagttatgcacttatctcttcctctctagaatttcagattgcctaagctttaacattgagctggtaagcagtaacatggctgcaatatagatagccacaggaaaagaaaacaagatctgtggtaatcacattgatcagtggtccccaaacagtgagacttgaccagaactcagaacagcagacagacttaataaatttccagagactacactgagaaaggaggcaggagacttgccctctggttgatttaattgaatggcctagtcatctcagtagggaacctgggtgtgaccgttttcttcaacctgagtcttttttttttttttttactcccaaggaggaatctacctgcttctccagatgtaacaaagatttcatttctgttcagtgatctgaaaagctttctcagcacctcagggaaaataatcaccagaagagtcacactggatttgaatcccagctctatttcctggttctagtccttggataagttatattttctttcttatttatttatttttaagagacctgatctcactgtgttgcccagactggcctcaaactcctgggctcaagcaatcctcccaccttggcctcctgagtagctgggcctgcaggcatgcaccactgtgcccaccttggataagttcttatatatctgtccctacatgcttccagcagtaaatgataaaaccatatctaccacctagcattgttagcagaattaactgagaatatgtatggagtgctcaatactcctagtacttcagtgccttcttcctactgaagaccttcattgcttatttcaaatcacattcccttgtgaaatctattttagtccagactgatctcttcctcctttgaaattctgtagaattcaatatttttgtttattccatgtatatttatttcatctaggccttaatatatcacaaatttcctgcaatctctagcactgctgagaaaatatcagaacagtgctcaataaagtacatgctgattcaggaggagacaggatcaaaggactgattgcatgagtcactagggtccatattgtggaggcagaaaatgtatccacagctgggcacagtggctcatgcctgtaatcccagcactttgggaggccttggcagaaggatcgcttgagctcaggagttcgagaccagtctgggcaacatggccaaaccctgtctctacaagaaatacaaaaatgagccaggcatggtggcatgcacctgtagtcccagctacttgggaggctgaggtaggaagatggcttgagcctaggaggcagaggttgcagtgagctgagatcatgccactgtactccagcctgggcaacagagccagaccctatctcaaaaaaaaaaaaaaaaaaaaaaaaaaagaaaatgtagtaacatgccaaaggggatttctaacaggtctattagcagaaatgctaacaaaaacttgcacattcagcctatcaatggatctttctaattctccaaagtcataagataagtctcaagaaagctttccaggagacaagcatgttaacacagtgcctaggaaccttgcctagtatacctctgaacttgctgtgtctgaatgtacatattcttactgtgcaatgtgtcatacaaagaaaaccacagtgccccttgagcagctcaggatcttagacatttaaatgcttgctgttcattttaatatctaccctaaaaattctgtagggtatttttctccagatgaagaaacagataaagaagctaagttatgagccccaagcaccatgtaatccatcccctcaccacgcctggctcccagcttacctgtggtctcctcccagtgtgacacagctgtagccatctgacacagctctgctaaccacctcagccagttcctggttggcaagacccactgagcgtggattcactatcaggttgttgtagagatcatctttggggactggagtaaaactcaaatctccaaagtcttttaggtggcagcctggaagcaaatgagggatgacaagatgaattttctgtgctatctccaactcttaactagcc

SEQ ID NO: 94746 - DNA, 107940 bp, Homo sapiens
  misc_feature (1)...(107940): n = A,T,C or G
tctaatttttaggaacggtattgggaaaatataaagttataaacaagcaagtctttagaatacattaattatattcaatcttgcccatgggtctggatgtgggcagcctgagttatggactaccccttttcattaaagggtttctctactctactaaagtggcatgcccactaacctggtgattaaaataataaattattatagccatctcacagagtgatggagacccttaggctttatattctgatgaacatgaagcgctgttttcttaaatcacaaatttagcttcagaatctttattgtgcttcatacaatgtcgtgttcaatacatgttttttaaacattactttatatgcaaagacttttctctactgaaggtataaaagcaatcattatcttattttaatagcttaattcactgctgtatcccaataagtcctgtttgaataattgagtacgtgagctaggttgttcctaatgactttggagcacctctaaaaataccgaatggcatacactcagatattaggtaaatatttctttattaaatggttaattccataaataaaatcttttcactgaatataaaattaaaatcatttacaaattattccagtattacatttcccctccctccccaaaagctacattttgataaataaaacattcagtcttaaaacacctgatttctgtttgcagtttagagtgcagatagctgcctctcacagacactcatggagtgtcccccttcaggaagggatggaatgccctcccatttacttttgtcaaaggacgaataaaagctttaaactgtccaactaatcttattatctcttttacgactgtagaaccccaaaaggaaaaaagcctagagaaaatatgcttagcaaataatttacaaacagaaaacagaaagtcatcaactccacaagctccaaaatgaagcagtaacatgtgctccaatactatgaagcaaagtattctccaatcgtggctgcattagtgtccatccgcaccagcacccttggcagtttcgaaataccttaatgctcctcaagaatgagcaaggcttcctttctacaatgagtcccatcacccacaccacccccgcccattttctccatgattctgattctgacactcttctcccttgtttgtctaggtgtgccctggaaacccaggtagcatttagtccctaaatttgtgaatgtcattgaacagcctgtagaagggaaacgctgcttcattggcatgcgggcagttgtagttgcatttgcaggactggatcatcatgacgttcttggaaaatgtctccccatcttcgcagcggaaccgcatcttcacagtcctggtcagctggggcgtgcagcatcggccgtccacgcaggaaccgcagtacttgggccggtatttcttcacactcaaacatccagcgtaagtaaacctgactggttcgggggatttcttggtcttgctgcatttcttgcccttctgtaagagaaaggagagaaggaaagttaggggtgatatttctctttcttcaaaaagatgttcacatcccacccacctgccaggcaacagtctacacgtccctgaaggaacttactttcaggctgctgtacactggctgtccacaaggccgcacctcacaaatccgggtttctttcacaaggcggcactcagggttgtcattggtaactcgtgtggagataccagttccacaggtctttgagcactgggaccatgaagttgtttgaacaatacatttctggccttgtaaagggttgtataggatgcgaggctccattccaaaaactagagacatataagagggaagacttctcagaggcataccgacacaaacaggctcaagcactcatttctacaaagatttagaccagaaatgcatctcagtacagtgtctgaagtgctcagtctccacttaccagggagccgcttcagtgagctgccttttccaactgcaatcaattcattgtttctcgtcaactccacctcggaggcatcgaatcccagctccttgccaaggaggccgtcctggtcctccatggggtccttgatactatcctcgtcacagacccactcctcgcagcactgcccggtaactttgaccagccgagggttgggacagcccaagttggggagagatagttcttggggacacagaggaatgcagcccacggcgccatcaatacatgtgcactgatgtttacagttgggctggaaactttccccgttttggtagattctggagttatattcacagggtctgccctctgactgagctgcaaagatcaccaaaagagaaaggtagaaggggataaagttaagattccaaaccaccgcctgaaactcatacatattttctgctgttaaattcaatttatggtaaagttccctacaattccccggagactccagaccagaacaataagttagtcaggaatcacttttccgtatgcgctttcgttgggcccagacacactgaattgcattccagactgctgaaatcatgtgcctttctgccaagctaccaacaacaaagcatcaccatacatggtctcagaattactaaacttctggactatggggactagtattttttttaaaggggccaaaccacaagcatcttacctctgcagatccccttcagagcggtggagctggcgccgaagttgcattccagccccttggtgtggtcgcagggctgcgttttgctgcagtcctcgttgagctgcttggcgcagaccttacagcagccgcagccgtcccggaccagcccgactcccggcgcgcacttgggcgcctccagggggcagtggcaggcagcggggcaggtggagagcgcctggaagggggagaagatacgcgtgagactcggcgcggtgcgcaggaggggcgccgcggctgccgcagtgagggacgggggtctccgaccctatcgacggggagcctctgatctcgtccagcccggccacctcggaaggctgctcccaccaagaggtcccgacacgtcttcggggggagggggagagtgcttaaagaaacggctacccgcaaacgatcgcgaactttttaacttttcctgccgtgggcaatctgggaccaggggaaggggctggagagcggacggggaataggtggcaaaaggagagtccaactcaccagcctggtcaagtggagaagggtgacgactaaggcgagcgccctggcgatgcgggagctcattgtggcgcgcaggagtagcccggggcgagcgcggcgacgaagacgccaacaagctggtgtgcagcggacaggccgtgcgcagcggggtcggggtggcggcgcggtgggcccggtgggcagggaggcgagggctgggcggcgggcgggcgtctttcgctcgaggtcccggcggagaaggcgcggagggcgcgggcgctgctcgggggcgctctcgctcgcggtctgcccaggcgccccggagcccgccttttatacgggccggcggaggcgccgcgtgttgcagtgacgtcggctctgtctgcgcgttccagaattctcaaacatctcaggaatgctggttggcgcgggctgctgccaagcgcctcccctggctccattgcacctttgtgtgtgtgtgtgtgtgtgtgtgtgtgtgtgtgtgtgtgtgtgtgtgtgtgtgtctgtgtgtgtgtctgtctcccagacccgtcaagaaaacagttcggggggtgtgtgtgtgtgtgtgtgtgtgtgtgtgtgtgtcccagacccgtcaagaaaacagttcgttttttccaccttaaattacgacttatgttgggaagggttctttggggcgtgatggtggtgatggtagttggagggtcgtgaggggcgaggggggccagttcagaactttgcctggactgggtgggtgggaggacctgagagggaggaacaaaagtcgttttgtttggtgatgcgagttgaccgggcagccactgaagccctcacccgggaaggcagtgagctgtttgcttttttacagcgaaggtgagaggcaagttatctgttgaaagagtagaacggggaagaggagtgtgtctctgagtcaggaatatttgtggacttcaaagaggcgtgttcggaacaagtcccaaagctttggcatgatgtttattagcaaagttcagtgaattgcaaattaatacccacagtggcatttatgaatgaaaaggcggggggggggtggggcggggggaaacttgcccatcgtctggcaaattcccaggcagaggtctcccccactcctccagcccttccctcttttgggtatgttgtacttgtttgtttttggaggttcccactttagttccagcccactgcctgggttggaagtccgagaggaaacgaacgcggggagttctccgggaggctgacttatacttcctcacggatgcaggagacggggtaagcccttcccgcctccctccgcgggcaggaggctatgctaaccaagcagccagccagaagtgcaggagaccaccgtggagtggcctgaaatcatcacctgcaaagaccgcaaggccaaaccagattccaggaccattgtgccctatgaatctctgggaaaagcagactccttcaagctggacattttgtggggtttttaactcctttcctagggaccactggaagcctcccattttaaatgaattgcaatgcccttctctccaagtacagaaaagagatttaggatgtaatattttgcagtaaaaatgtcagcagattttaagatcccgttctacttgcaacacactcagtagaagaccccaccacaagacaatttacttgaacatcaccaataccattagtgtgattgataaactttccctgcaagtttcaaaaactttttgcataattttaataaaaattatcatgtaagactcatatgctctaggataactacttatcctttttaatgtttaaggctattcagacttcataatttagcagtcttgcttgaaaaggcccttagtgctaatgctgactttcctgataagcacaatgagaatctgtcaggatgaaaacacactccagtgaagagaattcttgcaggaaggagttcagtttcattcattccaaagtgccctttcataaatggaagcagcatttgctagagggagtgggatctctaaagctctgttagagggttaggggtgggagacttttcaagacaatggattgtcaggtgttatgcaaatacagtgaggaaagcgtgggcccaacacgtacacaggttaatacatcaattattatttacaaaacactgtttttcctgccttatcatttcattattgtttccttcttaatgaagtgacggggggcgggaggggggaggaggggtgcagggacagtactggttgaactagagagagaatggagaggagggttcctggcttctgttgtggcgtcttttctatttgacttcatggttgtaagtatttccagatggtgaatcagacaccagacgtaacaatatttccatatttgggtatagcagtagcctgcgtttttaacatttttctgcctctgttatccaaccacaaagcattcttgacagcttcaaatgttgttaaatatagatttaacttctcttcccagagcaggaaattctttggaattccttgtttttcacgcaatctgtccatcatgatttaaaataaaagcacagtggatcatccaactggccgtatataccttaattggaggttggggatgggggacggcagagatccagtctgccgcactgcgttcaaacacacgccattccagagattcctttaaaatcacattaaagtttttttaacaagggtgtgtgggtttgtttctggacttcaactggggaatcttgaggatgagtttgccccagaagagaaatttagagaaccttaccgtcagctgcccatttaaagcagggggtgtgttgtgggatgggggtgggaagctggagcaacagggccaggaggtgtgggagcgggagacactagagtaacctatgtgcacagcctctccatataccatgtgctgttgcgcctgctagtaatcgacgacattaggcaagagaaacagcggctcctcaagtcctgcccaaagacmgtccagaaaccccagcctcccgtcgccttctcgccgcctccgctgggagccgcagatcagtccaagttgacgkacaggaggcgaaatgtgcaaatgtttatgggtaagtgttgcttcgggtgctaattctgtatggctcttttgctagtttctccttcaccctccccatacgggtgccccaggaggaaataacggactgccttgtttccttgggctgccttggattgcaatccacggagaaggggctacttgtcttctgcagctcctggcttcgggctgagagatggggacgtctctcaaccgctgctgccagggaattttaggttacctaatgaagggctcactgtctggcggcaaccgagaataataacggtaaatctggcgactccagtttcctagccctaggaaggctctcagactagcgtgcatccgagwcgcctggagggctagttaatgaatggttctctgggttcccaccccagagtttctgattagttacatttctaacaagtccccaggtgatgttgatgctgctggtccggagatcacaccctgagcaccactgccctggacgaccggagtgcctgtagtaggggtgtgtgtgtgtgtcttcatagatcctcggctgcacacccaacctcacaactccactcttcaaagccaccttaatgaacagaacttaatggtgtctgcaaaagaccggctttaaggtggcgcccccgtaccatcccatttctctcctctaccatttccccgcccccatccccttggcttgacagccaggagagccccaggaagccaggatcctggtggctgcggcaggaactgggtggccgacgcgcggagagggcggtcggctccgggacccctgcggagggagcggagagggtccgcaccgcgagagggtgcgggacgcgaggcatccggacgcgcctgcccggctgctaccgccgccccctgccggccaccccgcccgcgcgcccacagtcaccgcggttgccaagaatcgaggtttccggcggcgcgcggcgcaggacgtttccagccccggcccatatttggtgaaagtctttcaagactccgtcatctagcttcggggggcggtggcggtggcggtggcggcggcggcggctgtcctgcgacccggcctggcaggcttgcggccgccgcgttcctgaaaagtgcgccgcggcggcccgcgcccaggcctccctccgcgcgggaccccggagcgttgcgggcggcggggtagacccgggcagtttggccccagtcctcacccctctgagggccgaagtccgccctgcgctgcgtgggaggctggcgcggagggcgccgcggcccagttgtgtcacttttcccgtccgcccccctgttgactagtcctcccagcggggcagcgagttgccgtgctgtgccagacgtagagggtgcgtccggcgcaagggtgtggggctgtgtgtgtatgtgtgtgtgtgggcggggggatgttcggaggatggcgtttgcgtggacaccaagcgcacccgagagcgggacgtgtagccagctctggggaaaagccccgaagggcctggattccattatccccagaagggacacatggtaaagctggctctcggtttctcctggcctcccacgaccccttcccctcttcctcctcgagaagttccgcgtgtggggagccctggataggaagtcctggctctgccatcagtaggctgtggccttggggacgctgctcatcctctcgggaccttgcctgcttctcagtaaattgggaaaggaggcagcaagtagtaaagccagagcagctcctttcagggccaaatctcatgtcatcccctctaataaattagtcagaaattaacacattatatagggttcacataggttgggcatcattttaaatgccttctatatattgatttgtttaattctcagatgccccattgaagcaggtcatcttggtaacaccattttcttttttttttctttttttttaaattttatttatttatttttattatactttaagttttagggtacatgtgcacaacgtgcaggtttgttacatatgtatacatgtgccatgttagtgtgctgcacccattaactcatcatttaacattaggtatatctcctaatgctatccctcccctctcccctgaccccacaacaggccccagtgtgtgatgttccctttcctgagtaacaccattttctatctaaatgaagaaatggaggcatggaaggtaagtgactagccaaggtcactcacctagccagcagcgaaactggatttgggcccagatcataaggtctcacacttaactactgtgctatactgcctactctctatctcttacctcagacattcaggcccatcctcttctcctggaaatttacctttatttaactctatcacagcttacccaaatagtctaggtgaaatgcatcagatataaaaaatagttgataaattacctgaagctgtgctaacccctgagaattgcgtaatgtactggctcttaggaaggagggagaaaaggagtgttgtattttaacagaaaaggtcttaatgcagatacatatatagagtggtctttaagcaccttggcaggctggtggggaagatgtttaggacctctggggttcttttgacacctcataagccacattgttcaggcaatccctacttctggaataaggcttggcctggtaggagttgaatttgtcattgagataaaggtttcagcatcacttacttgatggttcatcagtctgggtgttcactgtggacccagtctgtttttgttgttggttttgttttgttttgttttgttttgtttttttgtaacatggtctggttctgtcacccaggctagagtgcagtggcatgatctaggctcaccatagccttgacctcctgggctcaagccatccacccgccttagcctcctgagtagctgggactacaggctcatgccaccacacccagctaatttttgtagagatggggtctccccatgttgctcaggctggttttaaactcctgggctcaagcgatctgcccatctcggcctccccaagtgctgagattgcaggtgtgagccactgcaccaggctccccgtctgtttttaacccgttttctccccaactatgttataattaattacatatatatatatatagagagagagagagagatgggttttcaccatgttggccaggctggtctcgaatttctggcctcaagtgatccacccgcctcggcctcccaaagtgctgggattacaggcatgagccatagcgcctggactaattacccatatatttgaggacaatgtatttacccttccctgaatcccagatttattcagagcttgtgatgtgtcatggcatagtgctaggtactggtgacatgagaaagaggattttaatattgaacgtcccccgcaggactgtaaggcatattgcagaagtgggtacataaatgctgtgtggatacttcactgcctgagaggagttagggggaacgactaatctggggctgaaaggatgaacaggagtttgatagcagggcaggacatttgagaggaagggaacaaggccttgactgggcataacaatcagtctgatgcactggaccataggattccttctgaaaactggcaagagatgtcagttgggaccatctgcgaatggccttgctgtcatggcattggaactttgcagagtgagccatgtgagctttttgcctaggtttccttgtctataagataacaggattctcctagctcagaggacacacactcaagtgcctgcaggattcagccaggtaacaccatgccatgactcaggattagtgctggctgatatttggccttggccttgggaaccatggggacactggaaccatctatgagaggctgaatggttactaggtgaaaatgtaggttcactgtttgcatattttctcattttaaaaagagatactagagatctgaatttttatgtgaagtcttcaaaattttaaaatgttggcaattaattacaatgttaaaatgccatctagactaatccttggaaaacccaagaagacaatgtctgtgggtgccatttgtgatctctggactgaatatctctaagaatctgtcttgctccagcattctataactcccagccacctgtgaaattgtagggaacagcaccctgggctccatttaattgtcaagttgactagactttattttgtttaagagtcagggctgctacttacctcttggttgtaggaatttataacctattaagaaaattggaattggctttttacaaattttctacttcatccactctccagccactactctgtctccctccttcctgtccccctgaattgatgatgtaagcagctggcattgccttggcaatatgataggaaacacttttttagggcatccatatcccgtgggaactcttatctgtttattttctccacttggcatctatccacaggaagccagcattcctaactcccttaccttacagaacttcttgttttgtgataacacagaaacattttattggaaaggactggaaggcacctctcccaccacaccctgcaatccatcttctagagatgattgagcaatatgaaatataataattgtaagtcattatcaaatggcttggctccagattgagagaatcagcaattaacctctgcctttcgtgttttatttctggagatacctktctcttaaccaaccactaacatcacacgtagcacatccagaatttagaaaggatttgctctgggcacagtagatgagcacacagattctacagagagattgaagtgatttatttgtgacaaatttttgcaagtcttggggattgagtgtaagggagtattcaagcagttggacttactatgtgaaagaagacataagacatatttactgctcagcctgatgcctggcacatagtaagtgcttaattacaattattcctactgccaagcaccaycattatctttactttcactgcaattaacatagaatgagctagtcttattctctagagaatactttctattctttagaactctagttataaaatcaataaaattctttggtatatggtatatagatgatatgattaaaaggatccatccagccaggtattctggctgcactgagacaccagtgactatctaaaaaaccactcaaatgggcttacctctcatggcactgggactttgcctacaggcagtggtgagccatgtgatgttttgctttggtttcctcatctatgagatgataggattgcaccagctcaggagtggtacactcaagtgccccaggaatcagagaggtaaaaaatgccatgcctgagcgttagtgccggctgacacttggccttagcacttgggagacataggaatagttggaagcatctatggggcctgggctttgcctcccattggctaaatggttagtatacacaatctcatcagatctttataaacarctctgtaggatgaatattttatttccattaaaaagatgagaaaattgaagctttgctagatgtcagtaattggtgcaagggggcagggttgttaaggtagagcagaatacctgtttcaaagaccattcctttcggggagagcatggtatttgtccttcatgaaatctgccttaaagttcaggaagttgcctgcaacttcttgacttccccttaacaactgactgtgaatctgtcacttaaatattgttctaaatgtgtctttagcttgtgttttcagtaactgtggcccacagtttcttaatragagtctgataataaacaagttaaacaatgaaaaagggttctctccttagggcccttgcctgagcttgtttctatttcctctgggaggaaaaaagaaagagatgtgtcagaacagaggtggaacttctcagagattgagagatccgtctactgtaacttagtcatcaccatcaattttgttacctgaggcaggcagagctgctacctcccacagcctgtggttatcctcacaacagagttactaagcacggagccctccaggcccctgccaagcgcaccctgcatgtgccttacgcaaggtgtccctgagcattgaatgttgggtggggtgggggttgcccaaggttatagcaataaagaaaaaacatagtgccaggtgcttctctgaaatcatttaccccttcttttgtagttaggttttggctttcaaaagmcaaaaaaaaaaaaaaaaaaaaaaaaagcttataaacagttcattctaaaaggacaaaggcaatatgtattgtatgcttaaaatttccaaggctctggaaaatgtctttgggagaattagaaagtgtagactatatgctaaagcattgcagacccagaagatagatgattcagttcattctaataaacataacatgtatggcatgctgcatgctaggcagcaatgcaaagaggaataatatatggactttgcttcatggctctagctgcctaggggagatgcagatgcttaaacagataatacaatactgtggattaaagctctagaagccgtgcagctttgggagtacagacaagggatgtccaactctgagtctcaccctttaaagatgtgaggtcttgttagtgtgtacatttttatggatgagagggattgggcacagttattccctaacatacacattccctttgaagctgggaactgcaaggaatgtgcacattcctgagagattagaaaacatctaaaagtgagaactttcaggtgagcctcttaaaatgcattgattacagatgggaccgaccctttgggtgctattgaaaattcttatcattatggatccttctttcagaaggggaaagagaagggaagtgacatttacagggcaccgccatgggccaaacgccttacaggttcatgttcaggagagccctctgagatgagctttttgacatctttctaagcttagggaatgaaggctcagagaagttaagcaacttgtccaggatcagacagttagaatgtgaccaaacaaggattctaatccaggcctgtctgactccaagttccgtcctctttctacatttctgctacacagtcctaattccttgagttttcactccctgtatgagtgtttgccatttttctmtctttttttttttgttaccaccacttcgcctttatagagccagccctttacacattccttagcactttcaggtgcactgatttgaagtctttgagccactgatgactctagcttttaaaaggaggtacagattaaagtgaatgggatcattgccatcacgtgaacattcctgtcaccatcggtttgatcagagaacaggcatggtgatagcctgcacttatctttgcttctttgctaggcactgggcagaatgatttagacatatggaatctctgttttccagggacagatgacagattccagaggaaatggtgcagtataattaaaaataactaaggaagtatgattttcttattttgtgtttaaaaaatggttgggagttgccacgggcagtctgaggctgcactagagtactatgctgtaacctggaagactgctttgagaaggaagttagatgactatatgaagaaggtgttagataagtgcactgagatgtgtgtgtgtgtgtgtgtgtgtgtgtgtgtgacagtgtgtgtgctggagaagggaggttaaggatcaaaggtatggaataagcaagggagagaaggctcagaaacaaaaatagaaaatatcaggcatcaggagaagaaaggctgaactctttgtagaggctttgaggccacgtggtagcaagaaagaatgcaggggtcagagggtacacttgctatggtgcggctcaggttaaccacctaatctcacggggtctcagtctcgtcagtggtaaaacagaaataataatatctcaagaattattgggaggattgaatgaagtcttgtttcagctctccagaaactgagatgtgccctccaaatgtttgtgatcagcgtcagcttggtttaaatctgaagctcctggagagcctttgggaggggagggtcacattctgtggtgaatagagaaagtcagcagtcactgtgagcatggggtatagcgagtgataaggaagaactgacttagcaagactaggttgtggaaacaagagaagctgaagagcaaccgtgaattaggacattctcgtggattcatttcttgttatcaccactgatccagactccctccacctttctttcctctgggcttcctgcactttcattgctctgctattttgaatagaggagaagtccttsagtcccagttcaggagaagcaactagaaagggccagcgtgcatagctgggccatcctgcaaatgctttttccaagagctgcagccctgaaagctggggccagagaaggaggtggaggacgaagatggggttggaaacaaactcagggaaaacttctaaagtgacagaaagtgagaattgagacaatttctgcctgaaatcacctgtccagctattagtcattaacccacctggaaccaaatgcagttaatttagcaccatgttggaaagcttagaacatgaaccacatcctagggccaggttttgatcctttgtaaaggcttctcttttggaacacaatttggtgtcagtacataggaactaacaagtgtgctgagttgtgagtcatcagcagtctgctttcctccagaacatcatgggaaaagaatgggcagactgcttcagataaaacctggacccactcaaacttttactgtagactggaaacaaaacaaatcgactttaaaaagaatgttttaaaaatctaattgaactcagaaaggagacataagcctctgttctttggtttcaatgtggatctgaagtcttgttttgtttactgttcagtcttcaggcaatcgcatcaggtgttatttacaactcagtagattcttggggagttcacacaggccttttaaagcacatttgtgaaatgatcgtaccatactagggtttggggatacaaagatgacagatgtggtccctgactttgaggatgacacagtctagaggagagcttgcataaatagtgtgtatataatgagtgacttcataaaggtgcagtatacatgagctgctttaggagccctgcctgaacactgccccacactggggtgaagtcttcttgtcacactggatggtgctgctcttgagacttccagagcttcctccataaagcttggaagggcaagctgtgtttttctctgcttggatataatttattatgctttggacatagtatcagcaaagacttgaggatcctttaataaggatcctttaattatgaactctcattcataaggaattgcatatttttattttaaatgtctttgcacttccctttggtaagcaatctagggttcctaatgtgcatagccttttgggtaaacgtgtgtttctggtgttctaatgatagctagtgaatgtgtgaattatattcttggccttacttgaaatgatgcgaggtttctgttgtatagtgttaaaggtgagcctgattatttgaagcccttccctaggcagtgggcacagtggataagaagggagagcatattgggtaaaatgacagtgctccaggattccattacatttagtggcattttgggatattgttttatttgattccactgtcgttcatgatatgccatctgtctttatttcctttcctttgtttgctttgggtttaattttctcttatttgtctagtttcttaatatggaagctgaggtcactggttgaaaacattttctctctattataagcacttaatgctataaatttccctctactcctgcttcagctgcatcccacatattttgacatgtttttatttttaatctgtttaaaagactttctaatttcctttttgattttttttgactcaggttatttagaagtgtgttatttaggatatttggatattttccaggtatgattctgttatttatttctagcttcattttattgtggtcagaaaataaactgtgtttaacttsaattcttttatacttcttgagactggttttatgacccagaatatagtccatcttgaaaagaatgtctagtctgctattgtgggtggagtgatccatacatgtcagttaggcaaaattgtttgatagtgttgatttttttgtctacctattctttggataattgagagaggaatattgaaatctccaactacaattatgaatatgtctatttttctttttacttctgttaggttttgctcgatgtattttgaacttctgttgttagatggataaacatttagaattgctatatcctctggataaattgactcatctgtgattctgaaatgactctttcatttcataattagtctgttttcacgctgctgataaagacatacctgagactgggcaatttaaaaaagaaagaagtttattggacttacagtcccacatggctaaagaggcctcacaatcacagtggaaggcaaaaaggagcaagtcacatcttacatggatggcaccaagcaaaaagagagcttgtgcagagaaactccccatttttaaaaccattggatcttgtgagacctatcactatcatgagaatagcacgggaaatacccgcccccatgattcaatcatctctcaccaggtccctcccacaacacctgggaattatggaagctacaagatgagatttgggtggggacacagagccaaaccatatcattgatggttaattttatgtgttaaatttgacagggctacagggtcccagatgtttggttgaacattctgagtgtgtctgtgtgggtgtttttggatgaggttaacatttgaatcagtagactgagtaaagcagatggtgctctctgatgtgagtgggcctcatccaatcagctgaaggcctgaatagaacaataagactgactcttctgtatgaggtaattcttcctgcctgattacctttgagctgagatgggaggtttcttctgccttcagtctcaatctgacacattgattcttcataggtttcaagcctgctggccttcaggctggaactacaccatcagctcccctaggtctccagcatgccaactacagatcctggggcttgtcagcctccatactcacataagccaattccttataataaatctctctctacttctacacatacacacacgtacacacatgtacacacacacacacatatatacatacatacatttttctggttctgtttcttttggagaaccataactaatctaatacaatttctttatccctagtaatattctttgttctgaaatctaatccctattctagttttcttttgattagtatttatatgctatttgaaaaatccttttgcttttaacctacttgtgtctttatatttaaattaggtttcttatagtttgggttttgctttcttattcaatgtgacattctctactactttatttttctttcttttctttttttttttttttgagatggggtctcgctctgtcacccaggctggagtgcagtggtgcgatcttggctcactgcaactgtcacctcccaggctcgagccatcctcccacatcagtctcctgagtagctgggactacaggtgtgcaccaccacacccagataattttttgtagaaatgagctctcactatattgcccaggctgaactcctgggctggagcaatccacccatcttgacctcccaaagtgttaggattacaggcatgtgccacctcacatggcccattctctactttttaatactgtctaccttttcttccttttggggattgaattgttttattctgttgtatttccttttttattggctgatgaactataactctttgttgttggttttttgttttttggttgttttttttttttgagacagagttttgctcttgttgcccaggctggagtgcaatggtgtgatctcgactcactgcaacctccgcctactgggttcaagtgattctcctgtctcagcctcccgagtagctgggataacaggcgcgtgccaccacacccagctawtttttgtatttttagtagtcacagggttttgccatgttggccagcctggtctcgaactcttgacctcaggtgatccacccaccktggcctcccaaagtgctgggattacaggcrtgagccacctcacccagccaatattttggccttaaacatccaattatctttagaaagatatacaaaatgagacaaaagtcttttatatttaccatttctggtgctccttattcctttgtttaggtattatttttgcttctgcctgaagcacttcttttaatgtttcttgagcaggtgtgctggcaatggattcttttagcttttgaatatctgaaaaacttttttttattttctttttttcaactttttattttgaaataatataggctcataggaagtcgcaaaaatagttcatagagtcaatctaatgagcccttcacccagcttcctccaagagtggcatcttatcactagtacaatatcaaaccaggaaattgacatgagagcaatactaataactagactacagactttaataaggttttaacccgttgttttatgcactcatttgtatattcaccttaatttttggaagatatttttactggatattggacttctaggttggcagtattttctttcattgcattatagccctgctgcttctggcttatgttgtttctgatgagaaatcagctgacattcaaaaatttgttcttctttatgcattttttttttaacggagtctcgttccattgcctaggctggagtacagtggcacaatctcggctcactgcaaactctgcctcctgggtacaagtgattctcctgtctcagcctcctgagtagctgggactataagtgtgtgccaccacactcaactaatcttttttttttgtattttcagtagaaatggggtttcaccatgttggccaggctggtctcaaactactgacctcgtgatccgcctgccttggcctcccaaagtgctggaatyacaggcgtgagccactgcgcctggccacgatgtatcttttctttggctgcttttaagaatttctcctttttttttttttgacatagtcttgctctgttgcccagggtggagtgcagtggcacaatctcggctcactgcaacctctgcctcctgggtgattctcatgcctcagcctcctgagtagctgggattacaggcacccgccaccatgcctggctcatttgtttgtatttttagtagacatggggtttcaccatgttgaccaggctggtttcgaactcctaacctcaagtgatctgccttctttggcctcccaaagtgctaggattacaggcatgaaccactgcacctggctttattaccatttttaagcaatttgtgatgtgccttgggtgtagttttcttcatgtttcttgcacttggtgttcttggatctgtgagtttaaatttttcacgaaatttaaacaaaaatttcagctattattttttcaaatgtgttttggcctcaccactacccctctctgcacttcaaagactccaattacatatgtattaggtcattcaaagttttcaccaactcactggaactctctttgttttttacttttagtctttttccctgttttcactatggaaagtttctaatgctatatctcaagttcattaatcttttatgggaggtatataatctgctgttaatcacatttattatatatatttttttatctcagacattgtagttttgttttgttttgttttgttttgtttttgagatggagtcttgctctgttgccaggctggagctcaatggtgcaatctcagcttactgcaacttccgcctccagggttcaagcggttcccctgcctcagcctcccgagtagctgggactacaggtgcataccaccatgcccagctaatttttggtattttagtagagacggggtttcaccatgttgaccaggatggtttcgatctcctgaccttttgatctgcccaacttggcctcccaaagtgctgggattacaggcgtgagccatcacgcccagctctagacattgtagttttaactctagaagcttgacttgggtcttttaaaatatcttccatgttgctacttagcatgcttaatctttccttgacctttttcaatatatggaatatagttaaaataataactcttaatctctttatctactaattctatcatgtgtgtcatttctgagtctgtttacattgattaatttttctcctaattttatagatcatgtttttctgcttatttgcatgctagtaagttttgagtggatgtcatacattgtgaattctaccttgtcgggtgctagatattatattccttaaaatattcttgaattttgttttggaacacagttacttggaaactgtttaatgctttcaagtcttacttttaagttttgtagagaccaaagtggcatttaatttagggctgatttgtccccaggactgaggcaaaacctttctgaatatcccacttgctgccccataatttgtgaagttttccactctggctgctgagaacacaaaatattcccagctctttgtatgtcgcaagaactgtttcttctgctccttttaggcagttctttccccagcctgggataatttcttcatctgaatgtactgaacagaacttagttgaagacataaggggtgcccttttcagatctctggagctctctttgtgtagctctttcctgtccagcactctgcccattatctctagacatacttgcttcaccaaaaaactagctctcatcaacccagggagactgctagactgcctgggttccccctgcctgtgctacagcttagatcttcttttcaagcagtaagctgggataattgtaggtcttgtcttatttccccactctaagcaatcactatactgtgcagtttgatgtcctatgtctgaaaaatgttgttttatataatttgtccagttttattatttgtttcaggcaggaaaatcattgttcctccattttggcttgaaagtagaagtcctgccattggaattttgctggagtatctgtattaattcctgagggctgccrtaccaaagtactgtaaactgggtggcttaaaacaacagaaatttattctttcacagttctggaggctgagagtctgaaatcaaggtgttagcagggccatgctaccttcaatggttatagaaaataattatttcttctagcttctggtggcttccagcagttctcagtgttccttggtttgtgtatgcgtcgctccaatatctgcttccatctttccatggcttctcttccatgtgcctgtgtctctgtgatcaaatttcctctttctatggaagggtaccagtcattggattaggtccatcccaattcagtatgacctcatcttaactttgttacatctgtaaacagcctatttccaaacaaggccacattctcaggtactaggccttaggatttcaacctatctttttgggggacacaactcaacccataacagaaacttttattcttctttttgattaaatcatattttaaagggaacaaacatgactggtctttgtggtaaactattaaaaatgccctgcattattagtttatctttaaatatcctcaagtatttatgatagtcataataatttctaaatcaacttcatatctatcttttcttaaatatgatttgttaatacagtgagattgttgcattaaaatttctcatattttctgtttttttttaataaagccattgtatattttttggccttttgttctaccttggattattagggattagaaggggttcaaacttaaaattgtagtaattagctgctatgatgctatcttaaaagtagcttcttacctaagaataaaaatgtgtagtcaattctggcttcattatttggagggattagaagcaactctgtcaaacagggtgacccttgatgccatttgcaaattcttcttagaaagaaactgcaaaaggaatcattcacctactaatccaacatccaataaagtttagttccgtgagctagtatcatcaatggcagaagcacggtcaaaattagaacagtagccatagaagtatacgttctaagttgaccttcctttgggtgacaagagtttagtaatgcccatggattcattggctttctgtagtggcaggcagttctctggtctccatcattacacctaacatgttataccattttaattgtgtctttaattttaattttaaacgtgactttaattttaaatgtgactttctccccagtaagaaccgtgagagactatcttggtacttaacacaatataatacactagattcttaatattatgtaagagatcacagtaggatatgagggagaagagaacacatgagtaaatgaggcccagagacatttagcatcatgtctgtggccacacagctagttagtgatagggtagaactaaagtagctcttctattaggttggtgcaattacttttgcaccaacctaatagttctcaagtagttttttctttttacaacatctgtattttttatctctttggatctcagtcctctagccatagtatagtaatttttataaattatagttaacactcttatagtacttgctattttcctggtatgtttttaaatgctttcaatatattaattcatttgatcctcctaataactctttgaggtaggcactattttccctacattacaggaaactacaatacaaaggtatgaagtaacatgctcacagtcatgtatctggtaaatagtcaagctaaggttggaacccagatagtcagatactaaagtctatatgtaaaccactaggatacactccctgaaatggaatgacattatctttttgttaaagtcgtatgaggaaaagtaaacaaatatttaatgatgtagaataacataatatagattttattacacaaagaacatacatttttaaaaatttcagttaattttgtgttaaagatgctcattaatttgtttactttccatcaaaaaatgtagaatcaataggaaaaaaaaccttaatgtttatacattaatattaattagagacacattaaagattctcattagataacatacactttttcaaaataggttgccagtttcttataagcaataatcagttcagtcagaattgatacttagtttctccaaaggatttaagccttattcttttttattattttctatatacttccaatgttaaaatcattctaatgctacttatttttttaattgattgctctggggtttgcaatatgcattgttaaacttactagtctctcttcaaatagtattagactacttcatatataatgtaagaaccttacaataatatattttcattttcccccaagagtctttgtgctattgcatcatatatcgtacttctatatatgttacaaacgccatacttcattgtaaatatttttgcttcaattatcttttaaagaaagtatttcatatttactcacatgtttatcatttctgacattcattattcctttgtatagatccaaatttctctcatatgatttttcttttactagaggaacttctttgaacatttcttatagttcaggtctgccaacagtaagttctgtttgcttttatttttctaaaacagtttttattttgccttcatttaggcagaatattttttctgggttcggaattgtagattgacaggctttcccttcccctgcctcttttagcatgttaaagatgttgttccattgtatttttgcttacatatttctgacaaaaagtctgctgtttatttcatcttgattacttgtaggtaattagtctttttctctctggctgcttttggtattttctccttatcactggttttcaatgatttgtcttggtgtcattcattttttatcctgcatgggatttaattagattcttggatctgygggtttattctttttatcaaattgggaaattttctcaccataatttatactcgttctgtcctcctacttctctccatgtggacaagtttgcatgtgttagactgcttgctattattccacaagacaaaaagctctgttcattttttttttttcagtctttttctgtgtgcttcattttgggtatattctaatttgctatgccctcatgttcactggtcttttcttctgcagagtcatatctgcttctacactcatccagtgaaatctttattttagatgttatactcttcatccctagaagttctatttgattctttaaaaaaagattttcacttctcatcacattatgttttactttaaatactagtacatagctataatagttgttttaatggtattaccttctaatttcattatctccatcatttctaagtttgcttctattgatcgatttttttcctcttttggatcacattttcttgcttcttggtatgtccagtaatttttaactgaaagctgagtattatggctattatgttgttgagttggggatttgttgtcattctttaaatagtattgagctttgtcttggggagtaaattacatgtagatcagtttgacccattcgaggcctattttaatatatttctagggcaggtctagaataactttcactcaagagatagttcagtcctactactaagatgtgactctgctggtgtctctactgaatgacctaggatgacactgagggctctctactagtcaaagtgaaaagtcaggtgtgcaatttcaaaagcaatggtcagagatgacttcactgtgaaaatggtggcttgcacattaatacctttcttatacctttcattactgagtcaggggtatgaattcttttaataatgatatataatgtcaaactgctttccagtttatacttccactaccagtttagaaaagtgcctgcttcataataaccttgttagtattgaatttaataaattatagtatatcctttgggaggaattatgcagccattaagaagcatgatttttgaagactatttaatgacttgagaaaaggctctcaaaccaatgttaattaaacaaaagcagagcaaaaaattctatgtacatcaagatcccattttgacataaagataatatgtattctttggtaatagcatttatctccagatgatgagattatgaatgattttcatattcttattttattttattttagtataacttatatactacttttagcattattacttttaaaacttttattttaaaaacatgaggcacctgataaatgagtatatagaaaagaaagaggctttactcagaacatgaaaatacctgagggcaataaaatcaaaaaacatagagacccatcacaaactagaactggagtcacttttttgtttctgtattcattttgtgataatggagttgtctgggccatcaaaaagaatgtcctgataggcatcccacctaatggaacttgcaaaagttgtataactggtcaatttatatccatggaacagaaacagctatatgtcttaaattgactttggtttttgtttgtttgttttgtgacagagtcctgctccttcgcccaggctggagtgcagtcgtgcgatcttggctcactgcaacctctgcctcctgggttcacccagttctcctgtctcagcctcccaagtagctgggactacaggtgcccgccatcaggcccagctaatttttgtattttaagtagagacgaggtttcatcatgttggccagtcttgaactcttgaactcaagtgacccacctgccttggcctcctaaagtgctgggattacaggcatgagccactgcacccaaccagattgatgttttttttttttactggtttggaccaagtgcattttctttgtctcctgttttacatcttaacactgaatgtattcatttgctagggccgccataacagagtctcacagattgggtggcttaaacaacataaactagttttctcatgattctggaggctagaagtctgagatcaaggtatcagcagagttggtttcttctgaggcctctcttcttggcttgcaggtgaccaccttctgtttgtgtcttcagatactctttccactattcatgtctgtgtccaaatttcctcttcctgtaagaatgccagtcatattggaatagggccccctgaatgatctcacttaacctaattacctctttaaagaccctatctccaaatacaatcacattctgagatactgggggttaggactctaatatatgaatttggggtcggggagacacaatttagcccataayactaagttcggttcttctctttaaatttttcatgcatgttacagtgaaaaaaagctaatttctttactttccaagcataggttttgaatccaaaagtgtctgttgttgaattttggctctctcacttaagagctgtccaactttgaacaagatatctggcctttctacacttcagtattctcatctctcaaatgaggatggcacaagcacatatcttataacattgttgtaagcattcaattatttaattgatgcagaactcacagaatagtgcatgtcacatagccatacactaagtgctcaataaagattagctgttactgttatatcaaattatctcatctgtgtagctatttaacactgtacttaacacaggagatatagtggtaaatgcaaaagacagttcctgtcttcactgaagagagattttcccctgaatctagatgttggtcttatttctggtgaggaagcttttattcttttcttttctatttcttttgagacagagtctcgctctgtcacccaggctggagtacaatggtatgatctcggctcactgcagcctctgcctcctgggttcaagtgattctcctgtctcagcctcctgattagctggtattacaggtgcccaccactacgcctggctaatttttgtgttttcagtagagacaggatttcaccatgttggccaggctgttctagaactcctgacctcaggtaatcagcccgcctcggcctcccaaagtgcttggattacaggcgtgagccactatgcccagccacttttattctactttaaaaaattctgtatagaaatacttttctaagggatactgaacagtcaaagcatgtttgatctctctgactttccctcattgaaagcattgattcttgttatacgtggttggtagatttagggagatgtaaactctgaaagraacttgaaagtaataaatcctatatctcctttatgattatgtctcctttttttctaccccttaaacaacacacacacacacacctttagctgtgctggacacattatctaattccacgtgcgcaaattctgcatctagataatgttgtcttgtgacagtgtggtatctacctcattaagcagtccttctagaatgctttgatgactaaaaatacagatgacgtgtccttcgtacagccgctttctcacccgcatgtaggaacatgtgctttgggtacattttcaagcaaggacttgtggtgatctacctcatacattaatcctagctgtagtaatactttgggaaaggaatatgatcccaaaataaccaccaggagaagagaagcatgtcatgaaaggtcatggcaatggggcagaggatgttggacaggagtgttctaaaaatagagagtaagagatcaaagaaccagcagtaatgaggaacattttttggctttggttcccaggggaaggaggagaaggaggagaaggaggaaggggaaaggagaaggagggtgaggaggaggaggagaaggaggaggagaaggaggaggaggaggcggcggcggtggtggtggcggtggccgcactccccagcctgttcgtgccttctgttctacccgccactcatatctgtgttgcagaaatgtagggtagggaggatggttagcacattttcctgtcctgggtgctgactgcctttaaattattttgatagaaagtgtatttatataatgcttaaaaacatgtcaaaataagaagcatggagaattttaccttactgccatattgctactattgcaaggaagacctaaacattttggatcaagaatcctcaatttcagcttttttctggaccagacctttaggttttaccagttcaaattgactttttgtcatcttcctaaactatacctgatgattaattgtgagtgtttgcagagccaagcactgagtttttgtgcattcatgagaagttgggtcgatcagccactctgaatattctgtaggcatgggtgtgggcatatctggctgcgagtgaagaaatttatatcttagatatgctgttcaatccctcccctgcaaatatagctttgacaataatgaggcgagtagatgaggacatgttaaaatcacaggcctcttgaaggaayttttggcagatgattgtgtgtatgtgtttgtgttcatgtatgcacacaatatagtaattccatacagtagggaattaaaaaatctgggatgaatcccgtaaccttcctaaggacaatttactcaatagtgaactaaacttattgacacttggctgacagacgataaatgtatggaagtgcttgccaactatacaatgctgtacaaatgttccttaaatcctgtggttgtcagagaaccagtctatatgttcaagtcgaatccactatctcctattcaaggaggtttctttckttttgttcattccaaaactatttactgtgccactccagtgtgcaaggcactatgccaggcaccaagaagcatttaaagatgaatcatacccagatcctgccctcaaagaacttaggatataaggaggcagataaactactgaaaaatgctctgcttggtttctctaatttagcttcaaatgatgtcataactgagcataatatgacatttaaaaagggacttagcactccctcttaaatatttaaataacaatgtacatgttaattagtatgcatttgcctgttaatagacttattaacatgtatgctagtagtcaagagtactgagaaatgcctgtgcaggcaaaggtgtcttgattcaggacaggcaatgtgaggtactgtagtgattagcaatgactgacagtgcactaatcacagcccttgttgagcaatcagtcttcattaggctccccaaaccaaaactgacccaaaaacaattgattctttctggctttaaagccaatttctccatttgttttgatttgaggctttttaacgctgaatctgtgtgtgaaaggcccttctgtttaatattttagttgcagtgcagttaataaatccttgactttattctaaaagtagagacaaagttaagacttctccaggagactaaggaatcttaatatttacatgagggaaatatacacagttataatcctgaaaattatgcaatttccagtcatttaaaaatcaccacaaaatcttattcttataaaaatctagcttaaagcacattctcagtcagaattctggctttaaaaatattcattgaataagaatactagaggtctttggaaagtataggacatgatactgatctcttctcccagtaaaagaaagctgctttagagattaaaaaaaaaaaaaaaaaaaaaactcttacaatttcctttttaggaaaactacgagggcctgtacattggtcttgagctggcctctctttcaggcatgaatagatctaaatcactgtgagagatcttaaagatggtccttaggaaaaagaagctattgtgaactcagaaaagaggaatgttccatttagtgctcaaaagaatggttgaaaactagtggaggacatgttggtgctaacatttaacaaatgagttccatggaatgctgctaagtgagatgtaacattgtgtgagcagcaagtataatcttcaagccaagatgtccagggcaggcacagaggcctgggcttccttatgaaccaagacagacaactcccagccagaatccccagaaagtccctccatggagagtctggcagactagctccaactctgcagcctttgagctctctcactacaatgtttcagaaggaaggagagtccagatcacatatccagttatgtagcacctgtgaccccttagtggcccattgcctcacagtaaacactaccaccaatattgctgacagtccccagatgcagtggattcatacaacaaatatcagacctctagactgtactgtctatcagaaatgaagaatctgttcatgcctctgacctccaatttgtgcttctgccaagtgcagtgagcatctgcaggcctgtgtctgtctgcctgctgtctatggttaggtcagcaatagtgccctttgctggtaacaaacctctgggcctccagtttcttctggcctcatcttcatagttaggacccaggtcactccctgtttctcaccaagcaactacatgatttctagagatcccaaaagttttaatcttgaacagtgattttgactctttcagaagactggttagctttaggaataaaaagcagagtaaaaaattcactctctggcttttccagtatttactgctgtgtaataaactacccccaaacttagtaacttaaaacatggattttgtgggccagcagtttggcaagcctcctctgagtgattctactgttcctcctggagatgactaaggtcacttattggtacccagctgctagcttggctggctgagcggttctaaggtgactttactcacacatctggtaccttggtaggggtggctggaagtgtgagctcacctgggactatctattggaatacataatgtggtctctccagcaccttagtctcagggtggttggatatcttacatggcagctgcctcccctcagagcaagaatttcaagagaacaaggaggaagccctcttttttttctcatctagcctcaaaagtcctgctacattctgttggtttcaagcagtcataaggccatcccagatgcaagaggagrgaagttaggctccatttcttgatgcgaggctacctatagragagcttaggaaattttgttgaggtcatctttggaaaatataatctactttggccttcaaccttgttttacttacttactgttcaactgactctgaatacctgattcttgtccaagagtcagttattttgtctactcaaaagcaagcttcttcctcccttctggtctcccttctttcctttccacctaattaagaggcctgcttctaagaagcttcccacagatcatctaaaagacaaggcagagttcatgggtcttagctggaaccagcaagatgatatgggtcagaggaagatataatgatgatgagaagaattaagggagcttccttgaggaagtggccattatgctagacttcgttggacaagtagaatatgatacattgagaataggggagaaaggcatgtcattcctacatgagcaaaggcacagcaatgtagaaatgaaaggtatattgtacgaggaaaagctaagagtactaaagaattggggattcagattctatagccgttgagaaaccaggtttttaagttgtgttttaagatgaaactctgatagcagtgtggaagatgcactggagaagtgagattgtagagaaaaaaagatgaccagagtatgtagagggctagtgtatccaggtgaatggaaaggagagggctttctttctcttctggtctataaaagaaacagtagccatgactttttccagagataatagctgaaaccagtactattcatcactagatttgggccttctttcagcaaagatttgtccagttgtatttggattggatattgggtaggacaagttatccccttgggatttcatcccacctctcgcacccctttcccagtgaatctatgcctcagcctccttggaaaccttcaatttcccaagtccacttcaaactcttgccctagctaagagggcccagaccctcagctgtttcttccccaatcctctaaactctcttttttgccaacccatagccattccctgagcatgccatgctctatctcactgccacatgtttgcatatgatcatctctctaccttcytagccatcagttaacacccaactgaaatgtcacctctgtgaagcacgatgcataggctactgccttctgatctcccaagatgttctctcttctgtcataacatctgtcccattttagcatcatgtgtatttcatgtttatttttgtggattagactgagccccttgaaggagcagaamgctccttatcatctttgtatcactaatgkctctcataggccctagcacggagtaggtgatcagtaaatgttacaagaaggagtgaaagttgaaacttcacttaactcatattggtctgtgtttctgatctagaaatcctaacactctgaatgagcaaggggttggttccattctgtgcaaacagtggtggttaagtgtgctcagaagaagctgggtttctgttgacatacagttaccgaagtaatctgggaaattagccagtgaaaaccagcagatcccagagtagtagagctctgttcacaaaccttgtttatttctaacaatccgtttcccagaggtatcatgagcagcccaattgccatgtctctcacaccccagcaactattaaaaccagcaattccctgcctggtttcagagtgcagagcagccccatgtagtcccctggattgtcagtaacattttcttttctgaaagcctgacattcatgagtagtttaggtcattgtcaacttctgtggtcaccttttaaaagctaaggtcatacattcataaaatccttcctgacattgtgtggataatagcaggtaactcagcttatacatagactaagccctgaagaatgctccgtgggcagagctcagcttacttgagagaactttgtttgcacaaggtttcagagcttgggtagagaagatgttttcctttttaccaagaactctgccatgaacagctttatgtaatccagtcagtgctagcaagttgttgctgctttcaaatggctagagcagatagatgacacgtctgccttcttaagcctcaagttaatacatacgtgctcagggagagcctctaaatggtgtgtgtgtgtgtgtgtgttttttattattacttacttgggttattcactgggcttattaaacaatggtctgtaaagatgtaacattttgcatcttcctgactaaaatgtttgacttaattttaccccctaacacccatgctgcctctctcacttaatttcagtttcagatgttttcacctctaaggagacacatttatgaaaatgacaatttttaaaacataccgattatgggcaattcatcacaacaccaaataattctcccctttaaggggagctcttaattatcctttaaggacggagctccctattttaagaatcaccaagaacttggagcagagtagttcaggaggtggggtgaagggagaggggcctttggagtgggcacacttggcagcctcatgctaccgctgctccattgaccagaacctctgggcctcagcttttctttggatgaaaccctcatcacagatttggtatagattgaataatgtaacccttagaagagtctcagcaaagattaatttctgtccttgtttcctagacaggtcattaggtcttgggaggggtgaaaggagcagaaaatttaaactaaagagttaggaaacagtggtagttgggcatatctaaaatatagaatatgtaaatatgtaaatagaatccaattgacggtaatttgacttgcaatttcccaggaacacatctactataccagacatgctgaggattttatgacactgtagctacatttagtcaccattttaaagagccccttggcagtatagattctctagcatcatagaatattctattatagaaattaaaggtctggaagagctctgggttccagtgaatggatccccagtcgaagtgttaatgatataaaacttgtccacttatatttacaaatgattacttaatcactcttccaaggtgggaagaataaactcattctactgaaatttaatttatatgattgaatgagaaataagagattaactcatataaattaatgctgaatatttttggaatatcttcttctcttaaagctcaaagacactcttatttctcttaactcctttcttcatcactgatggaagttttaaaaacgtttgtaatttaaaaatgcaaagcacaaagaacataaatatttggcaggatatccaagattcaggcttaacagaaagcaggagaaaagataacagcccttgatgatggaagcagagatgaaccaggtgccttccgtgtccacttcatggtctacatctaacacaagaagtctacatctaacacaagagtggtatggtccctgagcagcagcattagcattccctgggaactgtgaataatgtaaaatcccaggcctctttccagatctattgaatgagaaactgtggcagaggggttcagcaactcttgtttaaacaagcactccaggtggttctgaggatggtaaaatttgagaacctttagtctagaaggaattttgaagaatagaaggacataacatttagagtggtgtagtgtaataaaaagtttattccatgctgaaagagagacaaaaatacttagcagtctgtacagtgcttagataatatggcttttgactaaaaacctttatgaaaacccatgctttcatacagagtgacagttttaggaaaaatctcaaaagttcacttttcatagcttgccacataatacaaaaatgtttcaactgcccaatttgagttctagcctaagtcttttctgtggaaccagttccatgaaatatttaaaatatttatgtagaacaggagttcgatgcccagatattttcagggtaccccaggctctgcaaaatgaaaaaggttttcttgctaagtcttataataaggagacctgtttcattttgtgtgatccagtgctctggaggacttctcagagcttacactatgtgaatgtaattatgaatctccaaaagaggatattcacttttgtgtatggtggctcttttagtttatggtgttcctcaaacttctgtgaagcatctcttaagaccagaattctgcagaatccattttgggaaatgcaaatctaaattatagaatgatagaatttctggcttggagctattcctagggatcaaccagttgaatcccttacttctgagcacctggcttgctgaaagtcaaagtgaattattctgaagctactctttatctatagtttgtgttgttattaacccttgcagatatgagattcttctttaaacataaaattttatggataaacatccaccccttacacatgtgtacatggatgaaaataggtaaaatgttttacactggttaattaaaaagtgacctaatgctgggtaattatagtacaagctttggagtcagatgccagctccattatttataccagtaaaactaaagggtgagttagttaaactcttcaaatatcagtttcttatctctgaaatgtggatgacaattatacctacctcctgggtgctaatgagagttaaacaaaatgatctctgtaaatgttcaataatgttagccactgtttttattgcttgattaaaatatacataatgaacaaaagttacaacaaaattcataatgcttttaaagaatttgtattttattaagtcaaattaaatatattttgccacatggatttgaaaaaaggtattgcatataagtgtaagacattattcattctacagtgtttggtatgcaaatcaatttgcagatccttagcaataacagctatatttggggtttacagactataggttaagaacgaatggcctgtgtcaacttattttatctacaaatagactgtctatttttaaaacattcacttcaggagagaaccctcagctttctttgttctgttattcctgtgtttaaactcctttgcagttaattttttatagatctcttgggacatgttcaaaatccatttcctctggtcttgtcttctgcagacctggatggccagtcagcatcttcctcacaggaatattttattcagagtaaaagctcttcttaaagaaacctctctatcaatcaattgctgtcaatcactcttgtgcccagtatttgagtagacatctttagatagacagaagtgttaaaccacttttgtcacttcgaggaacttataatgtagttgatggaatgcagtcatagagagtattcaaatgctatcctgacagtactggttgaaaatgtgcttgatgttcggcaaaggacaaaatcaatgtgggagagtatttgtgaagccctgtgaaggcaaaagcatgtttagtgcaaaaacactgaataaggaatcaggactaaggttctaatttacatttccagactttgaaacaaactcactgtgtgaccctgggatagwctcaacttctctagatcttagttttcatatctgtaaaatggatgattgaattaggttctgcctggtgccaacctctggtagaaaacctttatctacaatgtgcattctcatgttgaatgcttacacagccctctgacgtaggtactattagtagccccatttttgaaatgaggacattgaggctcagtgaagttgctaacctgctaacacatagccagtgagtggtggttccagtactcctaccagggtgttctccactccggcctctttcactcttaaccacaaggccaaatttctcctctgagaggatgggaaaaaggtttgagctggactttttgagatggatgagggcagagattgagttacactgtgggtctaactcaatccccagagtacagggtaatttatagtgcagctccctccctgaatcccagaaagcctataatatgaagttatttctatccccaaacaccagtatcattatagagatcagctgaacatgaggttagtttattgcttattcattaacattttcttctttgtttatttatttcttctttttttaatccttcagtagtttttttagttgcttttttctaagttctccttaatttctcaaataaagctctgcctattgtcatgtatacagaaagaccattttctccccacctcttacaaatcataagcctataagtaattaccagtttaatatcatatttagatttttaataaaagagtgactgtatttacttccatttgcttctgttctagtaaggatttagagctcttctgtatgtgacttttatctctagttagtgttgtttgccttctgttcttgcatgatctgccttgaatctgacagtttagagatggaggagccaacaataatgtcttagttcattttgtgctgctgtaacamcaccacaagctggggaatttataatgaacagaaatttactagctcacagttctgaaggctgagaatttcaatatcaataccgaagtcacatctggccagtgactttttgctgtatcatcccatggtagaaggtgagagggctagagagacaaaaggaggccatgcttgtccttttataaggaacccactcccaagataactcctgagaaaacggcattaatccattcatgagggcagagttgccatggcctaatcacctcttaaaggtcccacttcttaatacttctgcaatggcaattaagtttccaacgcatgtttttttwtttttggagacacattcaaatcatagcaaatagtagtcataaacttgtactcagcatttactttgttttagatattattcaaggtgtgttatgttcaatcttcacaaccaccgcagaagtttgggactattgttgctcccattttacgagcaggaacattgatacaaataagaaagttgacatgccagtgctttatccaaagtcacatagtcatttggcagaatccaagtcaaactcagggagtttggcaccaaaacctacacacttgaggttagacttttgcctcctcagaaggaaagaagtaggcaatacatgggaagatcagtttcttcttctcccccctcctccctctgcatctcctcctcctcccaccttctccaccatttctgcctcttcttctcctttagaacgaactaatttaaatggaatttatttggctaacacaagaagattaattatttgggctaggagaaaattaggaggaggggaaggaaattaagaaagggaacattttggatatatatttgcctytcwtatacacctctttccaaatgcagagctgtttcctgaacagttttcctagtgaaagaggtcattcacagctagagaaagcaggccccactgctgccaggatgggcctgccactgcaattgcaaaattaatagcttattgccatttctatcatgttttaatagttgaaagaataagaattgatccttatctttaaaaaagcgagaagggcttcaggaaattactcccttcrtcttatcacctctgctgtgccttattgtcatgatacaatcatgtgtctgatattttcttttcctctgctaatagcagggctttaaattattaaaggagaagaatgttgaccctctgctttgctgcttctccctctgtgctttgagagttggttgactctttcagcttctttccctctgccttagaaaggctcattttctgttgggagtcacgtcctggctctgcttcatgcctgtgagtatggagggcagagtttgggttgctgaatgaagctgaggaatgtctgagaggcagggcaagggggttgttgactttgctcaaaatatttcttgaaaatatctcatataatgttagattttgcagctcccctagctcttctccaaccccccacttttaaataaacatgttgagttataactgtgtacagaaggagttagaaaatgaaccccactgttgctatcttcacaggcatctgtgcgggtgtgacagggtgaataggccctttgggaattttaaggggactcctctagagccaaattcctcaaccagggcaaacttccatcagctgtgtaaatagtgtggcaatgtgtggaggccacgagcagtttcctgatagtcagctactgtgcccaggtagttaaaaggagtcgtgttccatcctgaggcttgcaggatgtgagttgggtcttatagtctctgatgagtgggtgggtagaaatttcctctccactttatttagtactggggaagtcagtctgattaagataggtagggctggctggatgaaaccacacctaagagaagccttctgggtgtctgagtgaagagaaaaactgtgactgtaaactgaggacagagttaggcattcactggcaggcattcttcccagctcaagaaattcctggggatgggaatagacattgtgctctgggagtttttatttagctgttctttaaaatrtagagttaaatgcaattcaattcatgtatctagtgcctttaactattccccaaaacatctgaaagaatttggaaaccctggaaaggcttcctgtctgtcaagcaatgccacgtgcatgtgcctagttttttgcagctgcattaacctcagctcttccctgtacagagatctggatgcttgccccagctcctgaatctaaagttgttttgtttttcatttgcttattctacagtgttcatcattctgacatccaatttgtttgtttagcttaaatgaataaggatagagacaaaacaactaggtacaggcagttttctatgtacatcagtgcataatgcattcttgaaaatatgaacaaacctgcaagaaccaaataattgtaaatggagttctagtaccaatgaaccaaaaatactataaaatccctaaatacatcatgtttttagaggtagtctttaatcatgtatttccagcattgtctttgttctttaatgctttcctttcaccactagacccatgaaatactggctgacatccaaccatcatccaattgaagcaaaagtttatctgcttttggcttgcccgctgttttccatgttcatcttaattgtgttaagtttatgaaactaacccttctcatcaacagtatcagaatttattttcagccccacttttatagatgtatatggataaaacccatcaaattattctaataattacttaaacaagtattctagtacaaagatggtgccatgctgcccagacagaatagctatgcctgccattgtccagttttatcatgaccaatttaagtgcttgtgtttctcctttctttaagtgttctcctttctttaacctgtctaaaccattgcggaaattrccagatatcaaaattgcatgctgctgtggaaatgtttccttgaagtgatcaacttttgtcattggtccagagccacaggaattgatggaaaacagggttggaggcagttgcttgtttcctgtgttcactgtgagcaagtctgcctcttaccagtctaggtgaagcctaccacccggctggatcccagcattctccgtgcatgttgtacagcagttgttgttctcttcaaaacaacaaaaygtttgaaattttaaaaatttcaatgtgttgaacatgtatatagatagttgtgactgagaatttaactaacagtaattcttgagatgagagaggaaatagaaaccaatggaagggttgaatcatttttgtcttttgttatacctcctggctccttgtgaacataacctggggatacataatattggacttcatctgcatgttaatatcatataaaaaaagatctgagaagcagtatagtagaatcattaaaagcattgactttgaaggaaaacagactttggattccactttctggctatgtgatcttgggcgagttacttcaccttactgaacctcagtctcctccttcatgaaactgagataatgatgtccatctctgcacgtcattataaaaaggaaacataatattgtacaaatttttgtgaaatcgcccagtgttagccaaccaacataggtttgtttcaaagatttccttgatgtggtttaaaaacctgtgtttctttgacattatgggccaataacaatactaaccatagtggaaagagaatggaaaatgacaggaggtcatatgtgtgaaagtgtatttgggttggacaaggtggatctgaatattggtgccatcactttctccctgtttgtgggtagctttttataaaccaatacataggttaagggtctgaatagacagaaggctcttyccttaaaaagactggaaaaccttccaagtagctcttgaaccctcacattttatcaccatttatggtgttgggaaatttttagaaattgagatatgaggtgatacaaacctcgttttcttgtgacagaaattccyagccagatatctggaaataggagaagttggagaagaggtttgaggggctagagaatactgatttccttagaatctgatcagtaacaggctgaggaaacattttaaaatcacatagattctatgcatgtctgagctgccgcctttcaggaatattcactcttggtgtcttttcaaagatcatgacacaacagcagtttgtcagactcttctatgaatggccccatacttgaaaacaccagcttcttataggcattcccatgttgtattatagacagtgttcaggccctgaagtaagaaaatctggattaaaatccaacctctgccatttattagctatatgaccttaggtgaaaggatttttcaataattctcagcctcagtttattcatttgcaaagtttacatattaatatccacatcaagaagttgttttgaggactaaatgagaaaacatatgttttagtccattcaggctgctataacaaaaatatcatagactgagtgctatcaacaacatacatttatttctcacagtcctgaaagctgggaagtccaagatcaagatgccagaagattcaatatgtggtgataccctgcttcctggttcatagatggccatcttctcactttgtccttgcgtggctgaagaagcaaaggagctctctgaggtctcttttaccaggaccctaatctgatttatgagggctccaacttcatgatctaatcatctcccaaaggtcccacctccatataccatcacattgggaattaggtttctacaaatgaattctacggggacacaatattcagtctgtagcaaagtgtttaaaaatttctgtgaactctaccacccaaatgaagggttttagtgatagatcaccacaggattttgctataacctataaaacataaacaaacacatgaacaagcaaaaacccaacacagcatcatttactaatgtctgaagttgcaatacctgagaagtacttttttaaaaaaataacagtttcctatgaaatactagggccagggccaagacatatttagggttccagcaactccttctcttccaggcagtagcaagaacaaaatgacaaaacaatttccattttagcacacaggacatttcytccatttgttgtttcgaaggattttatattttttaaagcaaggtgtgcttagcctaagtgcttacagagaaccttcaaataagttttggttctaaagaaatataaaggctatcacttagaaaagtgctactatgcaggcccatcagttgtgactggatcatggcaggagaatgaacgtctcttgaaacacgacatctcaattcttggctgaatagtggtgacatgcttggtgacgtgacaataactggtattcatttggtcataatgaataatagagaaaaaccattcaatgtgttctgattagtcatccaaatgatagatatagatacagatatagatatagatatacatttttttttttttttttttttttagatactgagtctcgctctttcacccaggctggagtgcagtagcacgatcttggctcactgcaacctctgcctcccaggcttaagcaattctcctgcctcagcctcccaagtagctgggattacaggcatgcaccaccacgcccagctaatttctgtatttttttagtagagacagggcttcaccatgttggccaggctggtcttgaactcctgacctcaagtgatccacccacctcagcctcccaaagtgctgggattacaggcgtgagtcactgcacctggccaaatgataaatatttttaaagagccggttacatgcaagaagttgctgggctttatggtggggayaggaggaaagcattggaggtagttgtacaaagatgtgtgaattatagtctaggtcttgaagaagcatactctaatggagagaaagcgtatacgtaaccctagcacaagatacaaagagtagtttcatacaagagtgcaaaatgtatggtagttcagaggaataagaggtcattttaatttggggaatcaggaaagagttaacaaaggagtgggtgttgtgctgggctttgaaacctggttgtctttgggcatgtagagtaaggaggaattcatagtccaggcacagcagaaatcaacgccaaggcccagggctgggtaaatgtaaggaacataaagaggaagatagggaaataagactaaaaggtgtaaccccaggtcaaaggaaaagggaatatagtatattggaaagattgttgacttagtttaaaatggggatgatactctatttactagtttctaagattcacattatttttttctcattttagtgttttttaaatcaagaaaaatcttagcatgtatatttaatgtaataattttttattaaaaagagattattgaatcaatggaatattcataattgatagaaatattttaatatttcatagttataaaattgatttcattttcaaggatatggtataatacctactttataagctttttggagaaataagtaaaattatatatgtaaagcactggtcacatagtgggctcaataaagttattatttttatagaaagagagttgaattaagtttgacaggcaatggagaactattgaaggatttcaaaaagaagaaaggcaaatcaaactgggtcattaaaatcacctgccagtaatrtaaagaattgatcgagggatggaacctatctgggacactactacaatagtctggaaaagagttaatgaggggtaattgagggggagaacttatgaaagtgaatggcccagctttcccttaggggtgctgttgacagggcctgccagctgatacggtacagaaaagggagaagtggatatgattgagagaactgtgctattaaccgaagtcaaaggtacgggaaaagaaacaattgtggaaggaaatggatatgtttgatctgggaaacactgaatccaactccagatggagattatccaggaggcatttagaaatctgtaactttggcaaggcgcggtggctcccrcctgtaatccactttgggaggccgagaaaggcggatcacctgagctcaggagtttgaggccagcctggccaacatggtgagaccccatctctactaaaaatacagaaattagctgagtatggtggcgggagcctgtcatcccagctacatgggaggctgaggcaggagaatcgtttgaaccctggaggtggaggttgcagtgagccaagactgtgccgttgcactccagcctgggtgacaagagcaaaactctgtttcaaaaaaaaaaagaaaagaaaagaaagaaamagaaatctgtaacttcattctragaaagagatggaactaaacatgtaatattagagtcattttcatttagatggtaattgaagccttggctgcagataagatttttaaaggaagggaatagtkggggaaaagacaagaggttgaagaatggaaactctagaggaaaacaacatgctgtagataactcattgaaaagaagtagggggaccagaaaaagaaggatttgaacgtttggaacgtttctccaaagagaaaagaaaagctggccaacagtgyagagtataattgatcccgcaggcacacatttgtgagcataaacacaaattggtaggaacagaaacctctttctttacacacctgagttgcccttgaatctctcttggcatttgactgccatctttttgctgctttcacttctttcctttctcagcaatttcagagccttttcattttgacctgcatttctgcggttgctttagtagctttgagttgttcttttttttttccctctcttgcctgtgaacttktgggaaaatgcacagcacaggcgatctgaggaagccccttagggtaatccagcactgatgcttgagaatgtcagagaaagaaatgaaactgagcccacctgggcaaatcattgaggtaggcmccygggtgttccccttttagggcaatccaacactaataataatgataccatatggtttaggatcygartacagacttagcctgattcaccttgaagtttcttggaaaaggtgctgccacctctcacatagaactttcccacttctcagcttttggtactatcctgatgtttctcttttcatgttrttttatgcagtaattatttctttccataccataccattcagggtccttgaatgagctcatgtccactaaaaccagcttaaattttgagaaagttcctgcataacttatgttgaatgcattatatacttgcagacagtggnagtcttgtatttgtcgtaatcacattttcatgtgataatgtattatacatcaatagcctgttggcagtgcatttagttctagtgtgggaaacttgtaggaacagatcaggtatggtttttattttcctgctgatgaggattgtgatgtctacattcagtacaccctgaatgcctgactgttaatgtgtsggttttaagtgtaaaagcagaattggctttaccaaggacaaagagaacacttatctgcttagtgggtttttttgttttttggttttttgtttctgtttttataatgattttaataacttttaaagtgcacttattaactaaatagaattaatacttgtaaatgagaacaattaaaatatgccagrgtcctaaagattataatttactgagtctgggtcaaaacttgggcatcttatttttaagaagcttccctaattctctaatgtactttaaagtttaatgattactgtttgtttgaaattagttagaaaacttagtataagtagggaacttattgctattactagtaactattgcacagttattcctaccctgcaatagaacaccagaacttattcttcctgtctaattgtaattttgtgactgttgaccaatctcccctccccagtgtctgataamcactgttctactctctgcttctgtgatagcaaycttttttttttttcagattccacatgtgagtgagatcacacagtatttgtttttctgtgtctggcttatttcacttaatatgatgtscttcaggttcattcatgttgttgcatrttacaggatttttttttattattattattatttttgagacaggtcctcactctgtcacctaggctggagtgcagtggtgcaatctcagctcactgcaacctccacctcacaggctcaagtgatcctccgacctcaacctcctgagtaactgggactacacgtgcatgtcaccatgcccagctaattttttgtatttttttgtagagatgaggttttgccaggttggtcacgaactcctgagctcaagcaatatgcccacctcagcctcccaaagtgttgagattacaggcatgagccactgcactcggctattcttgcttgtgactgaatagtattccactgtgtatatatatatacatacacactgtgtgtatgtatatacrtatatatatatatatatatatatatatatatatatatgccacattttctttatctattcatctgttgtttgacataggttgatttcataacttgactattgtaaatagtgttgccataaacacgggagtacagatatctcttcatcataactgatttcatttcctttgaataatacccagtagtgggatttctggatcgtatggtaattttctttttaattttcagaggaacttccatattgttttcctataatgactgtactagtttaggatcccaccaagtgtgtaaatgttcccttttctccacatccttaccaacactgttttcttttgtctttctggtaatagccattttaactggaatgagtagtatctcattgtgtgtgtgtttttttgttcatttgtttgtttgttttgctttgtttgtttgttttgagaaggaatcttgctctgttgccaggctggagtgcattggcgtgatctcggctcactgcaaccttcgcctcccgggttcaagcgattctcctgcctcagccttccaagtagctgggattacaggcatgtgcccccacacccagctaatttttgtatatttagtagagacggggtttcaccatgttggccaggatggtctcgatctcctgacctcgtgatccacccacctccacctcccaaagtgctgggattacaggtgtgagccaccgcacccagcaggctttttaatttttattatttttttatttttatttgagacagagwttcactttgtcacccagtctgaagtacagtgatgcaatctccgttcactgcaacctctgcctcctgggttcaagcaattctcatccctcagccttccaagtagctgggattacaggcacgtgccaccatgcctagctaaggtttcgccatgttgcccaggctggtctcaaactcctgagctcaggtgatccgcccaacttagcctcccaaagtgatgggattacaagcacaagccaccrcacccggcctcgtggttttgatttggacttccctgatgattactgatgctgagcatttcttcattcacctgttgtccgtttgtatgtcttctttygagaaatgtttattaatgccttttgcccatcttaaaaattgggttatttggacttttttgctgttgagctaagttcttacgtatctgaatattaacatcttgccagatgtggagtttgcaaacgttttcttcccttctataggtagtgtctttactttgttaataatttcctttgctgtgctttgctttttagtttgatgtaatcccattttctacttttgcttttgttgcctggagaaatgctttaaaagatgggcagatttctctgaaaatttgcagaagaatggagaactttcagaaaactgaaaaagagccaatatcatatctatatatttttgaaggaatagaagagatccaggcaactgtgggctatgtgtttaatttccattgctgaaacatatatacaacactggggatagtctcataacgttggtttggtaagtgagcaactgttctccaatcatacttaggcagagcaaagggaaatgggctgaaactagaacgtgcgggatttaggttagaatgtaagagttttatgactgggaggaatattggaacaacttcctaagaagcattgtgcaacttctttctctagagatctttaaaaatacgatagattttcatgtctggtttaaatctggtgctgcccaaaggtgaaagaaagccaaagtgttttattttatgccccacrtatattttgaagaattttaacatcrattttctcatttcaaatgttgtaaaccaaggatttgaaktaygtaatggtatcactaatttttaaaatatcctttcaccttaagtgaattttgctttacaaagcagtgtatattygtttgccttaagactttcatctcatttccacgggaaaaaaaaaaagaattgctaagcacatccactcccacgccacctccttttcttctttttctttggtacactgtgtttttggtcacrtgtatacacaacaaagttcaaataagtagtcacaggaayctttactgggaggctttggcaaatcaaatatatgctatataatatataataattatacrtggagaaaagaggcagagggcccagaagctcttggcagctgtgctgtctggttagaaaaggaagcaagttacagagtttggacattcagttctgagatgttattcctgagtcaacaggattttaattatgtatgtggcctagaagagacatttatgcaagaggaacatattgttrttgaacrtgtttgtgattttactcatgattcagaattggaaagaagctgaaagtaatttctgaaggtacatarctgaatkgaaggaacatagaataatgatacctctcctagtggcagaaaaataactaatatcttggcttctcatttcarcttcctcactcaacacactctcttttcttttatagttatatttttcaaaaaagtatgtgtgtgtatatatatatatacattttttttcacacaacactcagacatttcaaatcacactatttaggcagaaataagggatgtgttaaatattacttcatctttaaacatctttttctcctatcctcatgktgaggtcacttcaagttagagttcttgtttataagttcatggtgtctttgtgtatattttagggtagtttttgcaagaagttacaaatttactgcactgacgtgagaygctacatgagacatggaaaggctattctgaattgtggcagataacttcygtcttatggatagattaggggagattacggagcctgtaraatgcaaagaattgagcttttctaagagtaagtttttcttcctgtgactcctttcattgattcattcactgattgattgattgactgattcattcactcattcaatatttactaagcacctacaakgtgtcagttctagtattaatgcctcagcagacctatcattgcccacgttttgttttaacttacctttgtttaatttaccttctccaccgccatccaratatgcagccataatgacattttctgcttttaatagctaacagttattgaacacttaccagacattgtcctaagggctttttgcacattgtcttatttaattttcacagcaagcaaccttatgaggtaggtcttattagcaagctcatttaaataggaaggagccaagtagggcagaataggtatcttgcactaggtcacatatctaattagtgagcccatgctrtgggactctaaggctttgttcttgtacagcctcccaggattatttattctgttttttttaagcttgtctttaggtgcaaattctcaagttcacctctttgcctcattaaattatcatttttaccttctgttttcatctcttttacctccttgaaaatccatctgtacttgtatttctaagaaaacagtaaactaattgaagctccagttactttagattttayaatactttcttggctggstgtggtggctcatgcttgtaatcacactttaggaggccagggtgggaggatagtttgaggccaccctggacaatatagtgagaccccatctcaattgaaaaaagaaaagaagagaaaaaaaatactttcttaaygcaattttgattttctcttaaagccttttaatataaccaaatcaatgtagcaatttgtaaaggttaatgtaaaataaattattttagtatataaagagattttccctctaatgtctacacgstgaaaattaatacttggtgtcttgagtaacttaaaaatatttaagaccctatgaggttctttggtgaagggacaaaaagtgcagaatgtacctaagtgagttttctccagtttagtaaaagattwtaaaaccaagtcttcagcaaacctagaaatgacaactatgattttataagtatgagaacaagaatcatgtttctttaatgctagttataccttccaaaaaaacttccttttaagttgagccagatctgccaaaccagcgtatcatcttggagcaattaaaggtttyagggtttcccctctagaatcttatttccagttgacagattttgaagcttccccaaggatgcccatttggtagatgtcatayactttctaatgaagggttgcaaaaagcaartgatcactttgttaaaacctgggggctcattttggctttgctctgtgaaccccagagttagcatctaaagtggcagaagacacttaaaagagggattctccccttcatatgctgctccaccatttgctagatagctgtgtggtcttgggcaagttacttaaaatcctagtgccttctataagatgggagtaacaacagcatccaactcataagttgttgtgaaataagataatctaggtaaagcacatggcagagtgcctggtccataataaacatgcaataaatgttagattttattcatcgcaaacgtggtgaaactgaaggtgacttgtsttgaactcaattcttttagaaaaccttcatagaatttgatactcacattgtaattcatagctttgtaatactagagacttctaggttttttagttactgaaagcacaaaagattgtttttctttatagggatgttagaggaaaaattcactttatattctgaaataatttacattarcctttacaaatgtgttatattgatttggtcacattataaggcacttagagagaatcaagagtgcagatggacaggtcttgacacrtagcctctgcaaccaggagacaggcagaaaacagactatggggtctctaagacagcaggtagaataaaaaggcatgaactctggattgggagctggaggtgcctggatcaacgggaggaagttggtttggtgattcccaaattgcattctccaaaattgttagctgtggtaataggcatgccctacaaataatgattacctagtcaaataggcttggaaagtcytggtttaaayatggttaactgccttaatttattgtagaaccactcactattcagtagtagtctaaattccagccctgcctttttctagctgtgtgtgactttaagcagattggttaacttcttcagcctctgtttccccagttgaaaatgggaatactaatagtacctacattgttttattatgagccaaatgagttagaatttggtgcctggttcacagtaagcattatacacgtatcggcctttattaatgtggtggaagaagcataggaactggtatcatttaatccctctatggactttgggtcacaaacttgacatcttaggggcactaataattgtctgtacaatagggaaaaaaatacccacttccctggctcattgtgaggaatgtaatacacatgagagatattcgaaatgttaagacacagtgcagtgtgaaaagcacatggtaaatgtataataaayggtaggtcttgttattccccaaattatcccrctattattcactaaaatacatgaacactgggctgatagcagtgtgaratatgcacaaactgaatactgtatctatagaatgcaacctgtgtattgattgacacgtggagtagcctgagattctaccctttttacattatgaggaaacagcaagaaagagtagaaatggacctctgtcaagggcctctatgtctcagatggggttaaatgtgtagtatgtttaggcctaagaagtcaggattgaraggggtagaggcacttggatcatggggcagamgtaggtcctggtagtcccaaactgttaactgtgagagtaggcattatsttcaaataaggtttcactagtcaaataaatttagaatgccctggattaaatatcattaaatgactttctttattgtatatacactcagattctttgatacgctaatrtatacttcaatttcaattcactttttttttttttttttttttttttttgagacagagtctcactctatcacccaggctggactgcaaaggcacgatctcggctcactgcaacctccrcctcccaggttcaagtgattctcctggctcagcctcccaagtagctgggattacagacatgtgccaccatgcccagctaattttttgtttctttttttagtagagacagggtttcaccatgctggccaggctggctttgaactcctgacctcaggtgatccgaccgcctcagcctcccaatgtgctgggattacaggtgtgagccaccatgcccagcctttaattcacattttgaaactctaggaaaaagatgtggtttgcagcatttcccaaatgagtccttttcttttttcctcataaaatggcttagaatgcactttacraagaactgaccaagggcaattgtgtatccttcatgtttgctttggtcctttgttctcccaaaaggctgctaatgtcctgctttacgatttggactttttattatcagcaggattcagccttgacttgtttctagtgatgaggcagcacatttcaacctgtaacattttgaactgtatgaaattgctgatatttgaacatttttgacctactaaatgacaatttcatgtggttcaaactaatacttargacrgtgacggcaartgccatttgcatccacctggttcaggtactycttccaaatacytgaaggaggatgattagtatrtggggactggattctcccagtttgtacctccactgagcaaatatttatggaacgyttactatatactttggaccatgctgtccatagcaatttacctgtaaaatattacctccctccctcacattttatcagtgaaatacttgttgcaaaaggtttggagraagataagccaaaaamtgacatctgaatatttttttcagaccctgggtaccaccagctctgctatttctgggttttccaaatgcgtgggtcagcagtttccaacccctccragatgcccagggtccttcccacagagctgtagctgtcatcagacactggtgggagggcccgggaagtaagctccctgaagagtacttggcacctgcttcacactgggcaaggtgtaaggagaaagctgactctgggatgggtctactagttaaagtggtgattaatttaacattcatttacttatctattccttccctcaacacattgttatggagtgaccagaaaatgtgcccagtaactgtgytagggtagggacgcaacatcgaacaggatagcaccctgcctggcctctgccacccacaatctaccacaggaggcagaagtcagcaggcacttacaactgagtatggtgggcaattcaggygaggcaatatgaagaaagccaggtgggaatgggggtggaacggcatattgagaatcgtgtactcagaattccctgctcttggttggggagaagtttgtgcagtgcttctaccccacctgccactgaggaaggggccagtccaaaaaggagattctcaaagggtcattcttattagaacagtctgttttgctgtccagggaatctayaytgtcatgtgtggagttttgaaatatatatttctcagtctcaatttgtaaactctgcaggcagcatcaagaaaaggtatggataggcccctattttaatccagctcaatatgcaaaaatttwtacttataaaccatacgtgttaagttggaatacatgggatctactgggttctgaccagtccatcagttttaattartgagtgaaggacctctgaattagagtcaggattcacattacagaatgattcttcattttcacagatgtaatcaccacaaagtttctttaaataattaccctttttttggtaattaatatccgaccctatcttaaatgttaaatttacacatccmwtttaaggaaccatcaagtgtccagagcctgaatctgcattcatcctcctgctgcatatggccttcttagaatagtctcaagtgagcttgttctaaaaccagacttttaattctgtgctctgttgcccaggctggagtccagtggtgcaatctcggctcactgcaacctccctctccggggttcaagcgattctcctgcctcggcctcttgagtagctggaattacaggcgtgtgccaccatgcccagctaatttttgtatttttagtagagacggggtttcaccgtattggtcaggctagtctcaaactcctgaccttgtgatccgcccrtctcagcctycaaaagtgctgagattacaggcatgagcctcattatcttttctttaaaaaaaattggatggggtataggaagcttaaaggaaggaagtagcytaatttttaagtttgaaaagttgcaaaaaatgttctttaaaaagcaaagaagggattgcatgtctgtcttcctctttaaaaagttaatattcttcagaatatgataatataacaacagttatcataactaatgtaagtaaaatatagagtccttttattagcamccttttatttccttgaatcatttaaaatcatacccatattattgccctataatattttatttactttmatacaattatgaaattttgcaaaggrcttggtaaagcagtattttccaaactccrggtcatgacscattggtgagtctggaaattaatataaattttatacaaatgaggtaatagaatggaatagaaataccagaatgcatcacacttggtaagggtagattttgttttgtgaaattttkttttatatacatttacacacatatacatgcatatacacatatatattcacacatatttatatgtgtatacaaataacatataaacatatacatgtgagtgtactaactcactgtggaatgcagacaaaaaatttaagaaatcctaaaatgaagagttcaaaataaaggtaaaatgtaaataaccatattacacaataaatatgattttaaacactaaataacatttgttaaaacaatgccttcagctttaacaaatttacaaayttgtttaataaasaaaagaggcatggaggcaaaatgtactcccatatgtgtataygtacatgcatacagacatctacccataaatagaatttttaaaamcttcaaatatatttaaaacctttaaaatgtaattcaaaatagaacttcygattccatgaatagcatttgttaataatataaagtaaaagatgcaattatgctgatattttcacagtgttcattcattcatctactctaagctaaagaccaatatgaaaaaaaaattgcagggagttgctyttttattttaaagtttataacctacttatatagtacctaccctctcattagcctgggatgagagtagacagtctgtgtgatgcacagaatccagaaggaaattctgaaactgcatctaatagttgcaaagagacaatcctatccttcattttaatgatttcttcctccatctctctctggtctsaaccagtcttgcctaacattatartactgcttttcccattcttcatcatgaaccataaaggcttcttgcaaactctcaaggctaaacacattccagacattcctttacacaacgttcctgaaaaggttrgtttcttaggatcctgcagcaacactgcctgcatggttcacagagaccagacygctgcacaagcctttcrctggcagacagccaatggtgctgcctctcctctcctctgaaagacttgctttactcacccagagtccatcaaactcgcttttcaaggggtagatgaggacagcaggatcctcagtaaagaagaatcacctagtgaggcagagtttccagcagcayagtgaagctacacataggtygtatatcttggtatgatgtgtatttgctttggaaagagrcatttaaacaaagttmtccttagcaaagtcttgcctccacygccaccaatccaggagtctcaaaattacttttaatgaattcaagaaatagaarttctaccctggaacacttattagctgcctttcttatataagtaattacaggacacaccattttcttcctttttcctattaacatwtccgattctgcctctcttttctccctccctccttctcttctcactttgtgtcacatacacttcatttgaaattctctaattctctttttagaccagggaaaatcgatatcaaacattccagggccagaggttttcaagaaagacaagacaaaaaccacagaacttctttcacatatgactgaatcccttcacactctttctggcctatgggatactcgttgctgagaggtttaatttgcctagaattctctttacccccttcttcccaactcagccccttctcttggtatccacattccttgataaatacagccaaacccagcatctttctcagaatcacaaaaccctagtgcaaggtctcacaattctcactccatgaaatatgagttcctggtcaagwgttaaaggctgtgatcacacacctagatccgggygctctgaccagtggagtttgtcataaggccctattctttctcagtgatccatgagacactgaacaaattagaggtgctctatattcagcatgtgactgactgccaawgaaatgaaactcagaacccaggggtacatcacagaatgaggagatgattcagaagctgagggatcattgtcactgcaaacrtatagtattagagagagaaggaaagctattagcttyaggaataagcctttttctctcctcgtctctctttccatgagctggggctcactgaaagtgttgctgaaatgagggaaagatgggcagcactttttcctgtagcacatacaggacacttayatttccatgtcctttgtcaccatatctgttagtaatttttctggatccatttaaccagacagccttctgacttcaaaatctgtggcagaattttcacatggccattctgaaacagaggagctcacctaaacaaatcctgtaagacacagtyacctaaaaataaccctagcaaattattgggagtaggaaatgaagcagagatagcaagttccyactgactttttaaagaatcactatgaagtgtttacaaggataccgcagaggactaaaattagtttattctgcacagcattatccactgctgactcaagatggtgatacaagcagtgttaasctgtgagctcaccyggaagctcattctctaaaattactctcttgcagggatagacccctagttcacattggtgaatggaagatggggtataaatagcaacttgttacgccatcactcagaagctatgtgtcctgctagtctccagttttgtttcttscagatgtaagagcctcctgatcagtctattgtctctcagtgttcaagggtatggagtgtgtgtgtgtgtgtgtgtgaatatcattctttcarttgtacaatacaataattagaaaacttagaagttaagtgatgtggtaaaratcatacagcaattccctgacacttaaaactgagtttttgttccyataatcttcaaagacttaaatgtactgaacctttgctgtttctcctatgagccagakgacatgtcctatcaactgagttaagtgtcaacagtcarctwgctagaaacatgttcagatatgtgtagggagagaagaatatgtagatayatatgctgtacgagtggattcttatgaaagaaaggttttctttatatttaagggcaagtttattagaattaagctgcatccacactctactccaagttattattttggttgcttcactcaaatagtcaattcrataaagaaaaaaaagtcagcatctccagcatttctacrtcagyccatagcctgtgatgttctctcttggtggccgattttgcatttgttttcatacctactatattttctatatttcatacctactatattttctatagcattcatttcaagacacaaacagatattctttaatgtgtgccagtcagtcattttgrttctaaataattctgtttctccrtaggtgcccattctttgccgctgacaacttycccccatctgcttaatccattttctggcttattaagtactgggatgatttcttcagtgacagaagaaactatgcatcactgatttcctatttttgaagccctggcatttttcttsttgggacactgcrtgcttcatttctaattaggcttttcttcttactcatatttggctttgctttatcaatacattacgcaaccagtaactggaaacaggatcccagagagtgccrcaagcaagcttcccagtgacctaggggaaagaaggagtattaargggtgagatggaattggagttgcaggcaagatgattatcargcttgatgatgtaatgggaagttgttaattttaaagcaacagctggattctttctcaggttgatagtagttctgttttgtagccagatgagtcttcagtrgaaacaatcccattttatcagatacagtatttcctttaagataggcttataccaaacatctttagagaaagccattgggcctattctgttgtacaaccagggttaagcaaaatgctccagaagtagtgttttttttaaggtcctattcaaacgcctccacttccatgaagtttttccagatcascccagctgagagcatctctccatcctctcaactcccacagcaccctgggataatccaagtaaggcacttagcatggagcctgtgtaaagaagtgttcattattattgtccctacctctttgtagtatgtatcatcttcctccttgtgtctccattgtgtacacaccacttatctcccccattaacctgtaagctactgaagggtctgatgcatcgtttttttttcccagcagtgacttgctggggaaaaaaaaagtacttggtaaatgtgtgtcgaatgaataatagatggttggccttctcaggtatctttgcatcctcatgcctgacatcagtagatactcaataagtgtgaggataatgaatgttcaatgaatggatataggcaaaaaattcgattgctaactcttttgaaaggctgccaragttcagcctttgtgttcatagagttaactttcctaatatccttaatgttaatgccaaagacaaccaacaatagcagctttactcctgaacccagttccyataaatgacatgcttgttatttaaataactagrcaactagtttcaccsacacttcccacatgaggagtaaaattattatrgctgatactttttgggcatttgctttatgccaggctctgttctgtgctctttcacacactcactcacttaattcttgctgcaatctattttaaagatgaggctctgaagtacaagaaggttaaatcccttgctccaggccaggctcttgctgaataccacattgtagccagagctgggctggagttgcagacaagttatggtttgatggcaccatttctccatgtttcatacaaaatgctaaaataagcaaataccagaattrgtccagccaagatgctaatgcatagagactttaatgtctgtctcaaatatacttgagctctcaactgttctctgtattgtaggtgccccaggtagagaaggggaggagggctgcaggagctgttacttggttgtgagcacagaaaacagtcacctagagactcagacttacttctrtttgtaaatatctgctctgctgcatcagtaggcgycmccttscctcatctacttccactttccgtttcatactctgatctcttccaggtattccctcagctttgmattttmcactttcctaccctccttcaactgcgtgagccctacaggccattcaagaagcaacttaaatggcctctgaccatctcagacaggtgttggtatccctgcaactcctcgtgcatcccacccccaacagctgttagtgttttattttgtaattgttggtttaattgtctctactgctagattacagtctcatcaaggatagggaccctctcttattcatgggtatcctgagagcccagcacaattctgggcacatagaaagtgtctcataatgtttgctgaatgaataaatgacrgtgttgtttgcatgtccataccactctgaaagtattacataaaccaacttcagggactgtgcacctccacatttagatgcccaagatttggcakgaaggacacagccaagaataactgattagagatgtygtttctctgtccctatataacagagagaaaatatcccactgttatccaatataagaccataaaaatgaatagtctttgatgaggaaaaaaaaagtaagcctgaaaaatgtgtggctggaaaaaaaatgttkcaaacagcattttatttttcctctgtggacttgtataaattatgtgtaaggcaaatatgtgatagagagatgcagtggtaattacttgttctcaaatgtttggttaactatgcctcttaatcccacatacagtagcttagcacaraattaaattctgccccttaggcagaattagcatttggaatttcttatttctgtagtttaaatgtttttatcccaatatttgtacttttccatttagaataaataaatgtactgagtgtgtgtggagaaatataaatagcatggaatttttatgattcaactcattgttcttattggtttgtggtcaatttttatgggtaccaattttttaaaaattactcacccataattagttacaggaacatagaaagaatcgctagaccactctttcttccaatgaatgtagtatcatcttattgccaataattaaagtctttaattttatgagggaaaaaataacttccttcaggctttgctctcaaaatgcagatatttcatgatacagtgttatatgaaataattaggaagaaaggtttttctttgctgccacttatagtaggaatgggaaaaaattgttgctctgattaactggggagtctactccacgtgagcggtagtactaatttactaattcatccattaacatctgctgtgtgcctaaaatgtgccacaaactgctatttactggagatgtaaraagagctaagacttggcctctgtccttaaggagcttacaaagaaatgggagacgtttgtataaacaattgcaatgaaacaagacaattcttaaatggaagtctatacaaagcacagcaagcctgtaggagaaggacgtgagccggatggggtaggagtgggcactgmggattatggattcacagagagagcatctgagccgagacctgckggaggagaaggaatttgccaggcagcacagctggtgactcagcgacgggggaaggcatctagatacaggagtgagtctatggagtctttggggttttattattagtagcaaatggcctgtgacccacctcacaastcacagaaacacatcagtgaggcaatccgtggtaaggctctcttaygaaggttttcagcatagcagggatctttcagattggccattaaagacagcatgagttcacwctggcggctgtatggtggagacagcatctagaagctgccacagtgttgsggcaaaatgggatgagcccagatctgaaacaacactggtaagaatcagggtgtggagggcaataatgaggccaaagcagtgggacccggtgatgaaccaggcaggtcacaggtgccttgggctgtaagccacgagatctggacggactcaagtttccaatcagtggttgtggctgtctgcatcacccaaaatagaacatagrttgagtcttgcactcaaactaacttgaaggcagaatgatgaatagccggacattaaagtactgtgatgacatgaagtgggayattttcaaaatagakgatcctttctgggggaggatatttgtctstgtcgatctattaaataactgtayctggccctggagaggtaacttaacactttcagcagggaaggagctgaggctgactcwcagctctccatcrgcatttcccatttttctttcaaagcagttcataaataccttctttatgctttacatttttactgtggagccagcgaatgtataaggaagaagttgattagtgtggttaatctacctcttctatttaattgcatattgacatattcctgtgtttatgcccataaaattcctgtatctgcttttacagctcttcagaatttcagaaggaaatctgttccaatcacactgaactcctattgtcccctgcgttcagtaatgaggtcccttctttgtgcctcggcacagtccattttcctatctgaattgttccgtcttagaaatccatgaacttcttcatattctggctcaaaattaaacttctctgagacatttagtcactattccaattgctgctttgttttttgacatwtctgaactgtattaactttgcatataagtgtctacttaagtcttcttaaacatttcatgtacatattttgggcattttcaaacagtatcatccttaacctagtgcaactgttcaatagatgacaaccttaaccaatggacaagtagtagaaatacatttccctgtctgccctagttccatgtctayctttaaaagtttagaactttttctagaacccaaaatatacgtgccattaggtcagcatctctatttctgacttctaagtacagttctttgaacaaatattcaaaatattttatatgcacagaaaagtacaggatgtaacacagcagaattwaaaaaggtaaatatcttgtaccatgtttcagatattttayttttatgaaaaagattaggagctaagctatgaggatgcaaaggcataagaatgatacagtggactttggggattcagggggaagtgtgggaggggagtgaaggatataagactacacattgggtactgcttgggtgatgggtgcacsaaaacttccaaaatcaccactaaagaacttataataaataagtccaataaataaataaataaataaataaaggggraaaaaaagaatgaaacattacaaatatagttgatatcctttttgtagtcttcccccatgccgtttacctccttttattcctagaggcaaccacaagcctgaaattgatgcatttatttcctttctctgttcctataattttactaaatatrtatctttctgtgatcaatatattaattaatgtttgtgttttaaaattttacccaagtaatatctttacacatatggattttgttattttctccaacttcagaatctctgtattttgataagcagatgtgatcttttatrtttattgtgattattgataagtttaagattgtttttagcatttttcttagaattttttatttattgaaatttttcatgcttttcttcttcttttttgtccgtgtaagtaatcattttaaaattcctttttgtttccacactggtttggaaaataaacattctatttgtctttttagtggggctgccactttaaatatgaaaataaaayttacgcatyatttttaaaactccaagtctgtatttatcttctcagtcttaatctgttgatattcatccgttttttccctaagccaatgcaatgatccttggccaggcacggtggctcacgccacggcgggcggatcacgaggtcaggatatcgagaccatcctggctaacacggtgaaaccccgtatctactaaaaatacaaaaaaaaattacgccggcctggtggcgggcgcctgtagtcgcagctactggggaggctgaggcaggagaatggcatgaacccgggaggtggagcttgcagtgagccaagatcatgccactgcactccagcctgggcgacagagcaagactccgtctcaaaaaaaaaaaaaaaaaaaaaaagatccgtctttcctcgtttcttcttgttttatagaaaaatggttatactatatgcactcttccatagcttactttgcagttataacttttgaatatccttctatgtcagtaacacagttctatctcattctttctaatggctacatagcaatgatgatgatagctaacattttctgagtaattgctatgtgctaagaactttgtctcatctaaaagtcacaacaattatatgtcaaaagaagccccattttagagatgaggagcctgaggcttagagaggagtggcagatagaataatggtcccccaagatgtctatgtccaaatccctggaacctgtgagtttatcttacatggcaaaagggactttgcagatgtgattaatagtaagaacctaaaaatggagagatcatgctggactatctaggtgsacccaatctaatcacttgagtccttaaaggtrgagccttttccagctgggttagggagagatgtgatggtagaagcagggtgagagagayagcagcctgagaaggattcaccaccctgtcgctgtttttgagaggtcgacatttatgtgcagggacaagcaagaggcctctaggagctaagggcagccctcagctaatagtcagcaaggaaagagagatctcggtcttacaaccacatggaactgaattctgccaacacctgaacgagcagggaaagggattttctcttagactgtacaggaaggagtgcaaccctgcccacccactgattttagttcataccagacttctgacctgctgaactgtaaaataatgtctgtgttgtttaatgcccataaaattgtggtgatttgttaaggcagcaatggaaatgaatacaagcagccacaactaataagttgtagtgaaatgggagctcaggtagtctgattccarggtgcatrtatatagctaaatcagagtttatttagccagtccattactggtgggcattaggtggctttcaaaattaatagtttttaagtatcacttgtgccacacatctgttctaaaaatgctatatttcttcaacggaggctagagcttctcatgtgcacaattagatactttatgaataacatctcattaattttgaacgataggctgtccaacagggccctggaacccagctgttgaaagaaatcactgattttaaaaaattaatgtagcagccagctcaaacatgagggcccagtgagtagccagcattttatgggagtcactgatgaagggtctcatcaggatgtaatggcacaagctcgtttctccgagggcgctattctgtctttgtttctcctgggggcttgggctgcctttgggagccttagtgtcttgggactcyagaaggtgggtgatgtgtagatatttatttgtgatgctgtgatgcctttcagcactgtctacttggccttcaaaacctttgctttagcttctgctttggaaggggaaaggacttcctttgctttagggactatcttgaggaaaaagctagaaagtggctttttctactcctggcttgcaccaatattttggtgagcttgcagatctggtagcatcctttcttttttcccatgctctttcctttgtttcagaacttccttttattctactgccttggaaatttttgttttctccttcagctgtgatgttaaataattagaggtgtgaaaccctttgactcaattattaggcttgttttttgtccttgcgctcaactgcttgatcctagcacgttgcagtaaacatcctcttggttgtgaattggaaagatgtcaagttaaagaggtttgtctgttgttactttatttttgcttcattttacctaagaaacaagaatggaaatttgaattctgataaattttagagtgttatgatgaataataacacctcctatttattgaacacttactatgtacctaacactattaatttttcagaatgctttcamttatttaagtcctcagggctgttctgtggtaggtgctctgttatcccgatttcactgttgaggaatatgaagttttaagaaattagacaacctgctcaaggctatatagtagtagaatgataaagctgagatgcaaacacaggcttgtttggccagtctgcactcttaaccactgtactataaygttccttggcatttcaagttatttgtaagcaatgcttccaggaacattttttaaccagaaaaaactaaacacagaactacttagttgtgtagaagcagaaagaacactgggataagagtcaggagatggagccctagctgtgtgcctaactagccaagcaagtccctgaaccaatcacttcactagccccagccctgtgcttttctcatctgtaaaagtgccaaacttctagcatcctgaacaaaacttgatttcctcttctttagtttttcctgtactaaggtagatgaaacccaccattcccatatcatttatgacaactaaggctggtatcagatgaggccrttggcatagggctacttgtccagaaaaaagagggaaaatgcaatgattaaatgccacccaccctgggcagaaagcaaactaagcgtaatgactcaaatccaaagcctagaaaatcttggtggaaacagggtggatatattcttctatcttcaattttctctgtgtgtatttattgttgaccatagaaatgtggataaacatgtggctcaccattaaccatcatctccaacttgctaaagctattgtggagtaataataccaccaaactttgtccagctagaaatgagacccagccatagagaagacttcctgagtttctcaagtatgtatctgttctatcacatagcttttttctatcccatgtgttatgggctgaactgtagtctccctagcaaattcatatgttgaaattctaacccccagtacctcagaatgtgactgtttgggtatagggcatttaaggaggtcgttaaggtagaatgaggccatacaggtggtccctaattcactatgactgttgcgcttagaaaaaaagtggattaggacacaaacaacacagaaacaaaagggtgaccatatgaggacacagcactaaggtagacatccacaagtcaagaagaaagatctcagaagaaaaccatcctgtcgacatcaacttgatcttagccgtctgttctctagaactgtgagaaaacacatttctgttgtttaaactacccagcctgtggtattttgtaatggcagccctagcaaactcatccactatgttttaaatccaggttttttttttaagtttctctttttttttcagaagtttctaaccttaattttaaatttgtttttctttcctcctttgcttgagctagatttctacaccctaagaagtcatactcaggtttctaaattcatccacatactggagtacaaagattccacaaattttaacagtattcgaagagtgctcagtctttgagatgagtcttgactggtactttggatataacttacattttatacctctgtaaattccttttcttattgctcacctgtgtcagttctcaaatagattatttaattttataacaaaccaacaaataaaacaaagcactgaactatgtaaaactgacttctcatcccctacccctgccctatgaatttttctctttttcttactccttaccttgggtaaaatggcagcagcaacaccatgaacccaagttcaggttctcaaactgggaacttagggactcattcttcattctttctttgtccttgcctcttacatttaactcattattcaaagtctgttcatgcttcttttaaaatgtctaataaaaacactcgtaattttttttttttaagagacaaggtttcaccatgttggccaggctggkcttgaagtcctgacctcaagttatctgcccgccttggccccccaaagtgctgggattacaggtgtgagccaccrtgcccagccaacacttgtaattttaaactatattaaatttgaattggcaatatcaatatggactcatgaattaaaaacatatatgtgtgtgtgtgtgtgtattctagctctgtacactgaaagaacatagaagcaatgatattcctctagcaatgagcaatacctagaacccagatcttggtttctactcatctttgtttattgaaacacagtaaacaatgttcctgtttacaggagaaatagctgattctaggtgttgagcatggaaaytacaaggtaagtttaggacattttgatataccaaggaagtgctcagcgatttatggrggcatgatacaaggacacaggggctagtgtgaaagggctcccactagccaaagtttggacagtttgaatatggctatattgattgcaaaacattgaatacataaaaattcattagtccatagyaatacccaaaaaagtgaaagaaaaggaaaaaaaaactaatttgccatcattggaagtgatcattcaataaatccttactctgacattgatagtaaaagggaaagaactaaacatttaccttgyctttttttttttttttaatgctttaagttctagggtacatgtgcacaatgtgcaggtttgatacataggtatacatgtgccatgttggtttgctgcacccatcaattcatcatttacattaggtatttctcctaatgctatcccccagctcccaagcccctgacaggccccggtgtgtgatgttccccaccctgtgtccaagtgatctcattgttcaattcccacctatgagtgagaacatgcagtgtctggttttctgtccttgtgatagtttgctcagaatgatggtttccagtctcatccgtgtccctgcaaaggacatgaacccatccttttttatggctgcatagtattccatggtgtatgtgtgccacattttcttaatccatggtgtrtatgtgccacatattcttaatccagtctattactgatggacatttgagttggttccaagtctttgctattgtgaatagtgccacgataaacatacgtgtgcatgtgtctttatagtagcatgctttataatcctttgggtatatacccagcaatgggattgctgggtcaaatggtaattctaattctagatccttgaggaatcgccacactgtcttccacaatggttggactactttacactcccaccaacactgtaaaagcattcctatttctccacatcctctccagcatctgttgtttcctgactttttaatgattgccattctaactggcatgagatggtatcttattgtggttttgatttgcatttttctgatgaccagtgatgatgagcattttttcatgtgtctgttggctgcataaatstcttcttttgagaagtgtctgttcatatcctttgcccactttttgatagggttgtttgttttttttcttgtaaatttgtttgagttcatcacagattctggatattagccctttgtcagatgactagattgcaaactttttctcccactctgtaggttgcctgttcactctgacggtagtttcttttgtcgtgcagaagctctttagtttaattagatcccatttgtcaattttggcttttgttgccattgcttttggtgttttagtcatgaagtctttgcccatgcctgtgtcctgaawggtattgcctaggttttcttctagggtttttatggttttaggtctaacatttaagtctttaatccatcttgagttaatttttgtataaggtataaggaagggatccagtttcagttttctacatatggctagccagtttccccagcaccatttattaaatagggaatcctttccccatttcttctttttgtcaggttygtcaaatatcagatggttgtagacgtgtggtgttatttctgaggcctctgttctgttccattggtctatatatctgttttggtaccagtatcatgctgttttggttactgtagccttgtagtatagtttgaagtcaggtagcgtgatgcctccagctttgttctttctgcttaggattgtcttggcagtgcaggctctttgttggttccatatgaactttaaattagatttttccaattctgtgaagaaagtcattggtagctcgatggggatggcattgaatctgtaaattaccttaggctgtatggccattttcacaatattgattcttcctatccatgatcatggaatactcttccatttgttggtgtcctcttttatttcattgagcagtggtttgtagttctccttgaagaggtccttcacatcccttgtaagttggattcctaggtattttattctctttgtagcagttgtgaatgggagttcactcatgatttggctctctgtttgtctgctaatggtgtataggaatgcttgtgatttttgcacattgattttgtatcctgagactttgctgaagttgcttatcagcttaaggagatttggggctgagacgatggggttttctaaatatacaatcatgtcctctgcaaacaggaacaatttgacttcctcttttcctaattgaataccctttatttctttctcttgactgattgccctggccagaacttccaacactatgttgaataggagtggtgagagagggcatccctgtcttgtgccagttttcaaagggaatgcttccagtttttgcccattcagtatgatattggttatgggtttgtcatagatagctcttattattttgagatacattccatcaatgcctagtttattgagagtttttagyatgaagggctgttgaattttgtcaaaggccttttctgcatctattgagataatcatgtggtttttgtctttggttctgtttatgtgatggattatgtttattgatttgcgtatgttgaaccagccttgcatcccagggatgaagctgacttgatcgtgatggataagctttttgatgtactgctggattcggtttgccagtattttattgaggatttycgcatcgatgttcatcagagatattggtctaawattctctttttttgttgtgtctctgccaggctttggtatcaggatgatgctggcctcgtaaaatgagttagggaggattccctctttttctattgattggaatagtttcagaaggaatggtgctagctcctctttgtacctctggtagaattcggctgtgaatccatctggtcctggactttttttggttggtaggctattgattattgcctcaatttcagaacctgttattggtctattcagagattcaacttcttcctggtttagtcttgggagagtgtatgtgtccaggaatttatccatttcttctasattttctagtttatttgcatagaggtgtttatagtattttctgatggtagtttgtatttctgtgggatcagtggtgatatcccctttatcattttttattgcatctattgattcttctctcktttcttctttattagtcttgctagtggtctatcaattttgttgatcttttcaaaaaaccagctcctggattcattgattttttgaagggttttttgtgtctctatccctttcagttctactctgatcttagttatttcttgcctttgctagcttttgaatgtgtttgctcttgcttctctagttcttttaattgtgatgttatgatgtcgattttrgatctttcttgctttctctagtggacgtttagtgctataaatttccctctacacactgctttaaatgtgtcccagagactctsgtacattgtgtctttgttctcattggtttcaaagaacatctttatttctgccttcatttcattatttacccagtagtcattcagaagcaagttgttcagtttccaggtagttgtgcagttttgagtgagtttcttaatcctgaggtctaatttgattgcagtgtggtccgagagacagtttgttgtgatttctggtctttcatatttgctgaggagcactttacttccaactatgtgctcaattttggagtaaatgcgatatggtgctgagaagaatgtatattctgttgatttggggtggagagttctgtagatgtctattggatctgcttgttgcagagctgagttcaggtcctggatatccttgttaaccttctgtctctttgatctgtctaatattgacagtggggtgttaaggtctcccattattgttgtgtgggaatctaaatctctttttaggtctctaaggacttgctttatgaatctgggtcctcctgcattgagtgcatatatatttaggatagttagctcttcttgtggaattgatccctttaccattatgtaatggccttctttgtctcttttgatctttgttggtttaaagtctgttttatcagtgactaggattgcaacccctgcttttttttgctttccatttgcttggtagatcttcctccatccctttatttcgagtctatgtgcatctttgcaggtgagatgggtctcctgaatacagcaccctgatgggtcttgactctttatccagtttgccagtctgtgtcttttaattggggcatttagtccatttacatttaaggttaatatggttatgtgtgaatttgatcctgtcattatgatgtttgctggttattttgcccattaattgatgcaatttcttcatagcatcaatggtctttacaaattggcatgtttttgcagcagctggttccggttctttctttccatgtttagtgcttccttcaggagctcttgtaaggcaagcctggttgygacaaattctctcagcatttgcttgtctgtaaaggattttatttctccttcacttatgaagcttagtttgactggatgtgaaattctgggttgaaaattcttttctttaagaatgttgaatattggcccccactttcttctggcttgtggggtttctgctgagtgatctgctgttagtctgatgggcttccctttgtgggtaacttgacctttctcttcggctgcccttaacactttttccttcatttcaaccttggtaaatctgacaattatgtgtcttggrgttgtcgagaaagatacttctcgaggagtatctttgtggtgttttctctatttcctgaatttgaatgttggcctgccttgctaggttggggaagttctcctggttaatatcctgaagagtgttttccaacttggttccattctccccatcacttgcaggtacaccaatcaaatgtagatttggtcttttcacatagtcacatatttcttggaggctctatttgtttctttttactcttttttctctaaccttgtcgtctcaattgatttcattaatttgatttgcaaccactgataccctttcttccacttgattgaattggctgttgaaggttgtgcatatgtcacaaagttctcgtgccatggttttcagctccatcaggtcatttaaggtcttctctacattgtttattctagttagccatttgtctaatcttttttcaaggtttttagcttccttgtgatgggtttgaacatcctcctttagctcagagaagtttgttattactggccttctgaagcctacttctgtcaactcatcaaagtcattctctgtccagctttgttccactgctggcaaggagctgcagtcctttggaggagaataggtactctgatttttagaattttctgttctrgtttttccccatctttgtggttttatctacctttggtgtttgatgttggtgacctacagatggggttttcatgtagatgacctttttgttgatgttgatgctattcctttctgtttgttagtttcccttctaagagtcaggtccctcagctgcaggtctgttggagtttgctggagttccactccagaccctctttgcctgggtatcaccagcataggctgcagaacagcaaatattgcagaacagcaaatattgttgcctgatccttcctctgaaagcttcatcccagaggggcacctgcctatatgaggtatctgtcagcccctactaggagatgtctcccagttaggctacacgggggtcagggacccacttgaggagtcagtctgtctgttctcagagctcaaacgcctggctgggagcaccactgctctcttcagagctgtcagacagggatgtttaagtctgcagaagttgtctgctgccttttgttcagctatgccstgccggcagaggtggagtctagaggcagtaggccttgttgagctgcagtgggctccacccagttcgagcttcttggccgctttgtttacctactcaagcctcagcaatggtggacacccctccatcagccaggctgccgcctcacarattgatctcagactgctgccctagcagtgagcaaggatccatgggtgtgggacctgcggagccaggcacaggagagaatcacgttgtctgccggttgctaagaccttgggaaaagcccagtatttgggcagaagtgtcctgtttttccaggtacagtctatcagggcttcccttggctaggaaatggaaatctcccagccccttgcacttctcaggtgaggcaacaccccgccctgcttcagcttgccctccatgggctgtacccactgtccaacccagtcccaatgagatgaaccaggtactgcagttggaaatgcggaaatcacccgtcttcagcgtcaatcacactggaagctgcagaccagagctgttcctatttggccatcttggcctakcttaccttgcctttttaaaaggaattttatatcatctacttgatgagggaaaatttatctttagagaagaatgccaatgaaggagtgataatatttgaaatttactaatttgcaactcccaatgaaataatcgattcaggcaaggatctttaatagtaaaagattattgcagaaccggttattcacacggttacaaagcatcacagaacatgtcacttcctaaatgtaaaaagtacaaaggagaagatctggcagtcaccactttaaccaagtgattgaccttagaatcactaatacgggacaaatttgtattatgttcctcctgatggggtacagatgaaattcatgaaatcatttattaagtattcttgccaaaagggcttaatctgaatcgaagtaagcttttaggcaggcctaacctcaaataaataggagttacagggaatcaaagaaaaatcaaattacaaagaatcctgcagaagaatctgaatttgagatattctacaaaacaactattttctttttattcctccaaaagtcatttttatgtggggagaaggactgggggagctgtcccaggttaaaagagactaaaaggccataacaacccaatacgagaacttcaaaggactcttagcttgataaaaacagctaaaacttttagaaacatttagggaaaacctgaatatgagcatatattaaataacatgggtattatatgatattaaggagctaatattaattttattagaaatgataatgacattgcaattatgtataagaaaattcttatttttaggagatgctgtttgtttgtttrtttatttatttatttatttattgtgatgcagggtctcactttttcacctaggctggagtacagtggcacaaacatggctcactccagcctcaacctcctgggctcaagcagtccttctacctcagcctcccaagtagctgggattacagctgcatgtcagcacacctggctaatttttgtattttctgtagagacagggtttcaccatgttgcctagactggtctcaagctcctgggctgaagcaatctgcttatcagccttccaaggtgctgcgattacaggcatgagccactgcgtctgtcctatagaagatgtatatttaggtgttaatgtttaggtgtgaggtgtaatgatttcaacaactttcaaaatatatayacacacacacatatatatatatttgtgtgtgtatggaaagataaagcaaatatggcaaaatagtaacaattgttgcatctacattgaagagattgtagagatatttattttactgttctttccaattttctagatgtttcatgttaaacaatttagaaaagaatttatgcctctaccccctcttcttttgtgcctctggaactcctttctatccccgtggtcactctctgactactgctcttcatcgcctcttacctgaacctttgtggtggcctcctatgtttctgtcttcagtctaaatgcctccaagccatctatccgaggcaccttcctaaaaatcagttgtcaccatttctctaccttgcttcactttatcagtagtcattcccttcctcatcacccacrtggtaaagtctgaataagcttagcaagcaaggccatccacacttttgcttcaagctacactgacatcacatccttgttcaaggtgttctcctactgcctcatagcctaagctctacctaggtcacaaactcaaatgcccgcatagagggctgggaataaaagagtttaagttgtgggtctagggtggactggggatcaggagccctgtctgaagggggcagctattacttgggaccaggtgagtgttgctgtgagaggatgtgggccaagtgtgaaatctttgtttccattaagtcagaaataaagatttgtatactaatactgccctattttaaatgctaatggtcatttatttttttaaaaaaactgctgcagaatgaaaaaattgtgactgcagagtaygattctgtgataacccatgggacttaatgctcactctttcacactgacctctttgtcattcttccttctctctccatggtgggaagactttctgcatccttttcctggtgaaatctggtgaatacttcaaaacccagcaggcaagaccattcatgttgccctgtcaggcccgggcagactgaggggctctctctttagtgcacctcagccattcatttttacaaccttccttctagaacttgtcacggaattacatatctggttgtttgtcttctcccactggattctgaatcctcatgattaatagccacattttatacatctttgtctcccctgagctgctcacagtgtctggtgtaaagtcagcgttcaatgaacatctgttggttaagttgcaggctgttaaaggtaatgctatagaagaatttaggacatggcttctatggcatccagtttaaaatgtattaaaaaagtctataaatcaattaaagaaaattttctatgattataatattccaagtaagtttctcttttgagatcatttgtctattgtaggaagtcaggtaaataagtttagttttaaaaaacaaaaatttctcaaatcaggattctttctgaccctttaatctcagataatgataatagagtattatttcaaggattcccyttctagcacaatcttgctcaagatcaggccaagaatatagacaggttcagtaaaccacaagtgctctaaacctgcttgaacctatgtaagaactgagcagtggggtgtgcactgaatcaaatcaccttctctcctcgggacatcaattcctatcagtactgtatgcacctgattctcttattcgtgtctttttcatgcctttctttaatgaaatactttttccctcttagcaggccttccaaaattcagctcaaaacttacttcttcctagaagtgtctgctatcacctgccttgattgttcctctgtattatattctccatttatctgtgtttcttttttgttaggtgtggcctactctggtgtaagacatataataagamtaattatgatattaagaaaaagataatacggttatcataatatttggctttgggaggccaaggcaggtagatcacctgaggtcaggagaccagcctgaccaacatggtgcaactctgtctctactaaaaataaaaaaaatcagccgggcatggtggtgtgtgcctataatctcagctactcgggaggctgagggaggagaatcgctttaatccaggaaacggaggttgcagtgagccgagatcacgccattgcactccagcctgggcaacaagagtgaaactccgtctcaaaaaaaaaaaaaaaaaaaaaaaaagaatcattgagggccattgttaaaagaaatagcttaccagacccctccctggaaattctgattcagtgggtctggcatggggtagggaatgaggataggtatttgtatttttaacaagtgccacagatagttcttattatcaggcaaccctgggaaacattgccatcatccttataagcttgggtttgggagcagactagtcagagtttgaggatgggttctcatgctttttagcgtatgtaacagtgggcaagtcaccatgtcctaagctgtgattttttcatctagaagaggaggatgataatcactgtctcagtgttgttctggggactaaatgactcatttagagcatgagcacttagaaagttccagacattctaagtgctcagcaaatatgtgacaatcatattcatattttgcttgcagtttgcttggttatgctactgtgattcaaaatctgaatgatggttttcttggttcttctatagcactatggtgacccaggagtgtgacccaggagagtgacccaggagattttatcacagccaaagactattgttgagagcctgctcatctctgccaactttttattgactcaataagttatcaccctttgttctctttaattttacctgtcatttccattgaattacagaaaggtctttgaggccaatgaccctgccatctagttttgttatacagtagatccagtatcctgtacagtgggctatcaacagagggcatgatctaataaaacacacatttatttcgtggagttatagagccatcatctcttacttaggttatgacagctcctaatgggtcttggagtcttgaggtcttatgctcttgcttccctacaatgcagcctacgctgcagccaaagcgatctttgagcaatatcatcacagcatgccagtctgtttgaaaccttccaatcctttccctgtatttataataaaatccaaactctttactgtggacttgtaagccctacctgatctgggctagtctgtctgtctgaccgcatcccctgtgattcacctcctggatcgttacattgcagcaatactgaagttctccctccctagactgaccttttcccccatcatcacctgccacttagcccagaggtcaccttagagatcttccctcatctccctatctcatgttttcctgccactatttcctatcccatcttcctgctttattttcttctcatcacttaccactgtccaatattgtacttatcagtaggtgatgttagtttgtgtgtttattggaagctccatgatagcaggcatcttgtctatcttgtattccaagtactgggaacagaacctggtaccttcatgggcttagtagatagatagatggatggatagatagatggatagatagatagatagatagatagatagatagatagatagatagatagatgaactttaaagaacatcagccgggtgcagtggcttatgcctgtattctcagcactttgggaggcccgaggtgggtggatcacctgaggtcaggagttcgagaccagcctggctaacatggtgaaaacccgtttctactaaaaatacaaaaaattagcctggtggcgcatacctgtaatctcagcaactcaggaagctgaggcaggagcatcgcttgaacccaggaggcggaggttgcagtgagctgagaccacaccattgcactccagcttgggcaacaagagtgaaactccatttcaaacaaatgaacaaacaaaaagataaagaacatctatatagtctaatatatttcaacttttttaaagcaaggaactcttatcaaacaaaatgtttgtttttaaattattaatttggttgttgggktttttttttaacttatttcttgacaattaataggattccatacacataaaaagttcttagcaaacacttaacaatttactgagtccgtgttcaatgagatccaccaccagggggacatcaatccactgactggtagctatggatagtgagaaaatctggctgaaggagaagcagatctgactccmggagacaaaggcaggcagaggcmccgagtgttctggtagtgtgactcctccagggcttccccatggctctgcagacagaggtggtaggaggcaggagaggcagggctatctctggagaacccagaagagaagcagcaaaagaggactctttaatgcaggccaggcttcagtgagaaactgcctggcctggagcagccctgtaccagtggctgcagcactgcagaaacaatggcagtggtggtggcggyggggataggtggaagcagcagtggtggtgatgccacaagaaaaacttcttagggaggtactaagatgggaagcagcctcttaccaggctgaagccagagggatctgagaagggggcaatgatggcagtgacaagcaagggacagcaaggaggtcctcaaaagtgtcacattttcccaggagaaaggaagagattcaaagaactgaaattccagcagttgagcatgtgtgatctcagtcagagccactggctttgttgtcatttggttgtgtttacttttcagtatcattctcaagaattaagcaagataacatgtgcaaagcatctagcagagtgcgtggggtgtagtcagcaaatgtcgtttcctctcgttgttgggcaaccaccagtagcaccatatcagaattaaaggtgaatagaggaatactgtgttaagctctgaggaagaaacaatgataaattagacattgtccgtgtcttcaaagagtttacaatatggaagtgacatgatcgttcaaaaggcagaaagtgcaaagtgctgtctgaagcagtgccaataaagtgttaagtatgttcatatatacttatacctggcataaattccagcgtagcagactggataagctttatggagaaagtttggattttaaagaatgaatataatttaggcatgggaagcatggttaaaggataaagaggaggagaaggtagtgaaagaataataagaaatttaggaggaaaatcaagattagagttctaaaaaccagggagaatttcaaacaggagatgatgagcaaaagtatccagtgtgaaggacttctgcttctggctttgatgaagttactagtaccagccctcttgccataaatagctgtaaaactggacaaaatatatggagcaactgttttcagacgttgaaattcacccagtgttgaactttgatccctgggaaaagggaaacacatgagatgaaacccttggtcaccttgtcttttttcctggcggcacagcaaaatggagcccaagttgataatggttgctttactgttctgaggaggcagagatcacagttcagggyggttgaggtggttggaatttgtaggtcaggctaatgaagagaaagctgcacagagaaacaggtccagaaatctgcatatgggtactataaagtctttggacaaatgctaagcttctcactttctgggtgagactctacaaagtctggtggcaaatagctactggggggctgtaaactgggtggagattccagaaggtgcacaaaactggagatgtagatgttctgagtggagatgttctcagtgattccctggggttttcagtgaagaaccaagaaaggccaggcggtaggaggagggctactctagccctggactcaaggctatactaagttcatccaaataaagtttaaaaacagctttgtaaaaattaagcttctccactagtaaattaacgtaacaaaacttaacactctttaaatccagacctgataatgtagcgtttaatgtctagcatacaattcaaaaattactagatatgtgaagaggcatgaccacaacagatttttttaagtcaatagaaacatactcagagatagcagatatgttaaaattagcaagcaaaggctttaaaacaactcttataaatatgtttaaaattttaaagaaaatatggactccagtaaatagaaattctcactagaaaaatggaaagtataaaagaaaaccagctagaaattctagaactgaaaaatgtaacacctaaaatgaaaaaaaaatccctaaatgagcttaacagcaaaatagattccatagaagaaaaaaaaatagtgacattgaagacagggcaatataaacgatctcagctgaagcacatagagaaaaaagcactgaaaaaaatgaacagagcctctctgacttgtggaatagtatgaggtggcctaacatctgtgaaactggagttccagaaaaagatgaaagagaaattggggcagaaaatatatttgaagaagtgatagctgaaaaaattcccaatttggtgaaaaatattaacccataaactaagaatctcaataaactccatgcaggataaaaaacaaagaaaaccactcctgggtacattataaccaagtttatgaaagccaaggatcaaagaaaaaagttttaatagcagtatgaggaaaagactcattctgcgcaagacccaggggaacaataatgctgatttatcaaataagccaaaagagaattgaataacacctttaaggtgctaaaagaaataaaacctgtcaacctggaatgagaaacctagtgaaagataaagatccyttaaaaaaatgaaagtaagaaaagaagagaaaatgggaagggaagaagggagagagacaggaaaaaaggaaggaaggaaagaaggaaggaaggaaaaaagaaaggaaggaaggaagaaaggaaggaagaaaagatgaaggaaggaaggaaaaaagagaaagaaagaaagaaaagaaagaaagaaagaaagaaagaaagaaagaaargaaaagaaagaggaagkagggaaggaaggaaggaaagraaagaaaagaaaagaaaagagagagaaagaaaggggaaggggaagaagaaaaacactgccaagcaaaaaccaaatgtatcaatggtacacataaactgtaagaaatattaaaggaagttcttcaggctaaaagaaatgataccaggtagaaactcagatcaacataaaaaaatgactagtgctagaagtggtaaatatgtgggtaaatagaaattacttttttcyttgcctattattgaatgagtaaaacttaattataaagctgagtttttggtagacattgcaatagtctgggaatcaggaaatctgggatctggtccacttctgtaaccttaggtaagtggcttaatcaatacttgatattcctctctaaatggtaacaattcaagaagtttctttttttttttttgagatggagtctcactgttgctggagtgcagtggtgcgatcttggctcactgcaacctccgcctcctggcttcaagcaattctcctgcctcagcctcccaagtaggtgggattacaggcatgtgccaccacrcccagctaatttttttgtatttttagtagagatggagtttcaacatattggccaggctggtctcgaactcctgaccttgtgagccacccamcttggcctcccaaagtgctgggattacaggcgtcagccaccgcacccggcctcaagaagtttctttttatcattgctaaatacctcaaaagggctatctacttattatttcttaaatttaatgtatatatgaattacctagggatcttgttaaattcaagatacattaataaagttattgtggtatagtaaaaagacagacaagtagatcaatgaaattaaaaatatatatattcttttttatcccttttacttctaacttgtttatacttatgctttatacataaagcatctcttttataaactctatagcattagttcttgtttttttattcagtttgataatctctgcctgttaattggagtgttttgttcgatgttgaggttacagctactattttgctatttattttctcccatctatttgttttgttttgtctcctgttgttgctgttcctttgtttctccttttcttccttcttttgaatttgttgagaattttttttattatttttatttttttgagacagggtctcactttgtcgcccaggctggaaggcagtggcgtgatctctgttcactgcaacctccacctcctgggttcaagcggttctcctacctcagcttcccaagtaactgggactacaggcatacgccactacctccggctaatttttgtattttttttggtagagacagggtttcaccacgttgtccaggctagtctcaaactcctgacctcaagtgatctgcccacctcagcctctcaaagtgctgggattataggcatgagccaccacacagggctcgaaaatgttttaatatttcattttatttcctctattggctkgaaaactatatgttgttgttttattttgggctatctagggactgaaatgtgcatccttagcttagcagaatctactatgatttcacatcactacatgtgtagtataaaaaacctacaaaagcaaattttctgttttccaatatgttctttgcactattgtcatacttctacataagttaacagctccacgataagttttattatttttgctttaaataatcaattgtctttaaaagaaatgaaataaaggttgatattagagccattctggaaaacttcctaggtttactctgattactgtattttccaaatgtcgtatgtgaagtcctttacaggccctacctgctgggttggatgaagcaatccttgagggaagtcaccgctatagtcctgttggctatccctcagaatctcttcaaaattcaccctggagaaggagaagagaaggatgcttagagaggaagggaaatactggcaaggagatggggagaatgaaaccactttaagactgtattttaaaggctcgttaagcttcactattaatgaagtataatttgaagagatatatttccttctggaaggcaagttttaagacactagggggttagttcacccagagagatgctggtaattatatttgaattgtcagtaattctagttccatcaccagaaagcaaaatgcaagtagtaagggatgactctacttgaaatctcagggggaagaaagaactttgcttctctcaaggtcatctggtgtttaaagaaaatgtgtcattgatgatttaataatatataacatgagaaattgcattagtataattgtgttacattttataatcttattttttatgtagagaacagattgccttaaatctgcaagtattgtatttgagttaaaattgcattcaacataccataaatatgtacttcctaatcatttaaatgtttgcaatcatgtgtatctcagttaaaatatatgttcacattatactttaaatttctatttcctttggacattattgtattttgcaagatcagaaagattatctaaaaattttctgtaatgataatggaaaccatgttaacatctgaatcatgttcaatgtgaaaaagatagttggggccaatttaacagttagtactctttcttggcagagaatgacagaacactgctgtaaaaaggactgctgtcttttctttttaaatctgcaaagtgttgctaagtaccgtagtccctcgcctttggaaataccatggctttttgggtcaccagctgtgtgttatataccaatagagagtacaactcacagccattttttgcattcttagtgctatttgtggctgtttctttacctcatgagctgtatgacaccttttatttaaataaatccttatgtttgtgatcactgtgcatcaggttattgggcctgtggctggccttccagttgttcatcagtctgagctcacaagaagcagacacaattgtcagtcattgtgctgttctgttaggttaagtcatcctggtggtatccaaaacatttctggtataagaattatttttttctgttttgaattaatgaagcagaaacacaaactgtgaacattgtctgtaaatagcctttgttcctttatgcagaatgtcctcaatgttaaggcctgcaagaagayagtacgtgttatattagttttatagtattagtgttygtgctgaatgatggcaggaaaaccagctaggttttatttcttactggttattattggttgatgaattcctgtgaaggtttatgatattaggttaaattatatgaaattgctatttgtgtagacaatttcatatgactcaaccaaacaggaaacaaagcagcttcagttctaggatacaagatataattcaattaatttgctgtacatcattgtgagtctgctacaaatatcttaaattaatacatataacttaaaaattggaactggaaaggaaagatttgttttcctcttattcttactttgtttttactctgtgtcattgctctcttgctttcaaggaaaataccgactctatgtacagaacatctcctgacatttgccattctgtaggtcttgaggggtaarcaagtaagaacacaaatattacttactcagttgtgagttaaagtcatctttctattattctaacaataacaaacttgcagctcttccttagtgaattttcatgaattctcttctctctagagaagactatttcatcacagaaatatattagaggtattaaaatgcctttcccctctctctgcttccatatttctccatttgcagtttcatctgtatggaaaaggagctctggtaactttggccaagacttttcagtaggaaatgcttcaaaatacaaagcaagagctattttcaagaaagaccttctaaatttatattaggtaagttaaattttagatgtcctcctttacagctaaaagtaaacacatttgatttaattatattcatcaaaatgtacttgcattcaagtgttcttatatgtcaatactcctggatagatttaaattacattgacagaaaacatccatttcctcacattttcaaacaccaagcaagtagcagaacccggtctttagcgtggttgtattttaaaaaaatgtaatccagccaaggctgatcttgtttttcctttattctttaagccagaagcaattacttttcatttcaggattaagcgtctgtaacgttgccactcgtcgctgaggctcctggtttcagcatgtctccttggttcccagccagctctgggtgttcaggtagcagctgtggctgggagtgtctctccagtccacattccttggccatgaattttgcagccctgtttatctgatgaagacctcccagtagtgaattgctcatgacattgtcacacagaccttaatgaatgatatggaaagatactgaatatttttcctcccggaatgccaaccaagcttcagtgtcccagcgccttcattccagctgatcatggcaaaggcttggtactgagatccagtgagacctttgtcctacaaaaaccacattctcactggatgcctacaagtcctctctatgggactgttacccaagcctgtttacagaattttcaacaattacatctgcccatttgctgagtctcacttctctgcactaattgttgacttcaatttatatttttaatgtacaaatgctatcaccaacttcagtgcatgaagacctctctttcttctcttcaaacccatgactttgcttggaataacagggatggctttatggcatggctttctcattatttcatgtgtcttcattttgctttcccaagccagattgtaaattccttgaaagaggagaccctgaaaactagaaatacctatacagacagatagacagtaaaaaaaaaaaaaaaattggacagaaagacatctgttgctctaagtaatccagaaaatttgccttaacacgttcagaagacatatttggctataatatacaactcctctcctttcccccgcctgccctctgctggaactgctaatgagcagtaagatggcaaaagcaggacattgtatgggaaatgtgggaaaacaggggctagtctgactagaaggtgagttgagtaactgtgatttgtgagtccacaatgggaatctttgaagtccttcatgatgtgcctttgtatgactagcaatctcctcacaagactctatggttcactgtgcacaaagatatgattctrcctgcctgcctgagatagaccaagtgaccttgtgtgttctcttcctcctctgtgcttgtttcatctgcagaaccatctgatggatggcagacagctgaaccaggtactgccccttcccaaacrcaaatgccctccccattcaccattccctagagcgttcacttccttcatctatgaaaggcaattactagggtctagcaagactgccaatttggtaatgcaaagcaggagataagtgtgaaactctagactggttttctgtttcaaagggcagcaggatgtgacagctgctgaggcagccctttgcccttggagaggagaagcaggagtgtgatcactagatgacctctccctcctgytgtctcctgggtggtagggacagtctctctcccaacactactcttggtcaggtggctacatattatgaaaaagaggaggaaaaacatgtttttgcttttaaaattattattaagagagagtactctttggggaagcagaatccattagctgaattcatttcagtagctatgtttaattaagttaggcagccttaatgcaattttattatgtagcctttaagagctgttctggtaaatgcccatcctataaatactagcactactttatatgtgtgatatcctttttggaagggcaaatctgaattattatccagatattaatctgcacacaaccctatccagacaatgcaaagatgcttcctcatattctggacattgttcaatacattcagaagggggaaaaaactgctcagatatgaccttctacattttaagtcagtggataagccagcctggttgcatcccaaaacatacttttgaacatcagtttcaccttactactgaccaagtaattgatttctgcatttcattatgtaaattaaacactagactytgaattactagaaatacacagttagccaataaacctttcttataaaatgacagtattttaatttattagatgcrttggcatgtattcatgcctaagatttcatcaatcaattttccattttaaaaagctgtctctggaagcaayagtggagagatgctgagttccaaaagcaatgttgtgaaaggcagcagstctagcgttccaggcacatgcttaactaaattctagtcaataaccatgtggctccaagtataagcccacattttttaaagtatctaccttctgaactgactcttttggaatgtcagaattttaaaaagaaaatatttaaatttctctatttaagaggtgtgcaatgtttgttcaatattggagcaacctctgatattattttaaaatatttattttgccactttgacagccttctacactgcccttgggttttaattttgtttacagtactaaacttcaatagttggcttcagattaaatgaatattagtatgttgtggtgattttattaattatttgcttttgaaaaattttttaagctgaaagtcactccaaaatagaagctttaagaatcactaccaccaacttaactttaagtcatttattcatttcattcagtyaacaaaaatatatttaacacataggatttgactgacttatccctaagcaaggtaggcatagcacctggggcccacaatacttttagaggcctataaaaacagtcttttaaaatcagaagaaaacaaatttttttattttaaaatcagaagaaaaagataaaattttaggtcaaagaaagtatatataatattaatatattcattttcataccaggatgatcataaaatataattttaaatattttttaatgaaggaaggggcccatgaaggcaaaagtttccaggacccataaaatgataatgcaacccttcgtgacatatgccaagttttatctatgctagattctaggggtaagaagatatgtagggcacagtttctgtacccaaagcactcatagtctaatgaagaaaatggacatagacagttcataatgtggttggttcccttgacattgtttgagagtaattacaagctgaaaaacataagggttttactacaaaatgtcatttaacacatagacttggccttacatttctttccgttaaacttatacaaaaattaggtttatatatatcttaatgctacatagacagtgtaagtatatatgtttgttcattttaaacattactgatattgccattcagatctrtaaatcagaatgttcattattttataaatgctgtccatcaacaggatcacaaaggaaattccacgtgctgatatcaatggtccaatgaggaaaatgagaagtgagatctagttctccctagcttagcaatgcttatctatrtcctttcgagttttactgagatttcagaaatggaacagaatcttggctgcactttccctcttcataaaatttcacatttatatgagattctgcatttatttttttctattactgtttctaatgctgcaatttgggtagtcacaatgttccacttaacctaagtcttccttgttaatatttgagtccatttttgcatttttttattgttaattagagaatgatttctgaacattttctatttttagagcaattttacctgcattatcttattacacacacaaaagctttttgaataagtaggacatcataggacattcaaaagaacacagactcagacaagcctgagtatgaatctgaattctgccagtcaagctgtattattttggtcacttcatttaacytcatttgcatctcagcttcctcatccataaaatraggatcattatgcatgtctcataaagttgccataagaattaggataatgtatgttaagtgttagaccagcacctgaaatttagtagatactaaataagtagctgctattattatttgccatattttataaattaggaaactgaaacacagacatattcctcatgccagtatagggggttaggkcacctagttattacaggcaaactgcagactttgttttgaacaagccttattgagaatgatggtatagagtasaaagtacacaagcaaaagatacagaaaaaacactgacatcaaaccaaccagataaccaatatatgtttattgggcaccttgtaagtataagacattctatgtacaagttgggctactttgcaaatgacggaattccaacttgatcacacaaaaaaagagaatttgctggctgatgtcacccaaacacagaatgtggacagctggtcctatggatgtctggactcagtggcaagcacacttttagggcttatactctctatttctgatgtatgtttccagttctctttgcagatgagctttctccatgccatggggaacatgaatcctagcaactatgatctctcatctcatcctaacagcagttctaccagcaaagaaagaggattcctttgtctttgtctgcagtttgaaaacaatcctaacaatcacttgcattgaatcagtttaggtcatatactcttccctgagccaatcaccaagccaggaagatggagtaatataattggcccaattaagagcacacgacatgttaggagctcgagaccagcctggctaacttagtgaaacctcatctctacagaaatacaaaaaaagctagctgggcatgatggcacacacttgaagtcccagctacttgggaggctgaggtgggaggctcatttgagcctgggaggcagaagttgcagtgagtggagatcacaccactgcactccagcctaggcaacagagcaagactgtctcaaaaaaaaaaaaaaaaaaaagartacatgttactgttgtcattagaagagagggaagtgtattgggcaagcaaaaatcataaccttcaccttcaatgagttataatagagaaattaatattttaatggtagagttggctcaaggagccaagaggccagaatctcagaatgtctggctgagatgccatgagccctgagcagacatgtcacatggactgcccagccaggaagggaggcctatcataattttgtcccccacttgtgttatctcatagactacagacttaaatttatttcttaatatgcatactatttaaagaaggaagttataaacatttgggcattatcttagagaaagcagaactttctaaagagagtgtctagaggctggaccacagactaacatccctgttggttgaaaaattgcaggctgtcttgtcctgttggaaagcattattttaacagattgcttaatgcttttccttcctgtagcatgggcttgggggagtggtactcaaagcagacttataaattggattgtatagtgaatgaactttgcttaatggctttgctgggtttatttaagacattgaactgtttgcccttgtctccagtggttcaatgaccactcatcattacattagtgggagaactatcatactgtgttagagatacggagagcttgtgactgggtgaagagtcagtgttttgactttttatgccaacatcattattttcccactcatttcacatttctcctgtcagttcagccctcaattcaaggttaccttgattactttcaggtcttttagtcatgaatctttctaaactatttttacctcaaattgttcctatattttcatgaactcactttttcttcttttctgtctcaaaattagaggtattcctagtcttttccagcactaaattcttccctagtctacctccttagaaaactaacttcattcattccttcatyttctatttgcattttcaactatctctcttcattgcatctttctccacttatccaccacaagcctacctcttgaaacagtatcaaatgagatcatatttgggaaagtgctctgttactctgaagtagaatataaatatggaataatatcataatcctgtctttcttcttccctccgtgatcatttcaaaaaaccatcaatataaaatattttttaattttactatatcactgttcaactcattacctaatgtcttaaaatctgattctgtctcctaaaatactatgttaggggttcataactttatcttccagtatttgacacagttaactacatcctccttccttggtttttgtaacctcattaccttgatttgcctcctctccctttaaccattcctctttccttcaatgtccatcttttcccttctatctctaaatgtgggtggtctctatcattctgtccttccttctctccctctctctctgattctcataaatactccttgaaaccaccaacaaattcttttcttcaacctctgttaattgcctgctgataattttaacctagatgtcccactagcccccaaagaaaatgtatagtaaaataaactcttaccccactccaaatatcttccaccttatctcagccaacagtgttactcttttactgagtcacctaggcttgaaaccctaattccatgattgatttttccctccttatccctgaatctaatttcagccatattttacagacatttactctgtctctgccttctcttccttcaggtagtgatagttcaggctgctggaatagcacacaccctattatttttgctttcagtagggttatccaaacgtattttgtggtcatactgtttttcccttctttgttccttagttctttcccttttctggtctgaataaccattttaactttattcacaaagaccactaaatcttctgtgctaacattttctcagaacttccactaaacatgtttagaatggctagaatggcctgtataacatgcctggtaagtaacagctgggtgcaagttgactattgtttataagtagtgacatgacaaaaatacatttcatagcgtatgtctattaatttgcattttcaaatgcagtcaccatcttcatattagaaaattcaaccgtatttgattcagaatgctgaaattttgaggatctaatgacatgctaatgaatatacactgaacatgttgcctgacttttaatactttttcaccagtcatcagaatataattccagtttatgtctaacctcatcagaaacatcacctttcagtctctaggactctagctctctaactttgtttctgcagatcctattagcaaaaaaatgattaaggacagcttcagttttcccagttttgacattaagggtatttgatgccacagtagtatactgtgcaactgtaaaaaagaatagggaagctctttatatgtctatatggaaagatctctattaagaaatgaatgttcatgtctccctcaaaactcatgtgtttaagtcctaaccctcaatatgatgatgatatttggagatgaggcctttgggatgtaactggggttagatgaggttatgagggtgggactctcatgatgtgattagtgcctttataagattmgatgccagaaagcttgctggttctctatctgcatgttaggacatagtgagaagaaagccatctgaaaaccaggaagagagccctcaccagaatctgaccatgctggtgccctgatcttggactttcagcctccagaactgtaagaaaattaatttccattgtttaagccacccaatctatagtattttgttatggcagtctgagctgactaatacaatctccaatatttattattattattattttgagacagagtcttgttctgtcacccaggctggagtccagtggtgcgatctcagctcactgcaacctctgcctctgggttcaagtgatttgcctgcctcagcctcctgagtagctgggattacaggtgtgcaccaccacacctggctaattttttgtatttttagtagagacggggtttcaccatgttggtcaggctggtctcgaactcctgacctccagtgatctgcttgcctcagcttcccaaagtgctgggatcataggtgtaaaccactgcatctagcctccaagatttatttttaagtaggggagaaaagagtgccaatgtgtactgcaaagtgccaatgtgtactgcaatgggagttaaaaaaagaagagaaaatatacttgtactggcttgcatatatgttttttaaatcttgggaagtgtaaatgagaaactgataatattggttacctgttttktggagataggcagatagagaataagggaggaaaggagacattgctgtatatctttttatactttttgatgcttgaactatgtgaatgtgctaccagttcaaggaattaaataaataaaatttacttttttaaagtaataaaacaaaaacatttaataacaaaaacatttcatttggaaaaataagattatattcaaagaagaaaaatactgattatgttgaaagaagatggctgactagcagaataactaaagcagaagtttacatttgatgcaggcacaatttgaacaagatgaaagaataggagcagatgtattaaataactttcccagtcagctctttaataactcccatgacagtgtaggcaattcttattgttactgcccttttcttggatctgcgttggctactgccagcagagctggaagtgcccacatgacatgtattcaattgaaaggtgatagccacaagttctcaagtactctcaataatgctcagatggtgcctgagagtgacaccttctccttcaacttcccttggttggaagtcctaagtacaaggagagcaactactgagaaaaggatccagtcatccatttgaagagggttaatttctcttccaagaacacaaatgtaacttttctcacaacctactttggcgaattaaacatccaattgttttacggacactatatcatactgccccagaacattgtccttctgtagttctgatcattttatttctgtttaatatctatcaaagaattcttctctattagtttcagggtaaaatccaaaattcaaaatatgatattcaaagactctggtcatcaggcttcagcctatctctctacccacatctgctcattttgagctgttttgccatgaccccaaagtgctttcctttctctacctccatgcctttttaaatgccattttcattgcctggactacccttctatttcttccttttgatgatgcttttccaaattaaagtgagtgttccttttctaatatcaccctgtatttattgcacaccattgagattctctatgtgcttgtcctttctatcagactcgagaagttcaggggccatagcatattcattttgcatctccaatgctggcatccagtaagcatttgatggctgaatgactgaataaatatgtagtctagctgaagttttaaagacagaacattgtagtaccctataataaaatcctacccaaggcttaggaaaagtgccttgcaggaggattctaactytgcattttaagagtataattcagcctcagattgacttgtaagagctgaattctgtcagaacaattctccctgagccttttgattttttggaaggctttcacttttgcagatttgtgtgtctgtggtttgaaaactctggtgagcattcccatactaaggtagctctttgaagatctcctctgtttaacagcattttacttctcatattctaaagcatagatgacagcttgcaatccagtggattttcatccttatctcctgaaaaccacatttcttaggcattgtgatagtaagttccatatctatgaaaatcaccccacagaagtgagttttcagctcaaacctcagatacgcatttgcttgcaagagagcaagagtgacagcagggcaaactcaaccactttgtagttagatgtctttctcatgtgtctttctcaaagattttcttttaaagtgtgaaatttccagaaaaatctaacagtttctagccaaaatagttcacttcccaagctaaaggggttgattttggtgggcttcagttgtrtcaataggccactagtgaggcagacttcagagataagcccatcttttgttaattcacttcactctgaacaaaacagacaaaataaatgcttgaaccccacctatttagacatgcttgcataaacatggcttcataatagtttgctttcagagtccattgactttaattgtcctacggatgctgtttaaatgcgtccattgatataatgtgttagtgctcattttctatagtaatgagcatagtcacaagcctgagttcagtatacatttgagcaaaatcctggcactaatcacaatataaatagcacatctgatcttactgacatgtggctgaaggcaaaacgtaaatccaacaaaatttgcaggactttagttctgatgccatttcttgtaaagtttggggataaaaatgataggagtcctggaatatttttcccatgctaggattttagttattctgcagttaccaaatctgcaaaatttctggatttgtcctcctccaggaaacactgtcttaattaaataattaattaagctcatttaaaagccagtgattctcctgtggtttgcttctataattgcctctttactcatttaaaaaaaaactacctaagctaactcttttatttgttcttaatatgatgctttacctagttcatgcaattgtttatcatatgacttatgtgtctctctgtgttgtcattgtcattatctgtagaaaattgttaggtcccaaaaggcaggacctgagtatccttattttctgtggcacccgcacagcattatgtgatattaaacaggcaataattattttagtgtgatgaagatgggaatctatagcatgctgatgtaatgtgagtttaacatcaaaaaataaagttactgaagctcaggtatgctatccatagcacacagtaacctgtattagttactaagaagggtttagtattatgtgaaagcagttgatgaaatgttcaaaatagccaacttccaatgactcagagtacatgtgtcccttaaattgctcacctgcttttgctctagagctatgtttcagcctgtatgtttccagaaagaggctgaaaaggcatacaggaggtcaaatcagccaacttctacattttggtggttctggtgatagggttactgagcgagatggtgataatgattgttaaaccattatttttagggattaatgtggaatttacatttacagtttacatcattaaattgacatgcattatcaattgcactgtttgtagaactgtggagaaattcctttttctatcaaaagctctacatggttagtctgactgtagatcttgtatccacatgctagtcttgatggactagcagagctcagaggaccaagccttaaacacagagcacagtttcctagaagtaaagaatttaacctttgttctagtccttccatcagcctcatcagcaggaaaactgtcaaggctgatttcaratgaatcatccttggcagcatttttccccctaaaaccgcttatctgtcactttatggaaattgctrcttgccctcagtggtatgcgatatgagctcagacattacacataattcattataccacaaagttgaaaaaatatataatacatataaatatattatatattaaacataaataaataggtagatagataaaatttatcctgaaccagctatgtatcaataaactcagcagttttacagttaagttctgaaaccacagccttttggtcacttgccgccagtattcttccaagagagattaagaaatgtttgggcctagaggcaacctttaaaatgtactgagaagtgcatttttgccagctctattgatattacttctacctagatgacccacatacttcttgatattctttaaatctttgcaaactgggtttataacatttccctcctggggttaaaacaaccccagccccttaggcaccatgtctttaagacatagcattagagaactttcactcctggagtgtgtatctgcgatcaaatatgatcatatgctctattctgaattgaaattagctttatgacttctacaatcagagcgagtgttgggctgaatgagttgagactagataacagaagatgcatctttcacaggctgtagcactgagtccccacttttctcatacaggtccgcgatccgtggtctgcaattcagaaatccaaagggctctgraaagcaaaagttttagtaacaaaatttggtggccaaaattgatgtgaagctttatagtccccattcatctcacttaatggaaatattagtacatttgattatgggttgctgcccaggacccactgggggtgttacataaacagatatactcaccacattatcttcctaaaatccaaaaaatgtcacatctagcatcaaatattttgggtaagaaattgttaactgtacctttccttaaaatactaaagattttttactggggagagcgagccaatcaggttttgaagttcacgaaaggcaaatctgtagatgagggtcttgatgagggcagaagtttagggtaggtcctaagactttacaacgtaacatcctctctggttcttttctgtgttcctagttttgtacagatttatttttgagtgttggtcaaaataaggggacaaaataaggggaatgttattttttaagagaattcttttttttttttttttttgagatagtctcactctattgcccaggctggaatgcagtggcacgatcttggctcactgtaatctctccctcccaggttcaagcggttttcctgcctaagccttccgagtagctgggactataggcatgtgccaccacgcacagttttttagtagagatggggtttgaccatgttggccaggctggcctcgaactcctgacctcaggtgatctgcccacctcggcctcccaaagtgttgggattacaggcgtgagccaccatgccyggccaaaaattcatttttattgttgtccccttcttccttttctgtgaaagtcctcatcctaagaaatttttatattttatattagttaaatcatttcctattgatttttgttgtgattttcaaaggtggattcccacagataaaatcttagctattgcccaagacatagtaaagggtcacatgtatgaatttttataattggaagaaaattctgcctttgtgagtgcacatgtccatccacatttcatccctccatccctcaaaaccctagtgaggggcattaaagaatggttgatgtatatgcaatgtctgttaagcatgcactatgtatttcatcctcatttattgggtctgggatggaagtttctagccagcatgaacctaacctactttttgagacaaaattcactgtttcgttacaggcaaaattctggtgtggtgtgaatgctgtggctcagtccgaacatgtttttttctgtaattttatcattattacacgattgcaatatcagttttgttttttaattggaaagcaacattttctactgttgaaagacgttttttgacaaattgacccttcctagtattgagtactaagttgaggactgcatctacttgttttttacattatagagaataaaatactattgatttgaaaaatacatatcacttggtatctctgtcttggttgcagtggtgatacagaattggtttcattaactcctacatggttggtaatcactgatcaagaaagtgggaaaacaaaaccttaaaacctcaatcctcagtaggaagtaggttacattaggtcaatttataggtaatctatgcacatgctaacagggttggaaagaaccttacgaagcatattacctgataaacttgagtgggtttgggaggacaaactaacaggattattgtgtctcctagttggtacatgggagcaactgacgtacccccttcagaaccttaactgttagtaacagtggcagtgacaacacaaaccagtgagcagagatacagctcttaggccaagctggccagactgtatggctgcaggaagtgactgaccagtgacagtgctcagccagaccaagatgaggagagaagagtcaataagctttctggaggctaaggtgttcccgtggtgggaaactgtgcccccagccttcatggatgagttataggtcttaaagttagtctcctcttgttgggatttcacactcattaaataacctgataataacctggttttccatgtaactgcctctaggaagaaaagtactgttcatgaagacataggtatttcagtctgcatggtaaaagatctatatcttactacaaaataataaactagctggtttataatgtgtaaaaaagatttttgagaaatcattggtggtggtataatattaagtgatatcattcacatgggtagttattctcataacatcttgtatgtaactataacacttataatgtattaataatttgttttcaatcttttaatttggactagacataactcttacagagagaaattgtctttaggctgggtaggtgactcacatctgtagtcccaacactgtgggaggctgaggcaggcggatcacctgaggccaggagttcgagaccagcctggtcaacatggtgaaaccctgtctgtactaaaaatacaaaaagtagctgggtgtggtggcacacacctgtcatctcagctacttgggaggctggggcaggagaatcacttcaacctgggaggcagaggctgcagtgagctgagattgcaccactacacaccagcttgggcgacaaagcaagactccatctcaaaaaaaaaaaaaaaaacaaaaaacccaaagaaatgatttttattattttatgaagtatatgcttcttaaagaaaaattggaaaacacataaaattttaaagaaaataaaaatcacctataatcccacttcttaaagatagcaaaagttactgttacattttattaagcattttctcctatatatgtcattaaactgtgatcatactaaaacattattttcaaaagcattatttttaatgactacagcatatcccacaggtatggatataccttgatttatttaactactcttttattatagggctttccaattgtttctgattttaaattttaatttaattattaattaattaatttatttatttatttttgagacagagtcttgctctatcgcccaggttggagtgctgtggcacagtcttgggtcgttcaacttccatctccccaattcaagtgattctcatcccttagtcccctgagtagctgggattacaagtgcctgccaccacacccagctactttttgtatttttagtagagatggggtttcaccatgttggtcaggctgatctcaaactcctgtcctcaggtgatccgccagcttcagcctcccaaagtgctgggattatagatgtgagccaccgcacctgcctgttcctgatttttaaaatgatgaatggagaaaccatttcttaatcagatcgttagccacagtatctagcacacttagtcacttaatataaaagtattgaattgaaaagttattttcatctgagatcctatcctgaataggtttattaggttttattagaagcttaagaggaatctgacaaaatgaactccagagcacatatattttggtgtggaagggagcagtttaagcctgtgctcagagaggcaacccagggatggggaactgctaacagtgtgtggggtggagcaggggcacatagaagaatttctaaggtgaatgttgactctgtcacagttttacctactgacagaagtgttgaaccatccacagtgggttacttctcccactcttctgaagaaggagctgttttgtcacttgttctgtttctcttttaattgctcatagttgttcctatgagagcagacatgtgctctttgaatttaattgaacgtctgcttcagaaaaacgtgacaaggaaatattatcttcttagatttcagtatgtgtaagatgggtatagtcgtttacaaaaattcccaaatcagaattttgtgacctcttctagaacatgtgattagcctggcccagcatgactctttcccaagcagggccaaacagatggaagctggaagcaccattttcaccctaaagggatcaagacaaggcccagcaaactgaactagcaatatctaattgtctggtgttctgatgatgctcacattgaccccacctccagagtgcctgttaccataacatctggaactgttataacactgcctattttgatatgtggccaaaaccactctactttcagattgtgtgaacactgttgtaatactcaataagcaattagtggtgaaaaccccgattgtggtaatattagtgcctgatttgtttaatttaattaagcatttaatttccttctggtgtctttataaaagaaaaacagggccgggcgcggtggctcacgcctgtaatcccagcactttgggaggccgaggcgggtggatcatgaggtcaggagatcgagaccatcctggctaacacggtgaaaccccgtctctactaaaaatacaaaaaattagccgggcgcggtggcgggcgcctgtagtcccagctactcgggaggctgaggcaggagaatggcgtgaacccgggaggcggagcttgcagtgagccgagatcgcgccactgcagtccgcagtccggcctgggcgacagagcgagactccgtctcaaaaaaaaaaaaaaaaaaaaaaaaagaaaaacagaagggaggaaaaataatctcagattattaactactttaagcttttcacctactacctcttgggctatagcaaatcaataatcttttaaaagcaaaacgcaaaataaagtaaaataaaaattaaatgtaaactttcaaaaggcaataaaaatataatttcttttaaagcatgtattagtttcaccatatttctagaatattgtaaagtaatatacaattatatagaatacagcattatacagtaatgtaatatgctttagactatcccccataatattaacaacccattctttatcaattgatattcattagtcttgtctgacaatgccaaacctattccctgatctccaacttacccgtcaatgaccacttctgatgaggatctgaacactattgcaataaggcagacaatattataaaattcaagaaacattaagtcacaataggaaggatacaactgaaaggataatgatatggtttggttgtgtccccacccgaatatcatcttgaattttagttcccataatccccacatgttgtgagaagaacccaatgggaagttattgaatcatgggggtgggttttcctattctgttagtgaataagtctcatgagatctggtggtttcataaatgggagttcccctgcacaagctctcttgcctgccatcatgtaagatataactttgctcctccttcaccttctgccatgattgtgaggcctcctcagccatgtggaactgtgagtctattaaacttctttcctgtataaactaccctgtcttaggtatatcttcattagcaacgtgagagcagactaatacagataattcctaaaattaattaagatgtcagaaagcattcttggcaaaaagcaagttagagtggaaacttctcttttctttttaaagatgtatcctatgatatggtctttagtggaaacccatgttttctataaaaatgaaactgatttttctatataatattcttgcccatttctctccaaaatgatttatctgtcagcattctcacagaagaaaaatttgctttccaaggcaatttcctttcccttttttccctatatttttgaaaaatactttctttaaaggcttttctaattttttttagaaggaaagttggagaaactgagattaggagattttgagttggcagatggcatagatcattaattttttgcaattatgtttaatatattaaaataacaaaaactgaatagagaatagaagcccatatactagggaataaaagcataaaatttcctgtacaataaattatagacaatttgtacagcatttttttattgatgcatatgctaatttgatggttgagatgtttaaataaattccctgaaaaatttagtacgtagctacatatgtgacctgtatgaacacaaattaccattttcttctagctttcacatcaaaatttcacatcataatatactatatatatttctatatatagtagagatagtatatgcatatacatatactatctctgctatatatagtatagcagagacagtagtgtgagtcatatatcatctctaaagagcaggataatcttggtgtgagttaatcttgatttacattttaactccactctataataaccaccaggatgtgttatattttcggtagataatgttttcttcgggtggttttcaatggtgacttctctgaatctgcatggttctcacgtaagatgtcatgaggttgtaggggacactcttctagttgtaaaggctgtagaaaaggcctgagggcggatgcatattattgacaggccccctgtcattggggaggcacgtatttatggagcccttacctgtgtcagggctctcagccaggagctgaccctcagctttaaaacaaggttaacaatatcactgacattccagctgtagcacatagatttttctcttccttcctccaacatgctaaattccctcccaccttgtgtctttgctcatatgctcggctcagtttggtaatttctctccactcctgattaatacctactcatctttcaattctcagctcagaagtcacctctccagggaagtcttcctttattcccccagacatatgggatttacgttattatacatgctcatggtacccagtccttttcctttacagcacttagtttgtgagtatttagtgatggtttgattcatagctgtctctctgctagacagtattagcacctactactagtcagtgactagtgctagttgtgtattatggaccctgtttttaattcagaaaaaagttagcaaaacttcagaaaatgaaagaaatttttctgaaaatattattgaaatactatcttggaagaataacagaacttgatactaagagtgtgactggttaatgatacacactgcttccatcaagagaaagtgtctgttcccctccctttgatgggcaggcctgtgactgctttgaccagtacaggatagcagaaatcatgccatgctagctatgtgcatagcccctaaagagcacggcagcttccacttctcacctgtaggaagccaaccaccaagaaatgagactattctgggaccactattctgtgagaatcctgagccacatgaagaagctctggaagaagggacctgtgtggagggggtgagctgggggtcaggctgaacaacactgaggcactagagatgtgcgtgagaaagtcagctggaaagtggttcccagcttcagctgccccagtggactccatgtggatcagagacacaagcttttccccaattcctaatccacaaatcatggtccaaacaaaatgactgttttataaagccactaggtttcagagtagttttttgtgcatcaa

SEQ ID NO: 94747 - DNA, 39127 bp, Homo sapiens
  misc_feature (1)...(39127): n = A,T,C or G
ccccaaatcactaagctaaagggaaaattcaagctgtgaactgtttagggcaaacctgcctcccattctattcaatgtcgtccctctgctcagtgagataaatgcatatctaattgccccctttggagaggctaatcagaaactcaaaagaatgcaaccatttgtttctcacctacctgtgacctagaagccccctccctctggcaagttgtcccacctttccagagtgaaccaatgttcatttttagatacgttgattgatgtctctctcatgtctcactaaaatgtataaaaccaagctgtgctctgacaaccttgggcacatgtcatcagtgcctcctgaggctgtgtcatgggtgcgcatcctcaaccttggcaaaataaactttctaaattaactgagagctgtctcaaattttgggggttcacataacatagggattgtcctagactttcccactatgcctacatccagtcaccaactcccatcaaaaacacaccccaatatctcccccattcattcttgcttgcctgtaccactgttcctggaccaaactgagggtcaggctgcttattcttgtgacccaataatgagatgaagatgaactggggaggaagagagtttttatttctgtaactggttacagggagaaggcctaggaaatatcaccagacaaactcagaattacaaagatttttcagagcttatggaccttctataaaactcttggtgggcttttgttacgttccagcctttgtttaagagtactggctctatcagtttttaatatgtaacttaaccattcagtcagtgctgaaacagttgttacagaagcctatgttagtgagacctgacctgccacaatctccactgtcaatttctgcatgatttctgtcatgcttgtatatttagtcatcatgagaattttagtgagatggggtgtagtgatctttctggctacatcctgatgagagggagtcaccattatggggcaccgaatgcagcgctggagtggaagaggttgacctgttcccagtagtactctctgtttcaggggcttagaggcaacacctgctgaaacataacaatatgtaacagcagcacatataaataggttgctgctgttttcttctgaagtttaagttgtctagtcttcagtttgcagggctttaataaagcatggtttaggtttcagtgagttccaattaggaaaaacggggaaaaaagaaaaaaattgaaaacattatcttggagacttgtagccagaaaaatcagaattcaatccaaactgtagaaaatacaagccgctgaccattgaaaacagctccatcccagtggctcctggctgcctcaccaaatttgttcagaccaaaccgagggtcaggctgcttattcttgcagcccaataatgagatgcagatgaactggggaggaagagagcttttatttctgtaactggttacaggaagaaagcctggagaatatcaccaaactcaaaattacaaagttttttcagagattatataccttctaagctatatgtctatgtgtaagtgtgcactcatctaaagacatatgtgattaacttcttttaatctataactaagagctgagtcctgaagaccttcctctggagcctcagtaaatttacttaatctaaatgggcccaggtgctgcggtgattacccttatcttgtctcctgctaaatcatggaggtttgtggagttccttcagacccccaataaacttgtttgtggaggtctggggagtttcttcagattcccaataaaacttgtttaatcctaaacgggtcctgataagaattccttcattatcttgtcatgcttcaaagcccaggaaaggcctaggcaaaactcttgctggacttttgttacattccagcctttgtataagggcactggctctatcaatttctaatatttaacttaaccattcagccaatgctgaaacagttgttatggaggcctgtattagtgagacctggcctgccacaccactgcaacaccccagtctgggccaccatcatatcttatctgaatattgcaatagcatcagaactgatctccctagttctagtcttaccactaccttccccatcccaatttattctcataaatgttaaggtctcaggacctagagttagactgtctgacaccattttttactctctgatgtccttggacaaattgcataatctgtgcctcagttttcatacaggtatgaaataatggtaacatctaccttgattattatgaggaagaaataactgagtacatataaatcactttagaattgtacttggcacttagtgaggatacaaaaactatttagctgtccttattatatttcaagtagctttcagaataatctactacttaactatgtcattttccaccttaaatcttttcagtggattcccatggccttaagtaaagcctgaatttcttaactgggcctaccaagctctcatggtctgactttcaccctataggtggtcttagcacccatccttctctctgagacttgaagctctagccatgctaaagagctcccacagtccagttagctcaggccattttatgctctgttcatgcacttttccaccatgtagaatgccctttcctacttcgtccacatagaagacacattctgacattttaagacacagctccactacaccctaagccacatgaaggcagggccatgttgattttgttcaaggccacatctccagtgctcagggcaatacatggcacatgatcacttctcaataaatattcactcagtaagtgaatgaatggataaaagcatctcctcagctacaaaacttttttcacattttcttctcacctgcatccccactagcctggacggatttcattactggctcctttgtctggcaaggatatcagcatcactttctgtgatagctaccttaaaagtacttaagcgacccttgtctccccagtgcattgagctcccagcatgtgcccagcacaggggcctgggacacagtaaatgttcaacccatgtttactaactgagcacatgagcaaatcagagagcagtgaatctctggaatcccacattggtgggctgcaatgctatcctgggatacagctccacaaaattctagacttttatccccatggttccatgttcttaaaattcatttattattaagtaataatagacttccacatcttaatggatcaaaaatatagattgccatactgaattattataatttcggtcaaaggttagttaccttgcactgccctgtttgtagacaaatgtatgcttttctttgggctgtgtgtaggattgaagcagctactcattggccttcatttcttgtctcttgtgtctgagatggaaggagccatcagatgagcattgggagaggcacaggcctccttctgggagtctcatggggcttatttccatctagaggcaccactatccaggttgatgggattttttttggtatctccaattccctgtactgtagccaagaaaattcaattcagtagatatttgtgcaggaatgccaaaaaaaaaaaaaaaaaaaaaaaaaaaggaaggaggcgctgctctgtttttggcctccagaatcatatttttgagttgtagcaagtatcaaaagccagtctttggccagaataaataattttctaaattcctttctctcccattagcctgccctgttggagtagattacagaactttattctccaccagggatagcaaaaacacaagcaataacataaggatattttctaccacatgaaatggaggttgtggggaaaacccacctcttgcagcctggtggactgaggcaaaaagtggcagaggtcgggtggtcaagagagtatctaattatccccctctaggctaaaatcctgggattggggtttagatagagtgaaaggaaagttgagagcacaggggattttaccttgcatctttttttggagaaaccagagtgaaaatggcagtgaagcagagaaggcctgaacttcaagcctcttcaacaccttccagcctctcttaggctcctaaatatagtgcaaaaagttccagagttcctttgttacccatgaaagcacatggaacggtgctggacaggggcaactggccctggagcagaggagtaactgcatagaactgtccaagcctcagagggagtcacaccaccagcaagaacctgggtgggagtaggtgagccaaggggttcccaggctctgaccctgccaagagaactcattagaaggtcaccaaccacacatactattcctcggtctcatgaagaacccagggaccggaccaggcaagatatcacaaagctgaagtttcagctctggggcagagcatggatctgaggtctttggccctaccaccatgcgatcatatgagggccatcatacaaccatcatgatttgggggaggaatagggcatagaggaatcatatgaaaagctgaaatgccatgagttacccagaagaagctgtgtaagccagaggattctgagaccctgtcaaataacaacatctagttgaaggttggagttaggtaggaggtagggaagtctgggaaagaaggagctgaaacacttgctgtgtgtggcttaatggaacatgcaaggggccaggacgaacttggtccagatgaagtcaccacccctggggcctgtcttttttttttttttttttttttttttgagacggagtctcactctgtcaccaggctggagtgcagtggcgcgatctcggctcactgcaatctttgcctctcgggttcaagcgattctcctgcctcagcctcctgagtagctgggattacaggcgcgcgccaccacgcccagctaattttagtactgttagtagagatggggtttcaccatcttggccaggatggtcttgatcccttgacctcgtgatccgcccgcctcggcctcccaaattgctgggattacaggcgtgagccaccgcgcccggccccctggagcctgtcttaatcacttacccgccaaataaaatctggctccagagagtggagcgtaggcttaaggaattgggggcggaagggcggggaaggtgggggagggacagtgatagggagaacagggaattgtagcagaaattgggtttattgttcagagctgtcaatgaacacttaacatatgcctgtcttagcctaaatcaatgaataaatgaatgaataaataaatgaatgaaatgtgggcaatgcctataaagattgctgggacagggaggtggggggagacaccagcttgggaagtcaggcttgttagatcctagttcaccacctgatacgttacaaatactaaaaccatcactttcaaattatttttactacattttcctgttatctgtactcgagtttatttatgtttctggcatctagagtcagcccttcatgggcatgagacccaagcagccacacgaggctctgaacccagaagagcatatgctcggtttaatggtctgtcatcttagaattgttaataaagtttttatcccgcattttcattttgcactgagattcataaattatatagcaggccctgactgtacctgtatagtggaattactatatgatggtacgctactgtgcatatcttccccgttcagtgttcagtgccctcgtatcggcagcttgaactagctcatggtacacgctgggaatcagggtgggaatcagttgtaaaccatttacyggaacaccactaggcaggccacaggataaaggaataatgatggtacacctccccctacctctaccacctgggaattttggtagaatgccagaatggaaaagaaaatctcttgcatagccatttataatttgtgataaggaagaaaaacaatgacctcagctttagcattattttacaatataaattcagatcccgtgactgaaaactgttggacttaaaagaggacgctccaggagcgcaaaagcagttgggccgaacgaagcgtgcgcgctttggtaaccggctagaaatcccgcacgcgcgcctgcctcctctccccrggcctgagctgcccctcccastgcctttccttcttcccgcgagtcagaagcttcgcgagggcccagagaggcggtggggtgggcgaccctacgccagctccgggcgggagaaagcccaccctctcccgcgccccaggaaaccgccggcgttcggcgctgcgcagagccatggaattctcctggctggagacgcgctgggcgcggcccttttacctggcgttcgtgttctgcctggccctggggctgctgcaggccattaagctgtacctgcggaggcagcggctgctgcgggacctgcgccccttcccagcgccccccacccactggttccttgggcaccagaaggtagatgggagggaggagggaggaaggaggagggaggggcggaggaggatgcggcagaggagcccagccggcagagagacgcagctttcttccatccctggggaccctccggcttgcactggcctttccagcccggcctgtggctcttagcatcatttttccttgctctggagaattgctttcccgcagccccacagggaaaggtcacaaaagaggaagctttgggggctgggagagagctatttaaagaacctgaatatggaaaaagaaagcgagctgtaactcaagtctgtctctcattgcttcaccaagccttccacatgtgttgctttaaaaatagcatgttattctaaataacttattagttgcagaaaatatgcaaaatctatcccaatcgttggcacccttagtccattttaacaagagaaaattttcttttcctaagattcttgtgaagtaaggagcagccccagccagccactcgagaaatactgattgatggaaatttgtaaagggagactgttagcttttggtctctcccgttttttaaatccactcccacccctaattaaggtttttattcattcaaccgactctgagtggcaattgtgtgataggtactaagattacaaagagaagctaagtccctcccctgcaccacccaagtcaggtgcagacttaggccacagagagaaaatgaaaatttaaggcaatgggtgctttactagaggcctagagacaagggaatatctgtcggaggaaagtatacatctccgcctagagaaggaaggaaagtctgtgaagggctgagcagagtcttaaaggatggttgggtggtgtggggaaggcattccagcagagctactacacgatcctttggtttccccactttctagtctttcttatataaagcaaccactttcaactcttttatcggtttcttctggtatttaaatacttatttgtaaaatagtattaccatattgcatctattaatttaataagtttagacatctgctgtggtttagatatggtttgttcgtccccaccaagcctcatgttgaaatttgattcccaatgttggaggtgggatctgatgggagatctttgggtcattgggatggatccctcatgaatgtcttggtgcagctgtctccttcataagttctcactctcttagtccctcttcaacccccagaactgattgttgaaaagagcctgccacctcctcccctctctcttcctgtctctcaccatgtggtctctgcacacaactgctcctgttcacttccactatgagtggaagcmgtctgagatcctccgcagatgcagatgccaatgccatgcttcttgtacagcctgcagaattgtaacccaaataatcctctttgtgaatgacccagcctcaggtattcctttacagcaacacaaatgtactaagacaacatccacctatgaacttctttatgacaggcaatcacttacacttcatattccactgtcccagtaactatatagtattgtattttttaaatagaaaaacttctatttgtattatttttattatgcaaatgttatttactgctgatctaaatggtcctctttcattttatttcttttctcatagaacttttccccacccccacagtattgttaacttcttccttttctaatctgcttcatttttcaatatctgtcactatttttttccaaatcctctaatagatctgtcaaacacatctaaataatatttccaaatatgcaaacatgccaaatctgttcgtttttttggagatatttttgccacagacctctcctcctgttccagtctggactggttgttctttaagcttggtatgcagatattgttctaggactccccattgatgctatcctgtgttatgtatctctactgtctcatgaatactatgtcgtctgttgttttaattgaattgttttggcatccttgtcaaaaatcarttgaccataaatgtcaaggtctatttctgagtcttcaattctaatccattgatctatatgtctatcctaactcatgracacagagagtagaaggatggttaccaaaggctgggaaggatagaggggagctgggggaggaggtagggamggttaatgggtacaaaaaaaatagaaagaatgaataacacctactatttgatagcatagcagggtggctatagtcaataataactgtacacttttaaataaagagtgtaataggattgtttgcaactcaatggataaatgcttgaggggatgggtaccccattcttcatgatgtgcctatttcacattgcatgcctgtatcaaaaacatctcatttactccataaatatatacacctactatgtatccacaaatattaaaaattataaataaataaattatatagctatccttatgctagtaccacactgccttactgttgctttgtagtaagctttgaaatcaggaagtatgagtcccccgcactttggtattttccaagattattttggctgtttggaatccttgagtttctatacaaattttagactcagcctatcaatttctacaaggaaaccagctagggttctgcttgggattgcactgaatctgtagatcagtttggggattattgccatcttaagaatattaggtcttctgatccatgaacacagaaagcctttccgtttagttaggtcatctttaattttttttgttgtttttttttgttttttgagacagagkcctgctctgtcgcccaggctggagtgcagtgacgcaatctcggctcactgcaacctccgcctctcggattcaagcgattctcctgcctcagcctcccaagcagctgggactacaggcacatgccaccacaccaactaatttttgtattttcagtagagacggggtttcaccatattggccaggctagtctcgaactcctgacctcgtgatccacccgcctcaccctcccaaagtgctgggattacaggcgtgagccaccactcccggctttctttaattttttttaacgatgtttttgtatttttcaaagtatacatcttgcatttcttttgttaaatttatttgttttgttctttttaatttcatttcagactayttattgcattcatagtgttttagagtccacattccctcttgactgtcactaagtttttttttttctgtttttgagaggtttctatcagaattttgcagatcagagatgacggacatgtcaaactgtctaatattaccaaccctccccatttatcagatcaggatccttttggtgattcaccatgcagggaaatctagtatctaaggctcaaaaggtgatactgttttacataggcagtaacattttattgctacataataactacatatttatggagtacctgtgatattttgatacgtgcatacaatgtgcagtgatcaaatcagggtgtttagggtattcatcacttctaacatttattatttatttgtgtttggaacatttcaagtctcttcaagctcttcagaaatattcaatacattattgttaacagtgctattgaacactggaacttattccttctatctaaagacagtaacattttaagtatagtcataaggttacagaaggataaagtgtgtatagggaaaattccctacaagatragaatttcattccttactcttagtaatacaggtcttcaaacatgccaaggatattcctcccttggagctttgaacatgcacgtctgtggttatattgctctccctgcaaattattcctaaaagaggcttgccctgaccattcagactaaaatagcacctctagtactctctatctccaaccctattattattatcttggcccttatcactctctgacactatactgtatactcttttgcttgttcrtttattatccaccactaactacaatataaaatctgtgagaggtaggatctttgtttgccactataaacctagtgcatggtacagttcctggtgcataataggtgctcaataaatcctttgttgaatgcataaatatattaggtgctgagaaaatttatttattcaaagatcaatttactgcatagaataggccaggtggtttgacatttattcaatagccaacatatgggacctaggatgtacatatgcaagtgtgtgtgtgtatgtgtgtgtgcatctgcatgtgtacttggatgtactgcagagaacatctatgtagctaagtagtataaagcacttgggctccagagttaaactggagtttgaatcctcattagtggttgccagctgtacacacttgggcagatcatttaacctagtctgtagggctcaatttcctcatctctaaagtagggattgtaatcatatctacttcatagggttcttgatgtaaatattaaataacatagaacatggaaagcatttagcagcacctagttcatagcagtgcttgataaatgttcgctgttgctatttgggggcactatgcattttctgaacatttctgaacaatgtttactaaatatatgtagtacccgttttcaagtgtatttagatgcttctctggggatgaagaaatataaattaaatatagtacagtattcacaacagttttctgtcctttttgtctagtcaggagttacaaaaagtataatgaaatactttcatatggctggggtgtttatgaaaattttttacctaaacaaacaattgtcatattagtttacaatattcatgagggcaaaggccttgtcttccttatatttctctgtatctctaccacctggtacgtgtgatagacaataaatacttgtgtgtttattgtttgtaaatgaataaatgaaaaaatattcacattgttgaaaaccactactctggatagtcagtgggtgcttatcactggcttgattatggcaacattaacaaaaaagtgcagtattttagaaactaggtttcaagactctcaacctttcagtggccttgaactatccagagaacactttatgggttaaaattgctaaatgataacagagaaaaatgggagccagagttgtccacctctccagaggatgagagcaaacaatcctgcagcagataccgtgtgattggtcacacgaggaaaaatctggcagccttaagattactttgcagcgggggactcccaccatcatgctcaagtgtgtagatgggcacaccaaaacacacacatgcaggtgccctccactttacacaagaagcaaatgtaaatgaatcttgttttcagtgatttagagaaacaatttaagtgagccattactcatctgcttctaaaagcaaaaactccttctctggtggtagtatttgcactctcatttgtaaatgttggaagctgaaagttttgtatttgagtttgctttaagattcacacatctgtgtaaatggaccttctgttgttggggggagaatttggattttctttatagatagagttggcaattttttagagagaagcatttactgctaagtcatgagaaataatcactggtgcataattagagagaggaacaggaagaagaaatggtgagctggatgtagggtcatgccccatttagwaactgttagtttcccacataggaaatacttctttttagcttccagatcccactccaatctgagtgtgtgatgttggcaagtgaggcagagagtgtgactcggctcaccctctattgggacaagagttcacagtaaatgtcattcaacagtgacttggtctgggggtacaggatatattaatattgagaagataaatacactaactttgtttagagaattatcccccaagcttagaagtcccaaagaaagcatgttatgtcacttccagaaaagtctcaggctcctctgcttgtgtgaccttatcaggtcctgaactcagcttgtgtctrtaagagrggacaggtccagcttggctggctaattacttttacttttttcactgcagtttattcaggatgataacatggagaagcttgaggaaattattgaaaaataccctcgtgccttccctttctggattgggccctttcaggcatttttctgtatctatgacccagactatgcaaagacacttctgagcagaacaggtaagaagagggggaaagytctgggacctattcctcctagaagtgaaatgcataaaacccataggcaagattccaaagcaaagattggtttggggcctttaagagacacagcagcaagtatggggaggtgacaggtttcctaccaatactgaaggggattcccatatcctccccagtcccttgtcttgttcaggtatgcatgggcacgttgaagtcggtataacttaaagcctagctggcattaccagacttgccaggcaaggcttcccttggcctctgtgggttttatgacttcagtgtcagcaacacttcccactcctacccctggtctcgagcataagtctcaagagggtgggaaatcagcagtaactctacctctgctggttcagtatgaaagcctgaatgctagatcattaatttacccatcagacctcttgatnnnnnnnnnnnnnnnnnnnnnnnnnnnnnnnnnnnnnnnnnnnnnnnnnnnnnnnnnnnnnnnnnnnnnnnnnnnnnnnnnnnnnnnnnnnnnnnnnnnnnnnnnnnnnnnnnnnnnnnnnnnnnnnnnnnnnnnnnnnnnnnnntccagtttttgccctgtacaactttgtaaaaggaaggtttttatattccagtcttccctgtgcattgtatccaccactcctaataaaacctaatgaaagaaagagccttgccctgactatctccatgtttccagtccccctgctctgatttgtgtcatgagacttatgctcgagaccaggggtaggagtgggaagtgttgctgacactgaagtcataaaacccacagaggccaagggaagccttgcctggcaagtctggtaatgccagctagtcatgttcacctgttaaggacaagaacagtagaacacctccactttggggttcacaaaaacaccaagaggcattgacacctcaatacrtggtgtctactgacctctgctctgatcgttaattttccttctgtaaaggatatatgttgtcccaactacggttatggaaactttgcaaccctcaggcaaactctgttcttgttggaggaagtgtaaacaagggaataatcagggtttctgtacttgtctgcctcatagggcttgctgttctctgaaactgagccaagactaacacaagtctttccccaggctgccaaaggcagcaggaagtaagmcctgggctctctttttctcactttttgtggttggtgcagaaatgcagaaaaccrtcaccaacttgaactgataatgaatgctccctctaatkatgtcttttgtttcctctgcttgactctgcagatcccaagtcccagtacctgcagaaattctcacctccacttcttggtatgtatgtgcaaatgagaggtataacccactctcattcaaagtcccctttccatagtagagcatgccaaagaaactgaaatctgaattcaaaagcacaaagagtgcaaggtagagctatactgaacgttatctagggraaagattgaaggggagctctaaggtcaacacaccaccacttcccagaaagcttcttcatccgtttctctcccacaaagtcttattctcaaggcagcagatacatgaatctgtcccctctctctttaaaactacagccttggccaggcacagtgactcatgcatgtaatcccagcactttgggaggccaaggtgggaggatcacttgaggtcaagatttcaagaccagctgggccaacatggtgaaatcccatctctactaaaaatacaaaaattagccaggcatggtagcatgtaggcctgtagtcccactacttgggaggctgagacatgagaatcgcttgaacctaggaggtggaggttgccgtgagctcagattgtgccactgcactccagactaggtgacagagcaaaactctgtccgcagcccccaacaacaaaaaaaaaactacccaaactgcagtctcaccatccctattcttgttttctttatccttctctcgttttcttggatgttttcctttctttttggagttcctttatttccacatgcgagtcagtaaaattttgctctagagtttggcaatattctgtcagcagataaactaagctctttaattacataattggtatttatgttaaacaagacatgaatgaaagaaaagaatataggcttgtattaggaaccacttaaatttgaatcttgccccctcctgcattgactagttaaatatgatcttggggaagtcatttaatctctccctatctcagtttcctcatctttgacaataaggatgagactcacattgctgggctgttatgaggattaaatgaaatacatatttttagcactacatgtaatggccaccattgtatgagtgacagatcatgcatcatgagcctggaatgttgtaagcattcaatgaatggtatcaattatgtattaataaactttaaagtccttttaaagccaaatcctaatgaccagtctggcaatagaagattgtgaagcattagccttggtaagtatttccacatagtatcattcatagacctgggctcaaggaggaaatatcaggggacagagtggacactcttgtctctttccttgtgaatttatgttcatcatatagtttatggattggtttggagtggaaaggaattcacttgctctgttactagtgtgagctagggagtaggttggctaccttatgtattcactttcagttaacctccacagcaacacagggaaaaaggtatttagtatcatagttcattattgagaaaagtaaacctcaggaagattgagtcacttattcagttactacataggtagtaactggtgatttcaggattagcgtgctaatcttataaggctttgaaatttattagactttgaaactgtttctcacaatattaaatacatccatcccagaggtaagcttctaaattcaccttcatctattaaattgcattgcacattaatacgagtactactttgatactccactgttgcatgactgcctgtgggtcatggttactccacgctgcctgtgttcctcatctatccttcatctcatctaattaaatggcataaggttttctgccttttatttctcaaggaaaaggactagcggctctagacggacccaagtggttccagcatcgtcgcctactaactcctggattccattttaacatcctgaaagcatacattgaggtgatggctcattctgtgaaaatgatgctggtaagtaaagggggaaagtgctctgtgcattgcgaaatgctcccagcaatggacagtattaggtatgtgttttgtgggccatgaaaataaaaaatcagtttctaaaaatttaaccaatgtacacgtacttattgaacaataggtgtctgtaaaaaatttgttatgttctttgagtgataatattaataaaaagatctggtcctctgtcttagatatattttgagattttatggcagcaaaccaagtaccaaatggtgatagttagatagtaagtgctgtagatgtgtttcatggagggcrggtctgtacaaacctaccccaaagtctgaggaaactgagaggctgaagaaaaaggctgacagtttcttaaaaagaaacattcaatagaggctttcaaacaaaaaccatggctgtttcacacagttgtgagacaagatggtggatccctgtgccattaccctccagacccaggaattatagaccatggggaggggcatacatgcttcagaggaaattattaatagtaagaacttgccctaagggcaagatttatggtaagtacatgctcttacacaaggaacaatagataaactggaaatctcagagcattcctggaactagagttaattggaagtcaagatggcagattagcttccagtatggagttgcgttaacttcacaaggtgacaggtaaggatggcaggagcagctataacagcttcagattcagaggaaactcaaatttgccatgaaatataagctggacttgaatatgtaggtaatatggatgagagtattcgaggcagagtgagggagcatgaacaaaggtttggagattggcatggacttgcccagtggctataaaggaccaagcaaaagagaatgtgtgtattaaagttgcagatgtgaatttcctcttgtagatagtggaggatcattaggccctgacctacacctttcaaaggggcygaagaacattcctgtgagtggtctctgatttataaacgagttctattccaaaactctatttgtacaatggcttcaatttttaaatcatatttattttgaaataagacaagtaattcactaatacactttcatcatagacacctcaaacaccacaaacaaagacaaagttttcctctcacttcatgtgcaaacccatccctgttcccatacaaacctctgttaccagctcaatgattgggttctcagccaaactcacagaagcagtttgaacccgaagtcagccaggactgtggtaaaaacatcagtgtgagttctcaaggcagagacccagagactgtgcagtgcaagctagtgagagagaagagcatccttttgtgactctagtgctgttcaggtgcagcacagtttcagatcctccagtgactgcactggagttgcattagagttttctctctatttctcggagcgcttcctcccctcctcatttctcagccacatatttctccgggatttttctcacacttccttcctctgctgcatcattccagagtttytcaagcttggaagcctccctcctgttctcatttcttctacattcaccatttgttcttagtaaaacttacgtaattgagaaaaaggctctttgactaaacaatttgcacttaggaaaaagtttttaaaattctctttgcctttgtggttgccaagtctctgaaattttaaaagnnnnnnnnnnnnnnnnnnnnaatttttacacaaagtatgcttattatacaaatacattttcaaccagggaccttgtgacagtttaaaaatgtcaggcaaagcatttcaagcagtataagtaggtctctttgtggggaagttaagccaggtcaggctttgctgggggcagctccctgcagcagctcctctccacacttgctctgtttctcacttttgaatccaaacgtttttgaaaatgttctgagtttattttaaatgtggctatggtggttgagagcagtggcagggtacctagcaagtttggaattgaagttggaggaagccctggggtaaaccccttgtaattatgggtcttgtgtcaatgattgctttaatggaactctggtctgtttgaaagcagagttatggtaataattgaaaagccrcagatctttaactcagccatttaccatatatgcagttttctccatgctccttctcactccgctgggtgtatttttcccttcctcgtgccctgtgtaagcacatggcttatttactcatgtgatctttggttcctgctgggtcagggttgtctccattagatcataaaaacagggccaggcaggagccttcaaatgaaggcaatttggtcatggtggtggtgatgatgttggtcttgacctcctgtgccaggataagtgggagaagatttgcagcactcaggacacaagcgtggaggtctatgagcacatcaactcgatgtctctggatataatcatgaaatgcgctttcagcaaggagaccaactgccagacaaacaggtcagtggtgggagagcaaaaaagatatttcttcacattttctaagttgtttattaacacattatcccaactttctcttctagcacccatgatccttatgcaaaagccatatttgaactcagcaaaatcatatttcaccgcttgtacagtttgttgtatcacagtgacataattttcaaactcagccctcagggctaccgcttccagaagttaagccgagtgttgaatcagtacacaggtatttgttgggtttgggttgcccacgtccatacgctgccatgattgtactgtgtctgtctagagggataaaccttaatatgacaagagaaagaatctttgttattaatggagcttttatatagacactgctccaaagaaatttgacttgagtcctttataagactttgcttcaaccatagcagtattatcagaatttttatatatatatatatayataactatttttattatggacaattattattaatacaaatataagtaggcacttaagagttccagacatacatggaatatggctttttgcacagcgattgcagtaataataatgacaagctaaaaacattcatgcaacataggaatggagagtggaacagagtaaacatggacatgcacccgaaagaatattgattcaaaaacagttttagcaagcataaacacaaaagttgaaatagattaagctttttaagcaattcaacattacttgtcatgaatgccataatggagaatacttatcaagcagtgaattaatccttcatcagcttcaccacttactagcagttactagtaagttacttactgctttgtttcagtgtcatctataaaatggagattaaaaaagaacctatctcatacatttgttrytacgatgagtgggttaatatatataaagcatttaggacagtgcctggcactgaatagatgttaaatgtaaagtatagttatgtcaaatgtctttgcttccaggaattttgcaagacacaccaacatatgcacacttacacatacatatatgcatacatgcacatagatattataaagaggacactcagagaagcaggttataaacaatttaaggcataaatgggcattayaaatagcagcagttcccaagtctttctgcatcattgcacacacagaaaatgttaatgtttttgtgcttcattggagtaaacaggaatggatttgggggaagctatacagaactttgtaaaaaaaaatctttactttttaaatattatacaattatgatgaaaaagcaaaatgcaaagtgttagggaaaatattaaatgttaaatttattcaaaacttaaaaccttttcaatttttttttttttttttttttgagatggagtctctatcactcaggctggagcgcagtggtgtgatctcagctcactacaacctccacctcccaggttcaggcaattctcctacctcagccttctgagtagctgggattacaggcactgccaccacacctggctaatttttttaaattgtttatttttatttagtcaaatatatcaatattttattttattgcatctggatttttagtaatcacaaaaagccattctctattccagggtttctcaaccctcagcactaatggcttcttagattagataagtccttgttgtcaagatgtgtgcattgtaggatgtttagctacatccctgacatctacccactcgatgtagtagagctctgatagttatagcaaccataaataactccagacattattgaatgttcccagggcccccagttgagaaccactgccctgtacccaggttgtagagaaaattatttatgttttcttgtagtacttgtataatttcattattttcatatttaaatcagagatctaaactccatttagaatttattcctatatatggtgtgaggtattgatctaatttttccaaatgtttatccagttgtcccatcaccattatttaaaagtttatcttttcaagtgatttgagataaccatcacattctaaacggatacatgtactggtatctgttttggataagagtatatttggatgttctcgtgtattccattgatctatctaccaatgtaccagaatcacactgttttaattaaggagattttgtggcttttttcaacattaatagaccttatttttagaaaagttttaggtttgcagaaaaattcagcagaaagtacagagagttctcatattacccatgtaacaaacctgtacatgtacccctgtatctaaaataaaagttgaaattttttaaatagtaaataaatattacctctgttccatatttttgttttgttttttttctctcagctccttcaattataaatatattggcatttctttgcctgtcttctatttcattccattttatttaataacttttccgtgaagataaaatattagactgaggaagaaaagaataattggtcacttgcatctaaacttgaaatcatcttaattttattgcccacatactgatggaaactatgttttttatttgtgttgtttatctttggagctttaatcaaaagtccctttgatgagaaaataaaccatctgtgaaaattagatctrtttaaacgtctggaaatcaggcaagatttgaagctattcactaaccatggcttgctttataatttatttgactttgccatcactttggtaattggaaactatttttctacccagatacaataatccaggaaagaaagaaatccctccaggctggggtaaagcaggataacactccgaagaggaagtaccaggattttctggatattgtcctttctgccaaggtaaatcttctaaatttctaagcctgctcaagtgaccagttaattatgtaagtaggtgggtaagtgggaatgggatggggagacaagaataaaaccgattgactaaatttaactgtactttgaattgatgagcagcttcatgcaatttgagacaaagagagaattctgcaactgtgtcgctagaggagggttagtaaagactaaacgaacgatttgacaagatttgaggattgtcatatggatacatggattttagggcatcatgaaaaaatggtcacrtggataaacgtaaaaattatgatgataaggtcctgggaaatctgggagtttgaagagaatttctagggcctgttgatygagggccctttgtgcaaggcctgcttttcttatctaaccttggttctcctttatgctttgggcagaatatggtttataccacatatttgttgaactgaattaaaatttaaacccctatttaaagctctgatttttcccctmaaatcattattgtggttgtatctccaaacatttataaactggcattttatttaaaatatttgtattgtactttctaggatgaaagtggtagcagcttctcagatattgatgtacactctgaagtgagcacattcctgttggcaggacatgacaccttggcagcaagcatctcctggatcctttactgcctggctctgaaccctgagcatcaagagagatgccgggaggaggtcaggggcatcctgggggatgggtcttctatcacttggtaagatctgcacccctaaattttcctgctagttttccccctgagattttgctttattttttgcgctggtaccttagtgaccctagtgcctcaggatatgtgtaggtgaaacagaagaagtaggctacttttctgttctttctaaagagagctccaaattattctcttgtctttcaggaaaaaaaaaaaagtttatttatccataaattgtctgtcattggttttctaatcaatggtgtgtgaaatgtcttatttctttatttcaccttggctctgatgcattggaaatgaggacttgatccctgggctggcacttagaacttaaacaatagggtccaagtggagctcctcttctgagagagctgaatgattagctgcattatttaaggctcattttagacatctcccagccgcttgtcaccaattttattcctcargattgattttagacttcagacataatattcgatgatatatactatagttaagtttagcaaatatggactgaggacattttaaatactgagactttttttatgactacaatttattgtgggccctgtcttcggtgagctaatggtctaatacaggagacaggagacagacctccaaattgcagtgtagcataatgagggcaatgatagagatatgtgctggctaacacaaagacatagaagacaggtacctaccctggcatgggagctcaaggagacttccttgacatttacgctgactgcaggataagtaggagttagccaggtggaaactgtcatctctatcttgctagactttaagcatatactgctgttaataaagcccaggttatgctgtttgcaaagataaaatgtgttcctgacataatctggtcaaagggacagaaagacagaaatgctaaggacaattcagcagcatgaccagataaaaaacaccatatttcatatgcaaaagtcaactcaattgaaacatttgtaaaaccaaatttgacattataaaagtatatcagagatctcattttataaggaaatagaagccctttcctaccataaactaaagatttaatctatatagcacaaaatacaatgttgagtaatcatttttaatttattttttaactgacaaaaattgtgcatatacatgttatatatayatgtatgtgtgtatatatatatgatgtacaacatgatattttgatatatgtatacactgtggaatgactaaatctatcaatggacaygttcattaactcatacttatcatttttttgtggtaaggacatttaaaatctaccctcttagcaatkttcaagtatacaaattgttaktaactccaatcacatattgtacaatgcatctcctaaacttatgcctcctgtctgactgaaattttgtatcctttgactaacatccctgtaatcccccattctcccacagcccctggtaaccactgttctactctctgcttctttgagtttaatgttttagatttccacatgtgagatcatgtggaatttgtctttctgtgcctggcttatttcacttagcataatgtcatccaaattcatctctgttgtcataaatgacaagatatttgtcttttctatggctaattgttagtccattgtttatatatataccaygttttctttatccatttatccagtgatggacacttaagttgatttctatatctgggctattgtgaataatgctgcaatgaacatgggaatgtagatgtctcttcaatgcactgatttcatttcgtttggttgtatatccagaagtggaattgctgcatcatatggtagttctatttttaattttttgaggaaactccgtacaattttccatatggctgtactaatttacattccaaccaaaagtgtataagggttctgttttctccacatcctcaccaacatttgtctttttggtaataaccattctaatgagcatgaggtgatgtctcattatggttttaatttacgtttccctgatgattagtgatgttgagcattgttttaaatacctgctggccattcatgtcttctttgtaggaatgttattttaggtttttctcatttttaaatctagttatttgttttcttgcttttgaattgtgtgagttcctcatatattttgaatattaaccccttatcagatgtatcatttgcagacatgttctcccatcctttaagttgtctcttcactatgttgattgtttcctttgttgtgcagaagctttttagtttgctgcaaaaccatttatctattttttcttctgttgactatacttccagagttgtatccaaaaaatcattgccaagaataatatcaagaagcttttctctatgtttttttctagtagttttatagtttcaggtcatatgtttaaatctttaatccatttttagttgatttttgtatatggagtgagataaaggtccacttttattcttctactagtgcatatccagttttctcaacaccrtttattgaagatactgccctttcaccactgtatgttactggaacctttgtagatcagttgacaataaatgtgtgggtgtatttctggactctttatcctgttttattagtttataygtctctttttttagaagctctatgctgttttggtgactagagctctgtagtcaatttcagatcaggtagtatgatgcctccagctttgctctttttgctcaaaattgctttggctatttgagtttttttattccatacgaattttagggcttttttttttttcrattactgtgaataatgccattggaattttgatggagattgcattgaatctttgggtagtatggatattttaacagtattaatgcttccaattaatgaacacagggtattttgcaatttgtgttttcttcaatttctttcaccagtgtttttttcttaatttaattgttttatttccatagggtttgggtaacaggtggtgtttggttatgagtaagttctttagtggtgatttgtgagattttgatgcacccatcacctaagcagtatacactgtacccaatttgtagtcttgtatccctcacctccctcccaccatttcccccaagtccccaaagtccattgtatcattcttatgcctttgcatcctcatagcttagctcccacttatgagtgagaacatataatgtttggttctccatttctgagttacttcatttagaatattggtctccaattccatccagattgctgcgaatgcctttattttgttccttttcatggctgagtagtattccatagtatrtacatcccacaatttctttatccattcttgattgatgggcatttggactggttccatgtctttacaattgcgaattgtgctgctacaaacatgcaggtgcaagtgtctttttcatataatgacttctcttcctctgggtagataccctgtagtgggattgctggatcaaatggtagttctacttttagttctttaaggaatctccacactgttttccatagtggttgtactagtttacattcccaccaacagtgtagaagtgttccctgttcactgtatccacaccatcatctattattatttgattttttgattatggccattcttgcaggagtaaggtggtattgcactgtggttttgatttgcatttccctgatcattagtgatgttgagcattttttcatatatttgttggccatttgtacatcttcttttgagaattgtctattcatgtcctttgtccattttttgatgggattatttgtttttttcttgctaatttgagttccctgtagattctggatattagacctttgttggatgtgtaggttgtgaagattttctcccactctttgggttgtctgtttactctgctgattatttcttttgctgtgcagaaactttttagtttaattaagtcccacctatttatcttttcgttgttgttgttttttggggttgttttgttttggcttggttttgcatctgcttttgggttcttggtcatgaagtctttgcctaagccaatatctagaagggtttttctgatgttctagaatttttatggttcaggtcttagatttaagtccttgatccatcttgagttgatttttgtataaggtgagagatgaggatccaktttcatgcttctacatgtggcttgccaattatcccagyacaatttgttgaatagggttaatatttaaagytttatatatttaggtgttcctattttgggtacatatttatttacaactatcatatcctcctgatggattgacccctttctcattatrtaatggtcttcttgtctctttttacagtttttgtcttaaagcctaatttgtctgataaaagttcagctacctttgctctcttttggtttctatttgcatggaatatttttttccaacccttcgcattcactctatgtgtgttcttaaagatgaaatgagatgctgtaggggcatatgcttgggtcttgttttattcattcattcagccacccttttgattagagaatttaattcatttgtattcaaggtaattattgacagacaaggacttactactgccattttgttaattgttttcttgatgttttatagatcttttgttcctttcatcctctcttactcttttcctttgtgattaggtgcttttctctagtggtgtactttgatttttactttttatcttttgttgctctactataggtttttgctttgtggttaccatgagggttacataaagcatagttataaaaggctattttaaactgataacagcttaactttcaacacttaaaaaaactatacacttttactctaccaactgccctccattttatgtctttgatgtcataatttacctagttttggagatgtgtccccttattgtgtatcccttaacaaattattgtagcaacagtcatttttaatagttttggcttttaactttatactagagatagaattaattaacataccaccactacattattagggtattctaaattgactatgtatttacctttatcagtgagatttttgttttcaattttcatgttgttaattagtattctttcatttcaacttggagaattcacattagcattttttgtaagatgggtctagtagtggtgaacaccctcaacttttgtttatctggagatgtctttacctctgcttcattttgaaatataacttttgttccatgattgaaatggacaaaattgtttttttaattatgcaaagtgccagggtaagcagaattactctttttttttttttctgagaccgagtttcactcttgttgcccaggctggagtgcagtggcgcaatctctcagcttaccgcaacctctgcctcccaggttcaagcrattcttctgcctcagccttcctgagtagctgggattacaggcatgcaccaccatgctcggctaattttgcatttttagtagagacggggtttctccatgttggtcaggctggtcttgaacacccgacctcagatgatccgcccacctaggcctcccaaagtgctgggattgcaggtgtgagccactgcgcctggccagaattactcttatttatcctgagcttgaggaagaaagaattcaaaattaaaatttcacattacctaatggccaaagcctgcattcaaaataagtaatcagaaaaacatataaaaacacaataagataaacagactaaatatatgcagtcattttatggaaccaatctgactagattggatgcagactaggtaggatgcaaatttaaaaaaaactttattcttcttccacttataaactttaaacctgctttgtggagcaagttctttttatctctggggaaagatcctgagtaagtctcatagagttctcattcatttaaatcacaagaacaatcttaggtcagtaattaaactatctggcccagtgtaatactgaaactttcaaatacttatccacttgagctcttctttccatcccagcttggtacttctttggtcctagaagccagcagtggtttatcatcgacttattcttactgactagctccccaatacccagtagctgctgtttctggsccctccaggaatggttttaggaggaaaggggataaggagtaaagggctggtactattgtgatcatgccaaagggcttggtggatattccatgcttccctttctctcaagaggaaactccctttcttggagactctctcactagaactttccagaggtgattcaggggacaagagaataattgtccttaggcagactctttttcaagctggtcccagagctttccctcttgccagttaattggtttaaggacacagttgcacatccttgccttgcctctgctgctgtcctctgcctttctgtctgttctgagttatagcctttcacatcagtcctgtactccccaaactccaaggagcacaagtcagatcatctaagtgatcctcttgaagcctcttgtttaagatgggggaagcacccttccttttccatggcactctggcattccaacaacactttaaataattttttctctcaaaattcttaagcctctcctctttaatccttcgccatttttatgtattattactttatatgatgagctaagagttacaaaactggtttttagaaatctccttagcaaatgttttactgctagtttagcagctcactttataataaggatatatgatatatttctttggttcctctgcctctgggacctcagctcatcctgaggcagagagtcccattttaacattctgttacataaaccagtggcaaaatggctttaacctgagggtaataattaccaggaacaaacagaaaacagaaaaaaagtaaactggttatgatatctgagtcccttccctccctcatcctcacagggaccagctgggtgagatgtcgtacaccacaatgtgcatcaaggagacgtgccgattgattcctgcagtcccstccatttccagagatctcagcaagccacttaccttcccagatggatgcacattgcctgcaggtctttacattcttttcctaagcagttcttagaggctatgggatcctggagaccacagtgacaaagattagtgagtctcttagcacttggagaagtcaaaagataatgctaacatgtgacttaggttttatcacctatgaggagctcagaggataatgctttggtcagacatgaatttcaatgactttcccaaaggcacatagccagttgcagcaaagctaagcccagaatccatgtctctggaatcccagcccagggtctcttccattgtgggacatcatttctaagataatctttgtttggctgagtttgagaccgagctgaaacttcatggaaaatagcaccagcatctttatctgaaagaccaagggggatctttggcctcatcatcataatatcacccttataaatatacaacatttaatagttaatatagagccttcagacccattatctcatttttccccttggaatccaatgttaacagaygcttatacaatgatttacagttcactgaacacttttaagtactttcaatgtggcccaaaatccagaggcagccccaatgtgtagatgacattaactgatgtgagcagagctagaacttgtgcggagaccctgagtctggagcctagagttcttcggaacaacacaggtttctgagcagggcttataggaagcagaggggtcatgtgagacatattatctgattcaatgttctattaattcatgtcttaggaagcaagccaacaggattgcttctggcaaacacctacagcctgttactgtaactttgctgacagacccagaattaatttctggaagctagaattatttctggaaaccaaataaccctcacattctctctcctttgttttgtactctgtttctccccaaaccacatggatatttgccaaaattctccactttccatatgtgaatagcaccaatggaaatttgtcatgggatctgcatgacagaatcacagttctgtgtgtgtgtgtgtgcgttttcctctcaagacagagtcttgctatgtagcccaggctggagtacagtggcgtaatctcggctcactgcaacctctgcctcccaggtttaagcagttctcctgcctcagcctcccgagtagctgggattacaggtgcacaccacgcctggcaaatttttgtatttttattagagatggggtttcaccatgttggccaggctagtctcaagctcctgatctcgagaccagccctcctcagcctcccaaagcgctgggactacagccatgagccactgcacccagccagttctgtgcttttatamctaaattgtctccaggagtgcttaatagtccattaataggtatttaggccaggcacagtggctgaygcatataatcccaatattttgtgacaccaaggtgggaagactgcttgaagttaggagtctgagactagcctgggcaacatagggagaccctgtctttacaaaaaaaaaaaaagagagagatagccaggcatggtgttgcatgcttgtattcctgcctacttgggggactgaggcaggaggatcacttgagctcagaagttcaaggttaccgtgagcaatgttcacgccactgctctccagcctgattgacaggccagaccctgactctaaacaaaaacaaaaaacaaatatttaagtaatttccaaacatagcagaaaatataagcatggtttatcactttgatatgacaccaacagctacttaagatagartcatgaattcagtaaattgttgtgtggaaagctaaggtgccaacccaagccgcatcttcttaggtgctcctcactggtgtcatcagctacagcaggcagagcattgccaggagctagctcttcccttcaagaacaaaagtcttgtttaagagcacagtagcccacaacttgctctttctcctgcagtctcttttatttccctcctttcttagggatcaccgtggttcttagtatttggggtcttcaccacaaccctgctgtctggaaaaacccaaaggtatgattctctcttgtacataaatacttccaagaactaatgctgtgcaagtcactttttggtagctaagcacagaagtggctatataattaagggaaatgacacaaattaaacaaaaataaacataaaagccaaaagaaatgtaaaactattctatgttcttgaaacactcttgacgtgtatcagtgatttctttcatgtaagccactaaggtttaagatctattacttgtaacaggaagctggagtatatgtctctgtaataattggccacatcatcattttgacttgatttctaagtggatgcacatccatttctaagtggatgtatctccatagtgaaaataataccacttgccatagtatttttgtttgcctgggtatcagacaaatcagctgtgaagctgcaaggtctgcaggtctgaaggtacactgcccagtgtagtagccacgggccacatacggctactgagcacatgacatgtggccagttggaattgagttgtgctgtaagtttaaaatacgtgctggattttgaagacatagtaccctaaaaaaatgtgaaacatttccttttagtaattatttatattgattacaggttggaatggtaatttttggttaaataaactctattaagattaacttcaccttttaaaaatgtgaccaccagaacattttaaattacacatgtagatcacattatatttctattgatcggtgctaggtggtaggtgaagaaatgtgttcatgttgtttgggggatggtgttggggttgtcctctcatttcaggtctttgaccccttgaggttctctcaggagaattctgatcagagacacccctatgcctacttaccattctcagctggatcaaggtgagaacaatttgaagttgctgaaagtacccaaagatgtttacttgagagtagtttattcctttcagctcctcagctctatacattcttccagggaaccgtagatcttggtgcctatttgagccccaaaggatcagttagttttacaaaggacaatcgtattctctgtcacatcctttttggccatgcctcaaaagcagtcccacaatgtaagctactgctcataggctcaatgcagtccaccttcaaagcaagagaaataatttcatgagtaactccaactgccgccttgttatagggaaggcatcatgttggagcctcccagctcaaattctcacagtgaacaatttaagtctaaagttcaaaagtttcaatggcatttggtggaaaaaatatcactttactgtgtacttcagacttmttgtactagtattttactatagtcagaagaaacatcattttttcaagtatcactttctttccctcttgtcttcaggaactgcattgggcaggagtttgccatgattgagttaaaggtaaccattgccttgattctgctccacttcagagtgactccagaccccaccaggcctcttactttccccaaccattttatcctcaagcccaagaatgggatgtatttgcacctgaagaaactctctgaatgttagatctcagggtacaatgattaaacgtactttgtttttcgaagttaaatttacagctaatgatccaagcagatagaaagggatcaatgtatggtgggaggattggaggttggtgggataggggtctctgtgaagagatccaaaatcatttctaggtacacagtgtgtcagctagatctgtttctatataactttgggagattttcagatcttttctgttaaactttcactactattaatgctgtatacaccaatagactttcatatattttctgttgtttttaaaatagttttcagaattatgcaagtaataagtgcatgtatgctcactgtcaaaaattcccaacactagaaaatcatgtagaataaaaattttaaatctcacttcacttagccgacattccatgccctgaccaatcctactgcttttcctaaaaacagaataatttggtgtgcattctttcagactttttcctatacattttatatgtagaaatgtagcaatgtatttgtatagatgtgatcattcctatattgttattgatttttttcacttaataaaaattcaccttattccttatcattgctttatggtattctgtaatatgaatgtactataatttatttaactattttccttattgggcatttaagttatttctagttttaaaaacatgcttgtcaatggcaacaaaagccaaaattgacaaatgggatctaattaaactaaagagcttctgcacagcaaaacaaactaccatcacactgaatgggcagcctacagaatgggagaaaatttttgcaacctactcatctgacaaaggcctaatatccagaatctacaatgaactcaaacaaatgtacaagaaaaaaacaaccccatcaaaaagtgggtgaaggatatgaacagacacttctcaaaagaagacatttacgcagccaaaagacacatgaaaaaatgcctatcgtcactggccatcagagaaatgcaaatcaaaaccacaatgagataccatctcacaccagttagaatggcaatcattaaaaagtcaggaaacaacaggtgctggagaggatgtggagaaataggaagacttttacactgttggtggcaggagaatcacttgaacccgggagggggaggttgcagtgagccgaggtggcgccactgcactccagcctgggcgacagagcgagactccatctcaaaaaaaaaaaaaaggacaccaaacttctcaatcttaatgttgtcatctatgtggtatcttccataatctctctcagacagagtcatcttttgctgatatgatcttacagtattttttgtttataccattataatctcattaattgcagcaacacaaatgacaaaagacaactgatttctccccttggatgacctaatttgctttcactcttccatcatcacttataacatgatgattctcaaattcatctacctaaaatctatatataaaaaaatccctcccttgaattccagatccttggagacaaacacccacgtctaaaaccaaatttgtttaacactggaccagtcgtcctgtgtgactttccattttgtcactattttgtcagctggtataccaatatccacccagttaaacaatatttccttgtttttttctggtacaaacccaaataaattacaaacatcaataaaagtaaaattctaaaataactcactttctctatatatctccttcttgctggaaaaatgggttaggttagttctttaaaagcatgcatgataaattgtactgaatacaatattcaggtctggacatactaggtataattttctgtgtctctggggtcttacctatttggggtcaaaataaacaagtttattaagcttattaatattcaatttcattatcttctttaacaattatgttccctggtagtttcattgccaataatttatttgtcaggttgccaggtgcttctaaacttctgtgtattttttcatatccaattttactttaaatatttttagaaaagaggtctgttaaatttcctaataattattatattattgttttttcactgacattttgtgaattgaaaacccttaaaaatatgaaatcattttttcgaaatatgtgccacagacaattttgttaaataagaagacagaaacagggcattatcaagagataaatattcaatataccttatatttctgtcacacatttttataccaactgtgccaaaaattgtatatcatataaatgataacaagttcacaaaggcattcctttatcccttaactctcaaattagaaactttcataggtaggaagtaggggaagcatatattccctttgaaaggtgcaagaaaatgtcattggcattcaccatggtactcttcaagcttaaaaaaaatggactgcaaaacatttacaaacatagcatatttattgggtacctttatgtttacataaatattgaagatatctcacatacctctttcaatcagattatctcactgacatttattgaccactttctatggggaaaacaaattgtgtttgccctagaaatcttctttggaactcagttcttgaataaaaatgttctcctaaataaataaacaaayaaataaataaataaaaaataaaataaaaaaatgcctgttggccatttatgtttatctttgttttgttttctgtgatttgtctgtacactgtttatgcttgtttttctatggaattctctatttcttttttttattttattattacactttaagttttagggtacatgtgcacaatgtgcaggtttgttacatatgtatacatgtgccatgttggtgtgctgcacccattaactcatcatttagcattaggtatatctcctaatgctatccctcccccatcccccaccccacaacagtccccagtgtgtgatgttccccttcctgtgtccacgtgttctcattgttcaattcccacctatgagtgagaacatgcggtgtttggttttttgtccttgtgatagtttgctgagaatgatggtttccagcttcatccatgtccctacaaaggacatgaactcatccttttttatggctgcatagtattccatggtgtatatgtgccacattttcttaatccagtctatcattgttggacatttggattggttccaagtctttgctattgtgaatagtgccataataaacatacgtgtgcatgtgtctttatagcagcatgatttataatcctttgggtatatacccagtaatgggatggctgtgtcaaatggtatttctagttctagatccctgaggaatcgccacactgacttccacaatggttgaactagtttaccctcccaccaacagtgtaaaagtgttcttatttctccacatcctctccagcacctgttgtttcctgactttttaatgatcgccattctaactggtatgagatagtatctcattgtggttttgatttgcatttctctgatggccagtgatgatgagcattttttcatgtgtcttttggctgcataaatgtcctcttttgagaagtctctgctcatatccttcgcccactttttgatggggttgtttgtttttttcttgtaaatttgtttgagttcattgtagattctggatattaggcctttgtcagatgagtaggttgcaaaaattttctcccattctgtaggttgcccattcagtgtgatggtagtttgttttgctgtgcagaagctctttcgtttaattagatcccatttgtcaattttggcttttgttgccattgcttttggttttttagacatgaagtccttgcccatgcttatgtcctgaatggtattgcctaggttttcttctagggtttttatggttttaggtctaacatgtaagtctttaatccatcttgaattaatttttgtataaggtgtaaggaagggatccagtttcagctttctacatatggctagccagttttcccagcaccgtttattaaatagggaattgtttccccatttcttgtttttgtcaggtttgtcaaagatcagatagttgtagatatgcagcattatttctgagggctctgttctgttccattgatctatatctctgttttggtaccagtaccatgctgttttggttactgtagccttgtagtatagtctgaagtcaggtagcatgatgcctccagctttgttcttttggcttaggattgacttggcaatgagggctcttttttggttccatatgaactttaaagtagttttttccaattctgtgaagaaagtcattggtagcttgatggggatggcattgaatctataaattaccttgggcagtatggccattttcatgatattgattcttcctacccatgagcatggaatgttcttccatttgtttgtatcctcttttatttcattgagcagcggtttgtagttctccttgaagaggtccttcacatcccttgtaagttggattcctaggtattttattctctttgaagcaattgtgaatgggaattcactcatgatttggctctctgtttgtctgttattggtgtataagaatgcttgtgatttttgcacattgattttgtatcctgagactttgctgaagttgtttatcagcttaaggagattttgggctgagacgatggggttttctcaatatacagtcatgtcatctgcaaacagggacaatttgacttcctcttttcctaattgaatgccctttatttccttctcctgccggattgccctggccagaacttccaacactatgttgaataggagtggtgagagagggcatccctgtcttgtgccagttttcaaagggaatgcttccagtttttgtccattctgtaggatattggctgtgggtttgtcatagatagctcttactattttgagatacatcccatcaatacctaatttatttagagtttttagcatgaaggttgttgaattttgtcaaaggccttttctgcatctgttgacataatcatgtggtttttgtctttggttctgtttatatgctggattatgtttattgattttcatatgttgaaccagcctttcatcccagtgatgaagcccacttgatcatggtggataagctttttgatatgttgctggattcggcttgccagtattttattgagaatttttgcattgatgatcattaaggatattggtttaaaattctctttttttgttgtgtctctgccaggctttgatatcaggatgatgctggcctcataaaatgagttagggaggattccctctttttctgtcgattggaatgatttcagaaggaatggtaccagctcctccttatacctctgctagaattcggctgtgaatccatctggtcctggactttttttggttggtaagctattaattattgcctcaatttcagagcctgttactggtctattcagagattcaacttcttcctggtttagtcttgggagggtgtatgtgtcgaggaatttatccatttcttctagattttctagtttatttgtgtagaggtgtttatagtattttctgatggtagtttctatttctgtgggatcggtggtgatatcccctttatcattttttattgcgtctatttgattcttctctcttttcttctttattagtcttgctagcggtctatcaattttgttgatcttttcagaaagccagctcctggattcattgattttttgaagggttttttatgtctctatttccttcagttctgctctgatcttagttgtttcttgccttctgctagcttttgaatgtgtttgctcttgcttctctagttcttttaattgtgatgttagggtgtcaattttatatctttcctgctttctcttgtgggcatttattgctataaatttccctctacacactgctttgaatgtgtcccatacattctggtatgttgtgtctttgttctcgttggtttcaaaaaacatctttatttctgccttcatttctttatgtacccagtagtcattcaggagcagattgttcagtttccatgtagttgagtggttttgagtgagtttcttgatcctgagttctagtttgattgcagtgtggtctgagagacagtttgttataatttctgttcttttacatttgctgaggagtgctttacttccaactatgtggtcaattttggaacaggtgtggtgtggtgctgaaaagaatgtatattctgttgatttggggtggagagttctgtagatgtctattaggtccgcttggtgcagagctgagttcaattcctggatatccttgttaactttctgtctcattgatctgtctaatgttgacagtggggtgttaaattctcccattattattgtgtgggagtctaagtctcttcgtaggtcactaaggacttgctttatgaatctgggtgctcctgtattgggtgcatgtatatttcagatagttagctcttcttgttgaattgatccctttaccattatgtaatggccttctttgtctcttttgatttttgttggtttaaagtctgttttatcagagactaggattgcaactcctgcc

SEQ ID NO: 94748 - DNA, 13241 bp, Homo sapiens
ggattctatactgggaacctctgttgtattcgtttcctattgctgctataacaaattactgcaaacttagttgtttgaaataacattaagtttattatcttaacggttctggaggtctgaagtccaaaatggatgtcactgggctaaaattaagatgtcaacagggctgcatttccatttggaggcttagaggacaatcttttcttgctttttagtttctagaggccactctcagcctctgtcttcaaaaccagcaacattgtatctctctgtgtctttgcctttcttctatgggaacctcttcctctgactcttctgcctccctcttccacttttgaagacagttgttaccatattgggccacggtgataacagataatctaggataatctccctattttaaggttagccttatattaggctgataagcaaccttaattccatgtacaacttcagttttcctttgtaacctaacatattcacagattccagggattaaggcatgaatatttttgggaaaccttttttttttttttttttttttttttttttttttttgcctacatatctatgtttaaattctaaagttgtgtaaggcagctggggccaggagaagattattccaaagtggagatccttgccaatcctgaagatgacttgagtagaaccagtaattgggtttgagctaaaaggaactactgggtggcgtatgtacatgttttttattctcttactagcataaaatatatatagtaaattcagcattttttttttcttttttgaggcaggatctcactttattccccaggctgtatgacagtgacatgatcatggatcactgtagtctcaacttctggtctcaagcagtcctcctacctcagcctcctgagtagctaggactacaggcataggccaccatgccctgctaatttattttttgaagagacggcgggggggtctccccatgttgctcaggctggtctctaatgcctggcctcaagcagtcctcctacctcagcctcccaaagtgctgagattacaggtgtgagccaccactcctggtagtgaattcagtattaaagagtgattgaattagaaggcaactgagttttagttacatcataggaaggaaatgattatagtattagaatacatttctgttgattgattgattcatgccagccctcagaggaaaatgttcttgatttaattgcaattttagagaaacttcaagttaaatttttttatgtgtctcccttgttaagcattaatttttatttttattattattattttttacagagttttactacccttggatgctgctgttgacatggaaaagattgaggaacaatttgctaatctgcacattgttaaatgttccttaggaaccaaagagcccacttaccttcttggtatagacacatcaaagactgtccaagcaggaaaggaaaacttggttgctgttttatgttctaatggatcaatcagaatatatgataaagaaaggttaaatgtactacgagaatttagtggatatcctggacttcttaatggagtcagatttgcaaattcctgtgacagtgtatattcagcatgtactgatggcactgtgaaatgctgggatgctcgagtagccagagaaaaacctgttcagctcttcaagggttacccttccaatatttttatcagttttgatattaattgtaatgatcatattatttgtgctggtacagaaaaagttgatgatgatgcattgttggtgttttgggatgcaaggatgaattctcagaatttatctacaactaaagactcacttggtgcatattcagagacacatagtgatgatgtcactcaagtacgtttccatcccagcaatcccaacatggtagtctcaggttcatctgatggcctggtaaatgtatttgatattaatattgataatgaggaggatgcactggttacaacctgtaactcaatttcatcagtaagctgtattggttggtctgggaaaggttataaacagatttactgcatgacacatgatgaaggattttattggtgggatcttaatcatctggacactgatgaaccagttacacgtttgaacatccaggatgtcagagaagtagttaacatgaaagaagatgctttggactatttgattggtggcctatatcatgaaaagacagacacattgcatgttattggaggaacaaacaaaggaaggattcatttgatgaactgcagcatgtcaggactgacccatgtgactagccttcagggagggcatgctgctacagtccgttctttctgttggaatgtgcaagatgattctttgttgactggaggagaagatgcacagttgttactttggaaacctggagctatagagaagacctttacaaagaaagagagtatgaaaatagcatcctctgtgcaccaacgagtacgagttcatagtaatgattcttataaaagaaggaaaaagcagtgataatgcatttggcactttgtttggtaggttttatagtttcaaatagtccttcttgtttactacccatggtagacatgtttaaagctttatgtaaaaacaagccagttagcaaacagtcctggaaaaatatggtgagaatggtttaattccggtcttcacatattctaaaaaattttaaagcctctaagtataaaatcagtgagttgaaagtaaaatttcttatttaaagaacccatctgttaatgtagtaaatgttggctttaaagaaatagctccgataaggactttttagaaggaaatacttggtaaaacttaataaaacaggtggttggctgcattttttaagcccagttttttacattttaaattgtctttattgtgtataaaaccagattagactatattcttcatctgaggagcatctatatgtttaatacacctaatgtattatgctggagtatttaaatgtaagtattttaatgagtaaatagaattaaccttttttacaaatgaaatgataggcatctatgtaaagtgagaaaaatatgtttcgtaaatatttgcatctttaatattgttagtaagtagtaaacaggtgttttgctgattgaaaggaagttatcttggtaaattgagactcaaagtgaaatacaaaaatgaaaatatttataataggactcgacttggagaaattgctattcttcctgttgtccaaaccataaatctgaggataacctgggcttttctctttcctcttctcctaaccagtttttcaccaagtcctgtgccatttcacctcctaacgtctgtcagctatccttttgcctttacctcaccactattaccctagagaagactttcattatttctcatctggattaccagctcgatctctaatctgcttcagttcatccttcttgctacttctaggctaaacatcaaaaacagatctggtaggggcggggaaatgagggggaagaaacaaaaacgtgatggtgcctcatgctgcttaaaatcttcagtacattgatgttttgatggcggactacataagcgttaaaaattgtgtttttcagaatctttaaaatataagacagtgctatctagtgaataaaaaaattagtttgaaagatatctggagaaatcgcattcataaaacaattggaagtgaaactattaaaacaatagggctttttaaaattaaaaatatttaaaattcaaaagtaattaatagtgttggaagatgtaggtgagaaaatattcctgaaagtagaactgaaagagacaaagagaaaagatgaaagccacagaagataaatacaggggtcaaaaccagactaacagttttagaaagtgaaaaaagttaaaaaagaaatgggggcagtgggttattagaaataacataaatggctggtatggtttgtctgtgtcctcacccaaatttcatctcgaattgtaatccccataatccccatgtgtctagggagagacctggtgggaggtgattggatcatgggggtggtttcccctacgatgttctcctgatagtgggtgagttctcacaagatctgatggttttataaagggctctgcccctttaactcctcactctttctcctgaagccttgtgaagaaggtgctttgcttcccctttgcgttcccccatgattgtaagtttcttgaggcctccctggccatgctgaactcttcagtcaattaaacactttcctttataaattacccagtcttgggcagttatttatagagtgtgaaaatggactaatatagtggctattccagaacttcaatctttagattgaaaggcacagcagagtgtcaagtgtaatgaatgaaaaagatccacatcaaggcatagcactgtgaagtttcagagtaaatagaaaatcctgcaagtgtccggaaaaaaaaaatcacttaggaacagatttacagttgtgttagactcattagcaaatctggatgacaaaagatggtggatcaatgccttcagagttctgaggacagattcctacctatttgaatttacagctctccaaactcatgcagcaaatagatgataaattttttgagatatcccttgtcaaatgaatatttcctagttgttctctgaacctcaggaaccaaattgatacagctaacaaagtatccatttgtaaccaaactctcattgactaaacccaggaaatagtaattctatgaccagtcaggctgtcttcacgtgtgaagttaaaaacattgcaggttggctgggtgtggtggctcacgcctgtaatcccagcactttgggaggccgaggcaggcggattacctgaggtcaggagttcaagaccagcctggccaacatggtgaaaccctgtctctaccaaaaatacaaaaatgagctaggcatggtggcacacgcctgtaatctcagctacttgggaggctgaggcaggagaattgcttgagcctgggaggcagaggttgcagtgagccaaaattgtgcaccattgcactccagcctagacaacaagagtgagactctatctcaaaacaaaacattgcaggcatacaaaatctcaaacttcactcttcatgccgtttttttcaaaggctgctgaaggatacactccacagaaattaaggaagtaaatcaaggaagagcagagatagcaaaaatcagggaaccaacctagcattgtggcaagataacagctttgcagcactatattcagtccagactggagcaggacagaggatatcaggagggagatgtccagggagaaaattgaacgtataggttacccaatgcatttgaccatgtggagaacattgtaaatagtataagtggatttaacccaccaattaaaagagacccttaaaaaggttggtgcaaaagtaattgcaccaacccatagaatactaacgcatagaatgagagaaaatgttggcaaatcatagataaggaacttgtgtccagaacatacggagaaatcttacaactcgatattgaaaagacaacccaatttttaaattgatcaaaggatctggatagacatttctccaaagaagatatacaaatggccagtatgcacatgcaaagatactcaatatcattagcagagaaatgcaaaccagaacactttacacccattaggatggctataatattaataaaaattgtatcttctgaagatctggagaaatcagaacctttatacactgctggtgggaatgtaaaatggtggagctgctttggaaaacagtccagaagttcctcagggagttgtacagttgccatttgacctggcaattccactcctaggtgtatgcccagaagaattgagaacatatgtccacacaggaacttgtacatgagtgttcatagtaacattcatactagccaaaaggtggaaagaatccaagcgttcatcagtagataaacaatgtgggcggtgcgcacggctttcgggcaggaaggtgcgctctggcgaggtaggagcaatgtgggctggaaacgcctggcgcgccgcgctttccggggtgccgtgcggccgcagcgcgcagtcagtactggcccagctgcgcggcattctggagggggagctggaagggatccgcggagctggcacctggaagagtgagcgggtcatcacgtcccgtcaggggcckcacatccacgtggacggcgtctccggaggaatcctcaacttaacgtgccaacaactacctgggcctgagcagccaccctgaggtgattcaggcaggtctgcaggctctttggagctggccttagctcggtccgcttcatccgtggaacccaaagcatccacaagaatctagaagcaaaaatagcccgcttccaccagcgggaggatgccatcctctatcccagctgttgtgacgccaacgccggcctctttgaggtcctgctgagacccgaggacgcagtcctgtcggacgagctgaactgtgcctccatcatccacggcatctgcctgtgcaaggcccacaagtaccactattgccacctggacgtggcctacctagaaaccaagcttcaggaggcccagaagcatcggctgttcctggtggccaccgatggggccttttccatggatggcgacatcgtgcccctgcagaagatctgccgcctcgcctctagatatggcgccctggtctttgtggatgaatgccatgccactggtttcctgggactcacaggacagggcacagatgagctgctgggtgtgatgggccaggtcaccatcatcaactccaccctggggaaggccctgggtggtgcatcagggggctacacgacagggcctgggcccctggtgtcactgctgctgcccagccctatctcttctccaacagtctgccacctgctgttgttggctgcacctctaaggccctagatctgctcatggagagcaacaccatcgtccagtctatggctgccaggacccagtggttctgtagtaagatggaagctgctggattcactgtctcaggagccagtcaccccatccgtcctgtgatgctgggtgatgcccagctgaccttgcatggcggatgacatgctgaagagaggcatctttgttattgggttcagctaccctgtggtctccaagggcaaggcccagatccggatacagatctcagcattgcacaatgaggaagacattgactaccacgtggaggccttcgtggaagtggggcggctgtacagggcactgccctgagctctgagtagggacaagcagagccaaggtccacctactgccataaggtcaaaggaggttttcgatcagcccagaccagaggctctgagccctgaaccagagtcccagagctgggctgggacgtggcctgtgctgagggctgtgagaatgtgaaacaacagtatgaaaattggctgtgaaaaaacaaaacagaacaaaacaaacaacatggtatatccattcagtggaatattattcagccataaaaatgaatgaatttttttttttttgagacagagtctcactctgtcacccaggctgcagtgcagtggtgcgatctcagctcactgcaacctctgcctcccgggttcaagcgattctcctgcctcatctcccaagtagctgggactacaggtgtgcaccaccatgcctggctaagttagcaatacagtacttaaacttggtgaaagtttatataataaaaacctacagtagggaccgggtgtgctggctcacacctgtaatcccagccctttagaaggccgaggcaggcagagtgcttcagcccaggaatttgagaccagcctaggcaacgtggcaaaatcccatcactacaaaaattaaaaatagatatacaaaaagttagccaggtgtggtggcatgttcctgtagtcccagttacttgggaggctcaggtgggaggctacagtgagccatgatctcaccactgcactccagcctgggtgacagagtgagactgtgtctcaaaacaaacaccaaaacctacagtaaacattatatttagtggagaaatgttagattaaatgccttccttttgagaccacgactcactggggaggcttatagtagtatggatcctaattaatactataaggaaagataaacgattacagcatgtaaggattggaagagaagagaaaacctctcctttgcaaatgatatctacctaaaaaattcaacaatcaacaaactattctaactcctaagagattcagcaaggtcgccagttataaataagatcagccaatgaaaatccaaagcatatcatttcacaataggtataaaaatgtaaaatatcaaggaattaaccaaggttacacaaggtctatttgaagaaagctttaaaaactctaatgaagacatagaaaataacctaagaaacattctgtgcttccaatgagatgacaatattataaaagtgaacattctaaatttaatgtgaaaaagcagattacattaatcccaataaaaattccagttggattttttgatgaactcaagcttactttaaaatttgtatggaagggccgggcacagtggctcatgcctgtaatcccagcactttgggaagccgaggcgggatgatcacaaggtcaggagttcgagaccagcctggccaatatggtgaaacactgtctctacttaaaaaatacaaaaattagctgggtgtggtggcaggcgcctgtagtcccagctactcgggaggctgaggcaggagaatcacttgaacccaggaggcggagcttgcagtgagccgagatcgctccactgcactccagcctggacgacagagcgagactctgtctcaaaaaaaaaaaaaaaaagtgtaaattgatgcacctattctggagagcaagaacatacctaagtgttcatgtactctctgacctagcaattgcactgcttggtgtaatatcctaaagagattttcataaaggtccattattgggaattatttttgacatcatggggtcggagacaacctggatatctacacctggagagaggtaaaaatgtggtggatgtagacaatgaagtaacaatagttaaaaaccacagacaagatgtacacttagccatatggctcaatcataaaaaatagtacccagtgaaagcagtaagaatgcatgtgtggggaaaatcatttatattaattaaaatattacaactaacagttcactttatgcaagaactcataacaattttatatattaacaccatagaatggttacctggcatgggggagaagggaatgggagcgggtatagaaataaaacggagggagttgggcggatcatttgaggttgggagttcaagaccagcctggccaacatgatgaaaccccatctctactaaaaaatacaaaaattagccaggcgtggtggtgcacacctgtaatcccagctactcgggaggttgaggcaggagaattgcttatacctgggaggcagaggttgcagtgagccgagatggtgccactgcactccagccttggcaacagagtgagacaccgtctcaaaatttaaaaaaaaaaaaaagaaggaaaaagggaggaagacagagggagaaagagaagaaatttgaaaagaaagtcactttgaatgaatattggtgtgtttgggagctagtaataggcatacagaaaacatacaaatgtggccagactaagtggctcacttctgtaaccccaccactttgggaggctgaaataggaggatcactggagttcaggagttcgtgaccagcctgggcaatatagtgagaccctgttcctacataaaattttaaaattccagcgaggcatggtggctcatgcctgtaatcccagcactgtgggaggctaaggcaggtggatcacctgaggtcaggagtttgagaccagcctgcccaacatggcgaaagcctgtctctactaaaaatacaaaaattagtttggtgtggtggcaggaacctgtaatcccagctactcaggaggctgaggcaggagaattgcttgaacgtgggaggtggaggttgcagtgagccaagatcgcaccattgcactccagcctgggcaacagagtgagactccatctcaaaaaaacaacaaaaaaaattatctcacataagttcagaagtaggacatttccaggattggttgtgagcaagaatccaaattcttaccttttttctttttggggagttggggtctcactgtgttgcccaggctggtcttcaactcctgggcctgggggatcttcccacttcagctttccaagtagctgggactacagatgactgccaccccacccagctctccatttttttgttctgcaaatcttcagcttgtcagctagttaccttcaagttcataagatgactgtaatagtgccagtgatcatgtccacattcaacaacatccagtggaagagggtctgtttctttgcctatgattctcgttgttttttctttttttagacagagtctcattctgttgcccaggctggagtacagtggcacaattagctcactgcagcctcgaactcctgggctcaagtgatcctcctgcttcagcctcccaaagtgttggtttacaggtgtgagccaatgtgcccaaccaggagaaaatcttgtacctcttgtgaactcactttcaacactgctttagtccaactaccaccacaattaccactgagcctcaaactctttccccaactggtctcaagtggccccaacaactcatgtccttgcctaattagcgagcctgtatttctgtatacacatctgtgcatcactgctcccttgctctctaagtgagaaaattcagaaagaagctgaaaacaaggtctacaaaatagcaagaattaaaggtaactctgatgtagataacgttatcttggcagggcacagtggctcatgcctgtaatcccagtactttgggaggcgaaggcaggcagatcgcttgaccccaggagtttgagaccagcctgggcaaaacagcaaaacctcgtctctgtctctctctctctctctctctctctctatatatatatatatatatgcacaaaaattaacctggtgtggtggcgcacacctgtagccccagctacttgggaggctaaggtgggaggatggcttaagcccaggaggcagaggctgcaggcagctgagatcatgccactgcactccagcctgggtgacagagccagatcctgtcccaaaaacaaaaacaaagataacatgatcttgagctgtggaaattattagattgcatattctattggacagtggcacctaggtattatttgttgtttttgtatttgttgctatttttatttacttaaaatctgcctcttttttcttctctgatactacttttatgagtttatactattaatttgttttctctttaaagatctgatcacggccaggcacagtggctcacgcctgtaatcccagcactttgggaggtggaggcaggcatatcacgaggtcaagagttcgagaccagcctgaccaacatgctgaaactctgtctctactaaaattacaaaaattagccaggcgtggcagcacgtgcctgtagtcccagctactcgggaggctgatgcaggagaatcacttgaaccagggaggcggaggttgcagtgagctgagatcgtgccactggactccagcctgggcaacagagcaagactccgtctcagaaaaataaataaataaaaggccgggcgcggtggctcatgcctgtgatcccagcactttgggaggccgaggtgggcggatctcaaggtcaggagttcgagaccagtctgcccagcatggtgaaaccccatctctactaataatacaaaaaattagccgggcatggtggtgtgtgcttgtagtcccagctactggggaggctgaggcaggagaattgcttgaacctggcaggtggaggttgcaatgagccaagattgtgccactgcactccagcctaggtgacagagcgagactctgtctcaaaaaaaaaaaaaaaaaaaaaagatctgatcactggaaaaccctaccttcctttaaaaaacttgaagttcagggctgggcgcagtggatcacacatgtaattccagcagtttggaaggccaatgccgaccgattgcttgagctcaggagtttgagacgactagcctgggaaatatagtgagaccccatctctacaaaaaacaaaaaaactagccaggtgtagtggtgtacatctgtggttccagctactcaagagaccgaggtggttggatcacttgacctgggaggttgaggctgcagagcaccgtgatcacacactgcgctccagcctgggtgacagggagagacattgtctcaaaacaaaaccaaaaaaaaaaaaaaaaacaatatctggaagttcagccattgctctaaaggagtaacatattcatccaactttattaggtgacttccccaataagttattgaaagcaatagtgtaaatgttagttggtccactgttatttcactattattgtactagcagactggtccacatgaaaacatagagaaataagaaatgaaataaatagtctgggcacggtggctcatgcctgtaatcccagcactttgggaggctgaggcgggcggatcacgagctcaggagactgagaccatcctggctaacacggtgaaaccccatctctactaaaaaaaatacaaaaaaattagccgggtgtggtggcgggcgcctgtagacccagctacctgggaggctaaggcaggagaatggcgtaaacccaggaggcagagcttgcagtgagccgagatcgcaccactgcactccagcctgggcgacacagtgagactttgtctcaaaaaaaaaaaaaaagaaaaaagaaataaatacatattacatacatatttgctttcaactgcctcttaccagctggattacaaagaaaaccaaagccaagtattttccttccttcctttcttccttcctcccttctttccttccttccttcctccttttaagacagtgttttactctgtcattcaggctggagtgcagtgacaccatttacaggcatgcatcaccatgcccagataatttttgtattttttgtagagacggtttcaacatgttgcaaggctagtctcgaactcctgatctcaagcaatccacccacctaggccttccaaagtactaggattacaggcatgactcaagctccgctcctaagtatttr

SEQ ID NO: 94749 - DNA, 22788 bp, Homo sapiens
ctagggcctggagcaggtgcctggctgtcaaaccctcatcccaggagtccccgtggcgcagactgtaaaagttttgtaacctgagcgttgagggccacctgacctgaccgcggccggttttagatccttaaggctgaagtcacgttttgtcccgaagggtcaactggggcgcccccacttcggactccacctctggggacaagtcctctcgctctcctgcccttcggtcccttaggaggtggaggtgctgatcccatgtctccccgcccttctgcgtacctgaggccctcgggcaccgctcctgctcagggaaaaccccagggcctagtttcccagacctgacctccccatcaaccgacagcygcgcaggcgctctcagctggcttctgttattcccggtgcctggaaaccgaggcactggcgcgccaagctccgcccctcgccgcgaactcctcggggagacgcgcgcaggcgcagtgcaccagcgacccggggcgaccgggggtgggggtgcggtcagcccaaggtcacttgacccagtcagtgtccggccaactctgcagctcggtccagccctgcccttggggagccggggaggggcgggagaggcttttctggagctccttcaaagaagaacttgtacttttctgagaacgacgctcccagaccttggggtgtgcccttgtctggcaaagggcggaggccctggctgtgcctccgcgtgcttccgccgcaggatgccggcgtccgcccgcctggcgggagcggggctgctgctggcctttctccgcgcgctcggctgcgytgggcgggccccaggtatggctgcacgcgcgcgctccttgcttgtcctcgccaaggctttggaacttgctgccaacgtttttgctacgcagtatctttccgtggtagtttttgtggccaatctaattattttgatattataatgttttactcacgtggtaattctagccgtctctacttagggcccaggaatgactcagccaaatgtaatgatgataaagttaactaccagatcgaaaataatcagtataacctggcttcaacagtaaatgatactctatcttgttgacatcaaaagaaagttcatttttcttcttcgcttcagttcatctgtgtaagccgtttggaacaggcagttcgctttttccctgtaactactcaattcatgcacatggaaaataatgtagacagcagtcatcagtgttaatacttcaacatgtcatattacagctgttacccgttacaaggaaattccttggtggaccctccagatcagtcttttttttttttttaattcctcgttttcatccctagttgactctaccgcctctccgtatatgcagctccagacgtttcccactccactcagggtcccgattatcaactcccacagcttccctcagcagaatttaccggctttctttttctctttctctctctctctgtctctctctcttcttcctcctctccctctctcctctgtttctgtctctgtctgtctccctctctcctctctctctctccttccctctcctctatgagaaagaagggcgactttccattgagttccattgagttctcttgaattagtccttttcagtaccctccgggaattgactccatcactttacccctgcatttttgttttgttttgttttctgttttgttggtttttggggttttttaaakttgtttgttttttgttttttgagacggaatctcgccctgttttgttgcccaggctgaagtgcagtggcgcactcttagctcactgccacctctgcctcctgggttcaagtgattctcctgcctcagcctcccgagtagctgagattacaggcgtctgccactacacctggctaattttttgtatttttagtagagacagagtttcaccatgttggccaggctggtcttgaactcctgaccccaggtgatccgcctgtctcagcctcccaaagtgctgggattacaagcatgagccaccgggcctggcctttgtttttgagacagggcctcactctgttgcccaggctgaagtgcagtggcacaatcactgctcactggagcctcaacttccacagctcaagtgatcctcccacctcagcctcccgagtagctgggactacaggtgtgtgccccccacacccagcttacttcttttttttttttctgtagagacagggtctccctttgttacccaggctggtctcaaacccctggagtcaaaagagatcctcccgcctcagtctcacaaagtactgagattatagacgtgagagacggcaccctgtctgcatcttgttaacttcaagttatacctctccataaactctgtctctttggttttaacatatactcaactttcccctgcaaaacaaaccttacttcccttgacctaactttcatattacagtcccattcatttctcctcttctccacaagacttcttaatggaaatctccacatttgctgcccacatatcctcatctccccgtcattgtccagttcattgtggcctggcttctactttctccactttatttaactacaaagctaccagtgaytttccaaagacaaaagcttcattttttcagcctactcatgtgacattactgattatccacccacttagaatgctcttctcagttctcctgtgccctcttggtttcttctttcatgttcttgctccatcttcttccaagtctggcatttatcttttccccatctactccctaaatttaagtgttttctgaagccctcttatttcatatatatgtgtgtgtgtgtgtgtgtgtgtgtgtgtgtgtgtgtgtgtagttccagacattctcttctttaatgatttcaaccaaatgctgaaatttcaggtttcacctgtgtttaaatgacagccagcttagctttagtctttctcattagttacagactcaaatttcaggactgcccatttgacacctccacaagattgttccttaggaacctcaaattctgtaagacaacataaactctgatcctctcccattctcaaatctgcctctccagtgtgcccttgcatgctcacagcatcagtcttccatgcttccctctttgttgcctcttccttctaactaatcacaagttttattgagttttcttcctttttttctttgagacagtcttgctctgtcatccagatgggggtggagtggcgcgatctcagctcactgcaacctctgcctctcaggttcaagcaatcctcctgccttggcctccctagtagctggaagtacaggtgtgcaccaccacgcccaactaatttctgtatttttagtagagatggggtttcatcagtctcaaactcctgacctcaggtgatccacctgccttagcctcccaaagtgctgggattacaaacgtgagccatcacgcctggcctattgagtttacttctgcaatgtctctcatatatgactcttcctttacatttctgctgccccaggtgagtttttcctcacttctccttgggatggcatagccctcctaacttctgctcttgccttcaatatctgctcttcaaacccatccttcatgctgcaggcaaaataatcagtctaaatatttctccaccccccccagctttattaaaatataattgacaagcaaaaattatatctatatttgcagtgtacaaagtgatgttttgataatgtatgcattgtgcagtgattaaatcaagctaattactaaatgcttctgatcctaccatttccctccccagtggcttcttctttacctatagaataaagttgaaatgcataatttagcatggcatctctacctcccagattaggtccagcctaccttttcagttttgcctccccttaataagccacagagttcaacccagtgagtctcatccctgactgtgtgttaagactacttggaaagcaatatctaggggtgaggcctgaggattaacatttttaaagcttccccaaagatcctgatgcacaagcagggtagcaaacccctggtctagccacaactggctacttgtacttcttcatctccatggtactacattactctaagctccacatactgggagctggtagagcatagcattcatggggattgactctggaaccaaatcccagctccatcacttactggttgtgtgaccttggattaaatgctgtttcctccaagaactctttccctgtcttcccaatcagaattaatttgtttgctcctttgtaatattttctgtccttgttatagcacagggctggttcctgatgagctctcaatggattttcatggaattaaattatcatgccatatattttattgtcattatttgcatgcatttgtgcccctacactaaattaaaaactctttgagggcaaagattttatatcattcatctttgtatatcctagagtgccccattcgtattagacactcagtaagttttgaattctataaactattttttaaatgaattttagagaaagaaataccattagcaagatactctatttagagttattttcaaatattgccaagtacaacattcaatccagcttgttcaccaccaaccccccacctctcagcactaaggttgtatgattctctaggatatggatcctcactctagcggggaactagcagaatgatgaatttccgtgcctactgtcacaaacccatatctcattgtcaagtctgccaacctggcatattcacataaggagtctttacgttatgaagaggtgtaatgtatacagtcaatccacagaggatcaataaacaccacagttttccttcacacacatgaatcataagggtagctggattcaaatgtttacacatcaactctaattttaaccatcttcatccacatcccccttgacaattccctgttcccaaaataaattcgtgtagtttggccatttggcttagattgactgaytcaactgtaattctggagccatgagttattttgcttgtgctcttgctttatttgtgtagttagctggttatttgttcaagcattatttgacattttcttagtaaaggagaccggtgagtagcttccagaagcccagaagcagacataacctccattgggacctcctgtgcacttatgccccgtaatcccctattccagattgttatgacccaaactttaaggagaactgaatgaaaaaggacagaaaggttaaatgtatcctactcaacatatttatgatgtttatttatttatttattaatttatttatttgagtcagagtctccctctgttgcccaggctggagtgcagtggggcaatctcggctcactgcagcctccacctcccaggttcaagcgattctcctgcctcagcctcccgagtagctgggattacaggcgcccgccaccatgcccggccaatttttgtatttttggtagaaacggggtttcaccatgttggccaggctgctctcgaactcctgacctcaagtgattcgcccgtgtcggcctcccaaagtgctgagattacaagctatttatgatgtttaatgtgtgctgtttgtctctcacctccagaattaagctcctcaggacagggatcctgttttgttcactgatgtttgcctggtcacctagaacaggtgcctggcacacagtagctgtcagtcagtatttaattgaatgattgaatgtatccccatgtacttcttcgtctatgcctttctcctcatgagaaaatgagaagagggttgcgcttgttgactgagatgcgatgagggctaggtttgtggaggcccagccgagttcctggacagatccccaacccaaagcttttgggttgccggacaaccgcgtcctgaaatcccaccttctgggcgggcccgggccgaggcgccgtctctgattggtcagctggaggtgatgggcatgagcgacagcgaaggagcagctacacactaaacttccgggcgcggaggtttgcgcgccttggtgagccgttggcgtggtggtcccggagtgatcctggcagccggtggggaagacaaggagggtgagccgccaggggcccccagggtgtgcttctcaggtcgattagccctaaaatgttagtagcaggggattctgggagttagtagcagggaattctggtagtgagggagcgggaccgggcatggatgtaaggaggtcatcggtcctcaggttatttccccagaagaggcttcagcgggcagctgcgatccgaagctccctctcccggcgtctggttcttccttcacacacaccttatcacatccactcacgtttccatttccaggaccttgaagtcggggagaggtcgcaatggttaaggatggacaggggtgggtgtggccctttctgactcaggcttgcgggtcctggaataatagcccttcactcttctgctttcctggtttctgacaggtttgagcatggcagaaggaaacaccctgatatcagtggattatgaaatttttgggaaggtgcaaggggtgtttttccgtaagcatactcaggtatgkggcctgcaggctttggggtggtaacctaggttgtgggcataggaacaagggacgtgttcttgacaaatgtgaactagaagccgctggctatttggtagctrcatggcaaagaggtagtttgtagascaatgagtatgaaaatgctgtgcaatcggtaaaacatggtgtaaatggaagatcaccctgctgttattattagtcagtggtgcctgagcatctagatacacatattaatgagcttctctcttccaagggaaatagagggcttccccagtgctcgccgttgtggcatcatcaaaccaagtcaggtttcttatagaaaggctaacattgattgaagagctggcatttagatgacctgatgtcatgtatataacatatataaatgcttcctctgcagctgctgcactttcttcagacctctttctccaagcttccctcagttctccacttaatttctttctattcttttttggttttgaaagaacatttaccttttccagctgacgtttttcttattaaaaactctttatccattccagaatagrtgatgggaacactgaatgtggagcctggtattcttcctagagcaataaaggattatttgaggggatggacaaactgttggcagcctctacctctgctttaatgtggctaatcttccctcaacaggcacacacaaatgcaagctcaatttaccctctgccttctgtaggtattggctattgccttcccagtgtgtcgctaatcccacagataatgagttaggactgcaaaacttctttttttttttttttttttttgtatttttagtagagacagggtttcaccatcttggccaggctggtcttgaactcctggcctcgtgatccatccgcctcagcctccccaagtgctgggattacaggtgtgagccaccgcacccggccaggactgcagaacttcttaagtgtctcattcctgggactgtggtacttaaaattcaaattctaacctggaaggaatctttgaaacatgaatgtgaattgtcaatacctctttccctttttcttttttttttctgaaggatggtggcacagtcacagcttattgcagccttaacctcccaggctcaaatgatcctccttcctcagcctcccaagtagctgggaccacaggtgcatgccgccacacccagctttttttttttttttctcttttaacagagagctatgttgcccaggctggtctcaaactcccrggctcaagtgatccttctgcctcggcctcccaccartgtgctgggattacaggcatgagtgaccatacccagccaatacctctttttcttttcttttcttttttttttttttttttttgagacagagtttcattctttttgcccaggctggagtgcaatggcacgatctcagctcaccgcaacgtccgcctcccgggttcaagcgtttctcctacttcagcttcccaagtagctgagattacaggcatgtgccaccatgccccgctaattttgtatttttagtagagacagggtttttccatgttggtcaggctggtcttgaactcccaacctcaggtgatctgcccaccttggcctcccaaagtgttgggattacaggtgtgagccactgtgcccggccaatacctctttttctaattattcaaaaatcatttcttcccatctgacactcaaataggaaatgactgttgaaaacagaattgctgaaactcacagcaagagctgtgttccagttagctttgctaccagttatgcaggtaagttcctgtaaattaaggtgattgagataacagcttcaaagattagtcaaagttgttgagggaaaagggtcagatagtggtatgcatagcccatctttctctacctgcccctctccccagtttaaagagagaataacagaatgcagaaaaacaaatattgattggaaaactgcatataaaatgacatctattttttcttaattaggcttgtagcttattctttactatttataatcatttaaatatatatgttcatttgaacagttgttttgctgcaatgtttgctgttgatattatctagcctcttatttaaattccttcatttctagagaagtgacaaataataattcagggacttttgaaaacttggaatataatttacatcccataaaacccatcctcctaaagtgtataatttggtgatttttagtatattcacaaaatgttgcactaattccagaacattttcatcatcccaaaaagaaacccctacctaggttagcactcactcctcatcccctgagcccctggcaaccactaacctactttctgtctctatggatttgcctattctagatttttgttgttgttgttgttgttgttgagacagagtctcaactctgcctcattctgtcacccaggctggagtgcagtggcgtgatctcggctcactgcaacstctgcctcctgggttcaagtgattcttctccctcagcatcccaggtagccgggattacaggcatgcaccaccatgcccagttaayttttgtatttttagtagagatggggtttcaccatgttggccaggctgggtcttgaactcctcacctcaggtgatccacctacctcagcctcccaaagtgctgggattacaygcatgagccaccgtgttcagcctattcttgatatttaatataaatggaatcatacaaatgtggcctttttttgtgactggctcctttcacttaacatattgttttcaaggtttatctacactgtagcatgtattagtatcctattcctttttatggctgaataatattccattgtatggatataccacatttcatttatccattcatcaattgatggaaatttgggtttctgatttttggccattatgaatagtagtgctgtgaacacatatgcacatatttttatgtagacaatgttttcagttccattgagtatatacatacctaggagtagattgctgggtcatatggtaactttatgtttagctttttgaggaactgccaaacttttccaaagtagctataccatattatgttctcactggcaatgtgtgagaattccagtttgtccacatccttgccaacaatggttactgtcttttatgttagccatcctagtgggtatgaggtaatatttcattgtggttgtttgtttgtttttcaggtattaatgaatttaaaaggatttaaatcaaggaatgttctccaactacagtggaactaaaccacattaaaaaaataaaaaggataactggaaaatcccaaaatatttggaaaccatatagcacacttacttctaaaattgtggtagaatacatataacatagaaattattgttctaaccatttttaaatgtacaattcagtggtcttaagcacattcacattgttctgtttatctacagaacgcttttcatcttgcaaaactgaaactctgtattcattaaacactaactccccattttctccttcccccatgcccctgacaatcataaatctacattctattaattcaactgctctagttacctcatataagtggaattttacagtatttgtccttttgtggctggcttatttcacttagcataatatcctcagggttcatctgtgttatatcatgaaagtaaaaacaatttcctttctttgtaagacggaataatatcctgttgtatgtgtatactttcagtgtggttttgatttgccttcctaatgactaatgatgttgagcatcttttcatgtgcttattggcatattttatgtctgctttgaagaaatgtccattcaaatatttttgcccatttttagttatttgcctccttattcttgagttgtaagaatatttttattctggatactagtcccttatcagatgtatgatatacaaatatttctcccattctgtgggttgtctttttaatttcttgatagtgtctgtgaagtacaaaagtttttacttttgatgaagtcaaatcaaatttatctgttctttttttgcttgcacttttagtgttatatctaagaaatcttcctaatccaaggtcatgaaggttcatgcctatgttttttgtttgttttgtttttgttttttgtagcaactgggtttccccatgttgcctggctgatcctgacctcaagcaatctgcccacctcagcctcccaaagtgctgggattacaggtgtgagccaccacacccagctgctgtcatgcctatgttttcttttcctttttttttttttttttttttttaagacagagtctcgctctgtgcagtggcgtgatctcgatctcggctcactgcaaccttccgcctccagggttcaagcgattctcctgagtagctgagattacaggtgtgctatatcacgcccaactaatttttgcatttttagtagcgacggggtttcaccatgttggtcagactggtctcgaactcctgacctcgtgatccacccgcctcagcctcccaaagtgctgggattacaggcgtgagccaccgcgcccagccgcctatgttttcttcaaaatttcatagtttacactcttagattgaggtctttgatccagtttgagttaatttttatgtgatgtgaggtaggaaatccagctttattcttttgcatatgaatatccagttgtcccagcaccatttgttgaagtgagtattatttcccacatttgtcatagcacccttttcaaaaatcaacataaatgtaaggatttatttctggactctcaatactattccattcatctatatgtctgcctgctgtagttgagatgtttgtccccttcaaatctcatgttgaaatttgatccccagtgttgaaagtgggacataatgggagatgtttgagtaatggggccaggtccctcatgagtagattaatgctcttcctggggggtgggagggtcaatgaagtcttactctattagttccctggagaactggttgttatttttatttattttttttgaaacggagtcttgttcttgtcgcccaggctagagtgcagtgacacaatctcggctcactgcaacctctgcctccagggttcaagcaattctcctgcctcgccctcccaagtggctgggattacaggcacccgccaccacacccagctaatttttgtatttttagtagacacagggtttcaccgtgttggccaggctggtctcaaactcctgacctcaggtgatccgcccgcctcagcctcccaaagtgctgggattacaggtgtgagccaccgtgyccggtgagaactggttgttaaaaagagcctggtaccycacctcttcccacccctgcctcacagtggaaacagcctaaggccctcacctgatgccagtgacagtctcatgcttatacaatctacagaatcatgagycaaataaacctcttttctttataaattacccagcctcagcaggtagtttttttttttttttttttttttttttgagacagagtcttgctctgttgcctaggctaaagtgcagtagtgcgatctcggctcactgcaacctccacttcctgggttcaagcaattctcctgcctcagcctcctgagtagctgggattacaggcacccaccactgcgcccggctaatttttgtatttttaatagacggcgtttcaccgtcttggccaggctgatctcgaactcctgacctcatgatccccccacctcggcctcccaaagtgctgggattacaggtgtgagctaccacgcctggtcctcaggtagttctttatagcaacacgaaatggtctaagccactatccttatgccagtaccacactgtctcagttactgcagctttgtagtaagttttgaaattgggaagtgtgaatccttcaactttgtttttccttttcaagattatttctagctatcctgggtcccttatgtttccatgtaaattttagtatcaatttttcgatttctgcaaaagcactgggattttgatagagattgagttgaatctgtagatcaattgggtagtaatatcatcttaacaatgttaagtatttcaatacatcagtaagggatgtctttccatttatttagatactctttaatttctttcaagaatgttttgtagatttccatatatgtcgtgcaattcttttgttaaatttattcctagacactctatctttttgatgctattataaatggaattgtttcctaatttcattttcagtttttcattgctagtgtatagaaatacaattgatttttgtatatcaatcttatatcctacaaccttgtgagactgttaattagctctagtgtgtgcctgtgtatgtttcttaggactttttgtatacaagatatgtcatctacaaatagaggtagttctgctttttcctttccaatctgaatgccttttctttctcctgctgtggatagaccctcaagtataatattgagtagagtggtaacagcagacatccttgtcttgttcctgatcttcgtgggaacgtttttaatctttcaccattaagtatgatgttagcagtgggtttttcacagattccctttatcaggttgaggaagtttccttctgttcctagtttgttgagtgttttgatcataaaagaggtattggtttttgtcaaatgcttttttgccatctattgagatgatcatatagcttttgttttattaatatggtgtattaaattgattacttcttgtatattgaaccaaccttgaaagaaatcctagtttgtcatggtrtacaattctttttctgtgttgcctgatttggtttgctagtattttgctgatgatttttgcatctctgttcataagagatattggtctatggttttttggttgttttttctcgtgacagctttgtttttgggaggctgaggaaggaggatcatttgagcctgggaggttaaggctgcaataagctgtgactgtgccaccatccttcagaaaaaaaaaagaaaaaggaaaagaggtattgacaattcacattcatgtttcaaagattccttccaggttagaatttgaattttaagtaccacagtcccaggaatgagacacttatttttcatttttattttttagctttagttttagtatgaggataatgctggcttaataaaatgtgttgggaagtgtttcctcttcttttttttaacccttaattcttggtttggatcttcttctattttttggaagagtttgtgaagggttggtaaaggatttttttttaaacatttggtagaatttacccatgaagccatctggtcctgggctttttatctgtgggaagtttttgattacaaattccatctcttggtataggtctattcagactttctatttcttcttgattcagttttggttgtttgtctttctaggtattaggtttgttttcatccaaaaaaatttaatctaattttttggcatataattgttcatagaattcccttttatcctttttatctttgtaaggttggtggtaatgtctccttttatttctgattttagtaatttgaggctttcatccgtttttctttatcagtctagctaaaggttgtcaattttgttgatcctgtcaaagaagcaacttttgttttattgattttctctattcttctgctttccattaatttctgctctaatctttatttccttctttctgctcattttgaattcagtttgctcttctttttctagtatcctaaggtggaaatcttgattattgatttgaagagagtttctttttagattgcaactagaggtggtgattacagtccttgaaatgttgtcagatgattgtttaagcaaaaatatggttatgaggtagaattcactttttggaattttcttaggggagaaaaaccctgttggtgcaatagatattcaaaactgaacatgagtcaataacattatgtcatcattaaaaaaataagaacagagttgagcacacaaatgaaaccagtaggaaacgcccattctcaacactggtcaaattttggagtgttctgttcaactctcaagagttcagataaggccaggtgcagtggctcatgcctgtaatcccagcactttgggaggccgaggcaggcggatcatgaggtcaggagatcgagaccatcctggctaacacagtgaaaccccatctctactaaaaatacaaaaaaattagccgggagtggttgcgggcgcctgtggtcccagctactggggaggctgaggcaggagaatggcataaacctgggaggcggagcttgcagtgagctgagatcacgccactgcactccagtctgggcgacagagcgagactccgtctcaaaaaaaaaaaaaaaaaaaaaaaagagttcagataaatcacattgcaaatttttaaagatttatttgactgtgacaacctcctgtttaaaactgcacattcttacagctatttaccatataagataactcttaagaactggagatagtcagctcccctgggttaatttgaagcagaagagggcagttgttatactgccctgtcagttggatgcggagtcttactcaaaattcattctcagcattcttcttttatggtatcttctttggcacttagcagcgcatcaggtaggcatcttctatttttcttcattccttaatttcctttgtatccctcaaatggttatttatttggctggagtctgttttgttcattaagcaaacatgtctttgctttgaacatgtctttgatttgatggatacttaaattcctcatcaaacattttgttgctatgcataacgttttctttggccaactccagcaatttcccacattttgacatgcaatcatgttaactcccattttcttttgtaatccaacatcttctatttagataattactttaacaatcaatgacttaatattctaatcataaatttatacaaaaataaaattacctccaaaacattgctacctttcctaaacattcagtcttgccacagtttaataaaaggaaagaacattaaaaaggataagacactgtaatgattagatgctttttataagcctaaaggcattgtgattatttagacagaagagaagaaagtgaagtgaaaacctgatagttatgtagtctcatggtttgctgttgagaggctgaacaccagctgctttccttttctaggaagataataaagtgggctttggctacaacataaagatgttgggttagacagtttcactacagtaagaacaacgggatgagttgcccaggaaattgtgaaatactttctaatgatctttaaagatataatgaacactaattcatctggatttgtttasgtgtggtcctggttaaaggcaaagggaaggatcagataacttcatgttttttccatttaacatacccaatagattcttgattaggggaagggaaaatgagcaagatacagtccagtattctaaaaacaatcagccttaggggatcatttcaaaagcatctgttttggacttaagtctttgatacttaaccaaattgactacacagtgaaaaattctagtgcctgggttttatagggtagaagaaagacatgcagtcaagtggccaatacttcatgtgaagataagcaatgagatccttcttgctgtctttcttttgactgttctgggcaatatcaaattagtttcagtggcttgattctaggccaagattctggcaacagattgtagtcttaccttgttttcttcaatctcactggatctctctctctttttaccccccttaggctgagggtaaaaagctgggattggtaggctgggtccagaacactgaccggggcacagtgcaaggacaattgcaaggtcccatctccaaggtgcgtcatatgcaggaatggcttgaaacaagaggaagtcctaaatcacacatcgacaaagcaaacttcaacaatgaaaaagtcatcttgaagttggattactcagacttccaaattgtaaaataatggcctgaatttaagttttctaagataaactcagtggtttggtttttattattaatagagatagaactattgtgtgttaatrttagcattagtcaataagttattttaatgtcagatttttgaatgttattatatattacctgtatgatggaaggattaccmctgtacacaaatctaatcaataaaaacgttagaaccttctgcttagagtacttttaaaaaatcttcagtgaacttccttttgggcgaaatgagaggtctttattcagtaaacatttgtaggaagaggattttgaggtaatttaaagaggtctgaaagaaaaaaagtctgagtcatttctttaaatggtttctatgaaatgttcttcaagaaattccatgcctaataagaacaaataccacaagttcaatttgttagctctgttcaccttatgtttggatgaattacttctgctgttgtttcttttctctgggtaaggaattcacataaagttatgttatgggctgaactgtgtcccaccaaattcatatgttaaagtctcagtccccagtacctcagaaagtgactgtatttggacatagggcctttaaagaggtgattaagattaaatgaggctgtgagggtgggccctaatccaatctgactggtgttcttataagagaacatattggctatagacacgtgtgcaaaaatcaaagaccctgtgaaaatggccatctacaagccaaggagagaggcctcaggagaaatcgttgctgccaacaccttgatctcagacttccagtctctagaactgagaggaaatagacttctgctgcttaagctactcagtctgaggtattttgttatggcagccctaggtatagtaataatcataaacagttatcaggattttgcttaatcagccctagaagactggttggttgggtttggttagtcactaaactagcatatatcaaatgcttaccaggtctgacaaattcgttataaattccactttaaattctcaatgaaaatgagatagaaagcaaaaactaaggactggttaacaattccaaaacactttattctcacagcattctcagagttctgctctcctttagttatttttataactaaaagctgtggtggcactggggagattcaagtcagtgaagagagtcttggtgttgtcatctgtaaattaagagttgagcaaaggccgggtgcggtggctcacgcctgtaatcccaacactttgggaggccgaggcgggcagatcacctgaggtccggagttcgagaccagcctgaccaacatggagaaacccccgtctctactaaaaatacaaaattagccgagtgtggtggcgcatgcctgtaatcctagctactcgggaggctgaggcaggagaatcacttgaaccctggaggcggaggttgcagtaagctgagatcgcaccactgaattccagcctgggcaacaagagctaaactccgtctcaaaaaaaaaaaaaaaaaaaaaagagttgagttagacagtttctcagccttttccagctccaaatgccataattctaagatggcaggctctggaattattcattcattcggtgcctaccataggccaggcactgttcttggtaactgggatacagcagtaaacaaaatatataaactccttaccttcacatagcttacattctagggagagaagacaataagtaaacacataaaatatatattgaattaaacggtagttaagagcaaaggtgaaaatgagaaaaaaaaggaaagggaaaacacgggaaaaaaaaataaaaacaaaagtaaaagttacgacatagtctttaacaccatgccaaaagggaataaggattgagactgtaggtaccggttcactgaaccctgggatgcggatccttggctggaacaactggtgcgcatgcgcactggtgtctcgcggcctggcgcgccccctccgaagcgcatgctcgtgggcacgcacgagcctcaagatccaaggtgcgcgcgtcggcgtccgaggcggttggtgtcggagaatttgttaagcgggactccaggtgactctgggggaagcacgcgacgaaaagatgatgccggggtctcttctaacaccagaagggccctgatgatggctgcgcgcagctttcggagccggatgcgcgagggccccggaggcccggcggcctggcggccgggcgggcccagtttggggacaaggacggggctggccagggaggggctgggcctggcgggaaggcagcgctgccccggactcggcccgcgcggccctcccaggcccccgtgccctggatccaggcccgtgcgtcccgtcagtcccaggcgctgggaggcgtcatcaggaaatcattgggtttacattaatcggaatacttgttaaacgtttacccctcagttgctgccggctgcttagtgcattagcttagaaagcagcagaaattctgcagttaagagccctgatttgtcccgagtttggaaaaccggccccaccgcctgcaggggcccacccacgtggctctcactgatggagaagaaggggagacctttaatggcactggaatcttagggtttggttttttttgttttgttttttgtttttgtgttttcacttgcaggaaaacttaaaatcaagttcaggcagccccatgccatcattattattaccaaggtagtttatgcccatctgtaaagaccaaaagaatattaataatgaccttctggccgggcgcggtggttcacacctgtaatcccagcactttgggaggccaaggcgggaggatcacttgagttcaggagttcgagaccaggctggttaacatggtgaaaccccatctctacataagagacaaaaattagccaggcatggtggcgagcgcctgtaatcccagctactcgggaggctaaggctggaggattgcttgagcccgggaggtgcaggctgcagtgagccgagattgtgtcattgcactccagcctgggtgacagagtgagactgtttcaaaaaagaataataacgactttctaaaaacatcagagtaatacatgaacaggatttaacaatcaaatggcaaagaaaggtttatatgaaaaggaattttcctgctttatcttttcccattcccagcctctttccctgaggtgactatacttaaccataataataataacctcttaatgcccccaatctctctttgatacaatttgattcttaaaatttcttcctattgcttcaccttattacaatgtcttagcaattcattataagtatttttctaaaagtcatggttattgtgtaatgtataaatgttatgaaactagcttggacatttttgtcatgaataatttctagctaatgttccttagctgtatttaatttaggcatctgtttttggtgaagtggttagaatttcgaatactgtgtttactggtcaacttcaagtgtaattatgatttcactttaggacatgtgggatttagaaaggagcattgaaaattatgaaattatgaattttttttggatgttaatccattgcaccaagcatgagctgtgcctagagatcagcggtataactttgttttgctttgtttcacaatttggtttaataagagtgatttcatttacctcaagtgctatttcttcataatgctgtgtaatgctaaagctttgattatgtgcgtgtgtggtttttttctccaataggcaattatttccagtcagagaaggaaaccagtgcctggcattctcaccatctttctacckaccatgatcargtgcttgtcagttgaagtacaagccaaattgcgttctggtttggccataagctccttgggcsaatgtgttgaggaacttgccctcaacagtattgatgctgaagcaaaatgtgtggctgtcagggtgaatatggaaaccttccaagttcaagtgatagacaatggatttgggatggggagtgatgatgtagagaaagtgggaaatcgttatttcaccagtaaatgccactcggtacaggacttggagaatccaaggttttatggtttccgaggagaggccttggcaaatattgctgacatggccagtgctgtggaaatttcgtccaagaaaaacaggacaatgaaaacttttgtgaaactgtttcagagtggaaaagccctgaaagcttgtgaagctgatgtgactagagcaagcgctgggactactgtaacagtstataacctattttaccagcttcctgtaaggaggaaatgcatggaccctagactggagtttgagaaggttaggcagagaatagaagctctctcactcatgcacccttccatttctttctctttgagaaatgatgtttctggttccatggttcttcagctccctaaaaccaaagacgtatgttcccgattttgtcaaatttatggattgggaaagtcccaaaagctaagagaaataagttttaaatatmaagagtttgagcttagtggctatatcagctctgaagcacattacaacaagaatatgcagtttttgtttgtgaacaaaagactagttttaaggacaaagctacataaactcattgactttttattaaggaaagaaagtattatatgcaagccaaagaatggtcccaccagtaggcaaatgaattcaagtcttcggcaccggtctaccccagaactctatggcatatatgtaattaatgtgcagtgccaattctgtgagtatgatgtgtgcatggagccagccaaaactctgattgaatttcagaactgggacactctcttgttttgcattcaggaaggagtgaaaatgtttttaaagcaagaaaaattatttgtggaattatcaggtgaggatattaaggaatttagtgaagataatggttttagtttatttgatgctactcttcagaagcgtgtgacttccgatgagaggagcaatttccaggaagcatgtaataatattttagattcctatgagatgtttaatttgcagtcaaaagctgtgaaaagaaaaactactgcagaaaacgtaaacacacagagttctagggattcagaagctaccagaaaaaatacaaatgatgcatttttgtacatttatgaatcaggtggtccaggccatagcaaaatgacagagccatctttacaaaacaaagacagctcttgctcagaatcaaagatgttagaacaagagacaattgtagcatcagaagctggagaaaatgagaaacataaaaaatctttcctggaacatagctctttagaaartccgtgtggaaccagtttagaaatgtttttaagcccttttcagacaccatgtcactttgaggagagtgggcaggatctagaaatatggaaagaaagtactactgttaatggcatggctgccaacatcttgaaaaataatagaattcagaatcaaccaaagagatttaaagatgctactgaagtgggatgccagcctctgccttttgcaacaacattatggggagtacatagtgctcagacagagaaagagaaaaaaaaagaatctagcaattgtggaagaagaaatgtttttagttatgggcragttaaattatgttccactggctttataactcatgtagtacaaaatgaaaaaactaaatcaactgaaacasaacattcatttaaaaattatgttagacctggtcccacacgtgcccaagaaacatttggaaatagaacaygtcattcagttgaaactccagacatcaaagatttagccagcactttaagtaaagaatctggtcaattgcccaacaaaaaaaattgcagaacgaatataagttatgggctagagaatgaacctacagcaacttatacaatgttttctgcttttcaggaaggtagcaaaaaatcacaaacagattgcatattatctgatacatccccctctttcccctggtrtagacacrtttccaatgatagtaggaaaacagataaattaattggtttctccaaaccaatcktccgtaagaagctaagcttgagttcacagctaggatctttagagaagtttaagaggcaatatgggaaggttgaaaatcctctggatacagaagtagaggaaagtaatggagtcactaccaatctcagtcttcaagttgaacctgacattctgctgaaggacaagaaccgcttagagaactctgatgtttgtaaaatcactactr

SEQ ID NO: 94750 - DNA, 117431 bp, Homo sapiens
  misc_feature (1)...(117431): n = A,T,C or G
gatgctcctccatcagtctaactacctgtattttttccatagcaattatcatagtttgtaatgctatatttaattgtatgcttattggattagattgcttttcattgttctcaccaggatgtatgctacctggtagtaaggcctacacctagaacaatgcctataatatagcaataacccttgaaatattttttagtgaatgaatgaatggataaatgaagtggctaagctataactggaaaacatttaattgccctgatctaaaaaattataaaatattatttcatgcataaaaaattatatataatacatacggatattttaagcataacaataaaataaacactcatgttacatcaattcaaaaggtaacacattacctatgccctctgtgtgtccctccctgatcacgtcttaatcctagagctaaacaataggttgcattttgtgtgtatcattcctcttctttttttggtcattttaaccaagtatagatattatatattattgtttcagaatattgtgtcaatggtgtcatatgtagataaactttggcaatttgcatttgttgttcaacatgtttctgagatttgtcttcactgaattatgtagttgtggtatattttcactgacagttttccattgattgagtaaaatgcaattagtgaaagtatttaaatgtccgtaaatgtttgagttctttccaggcctttgctattgcaatatgtactgctatgaaatttcttgtgcatagctcttcgtgcaaatgtgcaagagtttctctagtgttttacaagttaatgccaaattattttccaaagtggttgcaccagtttacactccacaagcagtatgtaagtctgcctcttgacatttgcgaaacatttgatgtgatcagatgtttaaaattttgcctgtttgatgggtgtgtaaatttgcctttccacttttattagtgagggttgagcttaattattattaaggttatgttaattattcttaattaaggattattgagattgagctccttttcatattgatgattcttctgtaaaatcactgcctgtttatatattttgcccatttttctatttagttgtcttctgattttttcgaagttcttgattctggacagtaattcttctatgattaattggttgtcaatatgttttcccagtttatagtttgtcttgtcatggtctttgtggtattttttgataaatacaagttcttaattttaaagtagttagagttttttcttttttcgagatagggtctgactctgtcacccaggctggagttaaagtagtttgatttatcgatcttttattttatggcttatgctttggttttaagaaaattttccctattcagatgtcataaaatgactctcatattttcttccaaaagtttgaaagatttgcctttcatatttcagctttttattcacctaaaattgttttttgtgtatgatataattgtattagtttcctatggctgctataactaattaccaccaacctagcagcttaaaacaacataaatttattatcttacagttatggaagctagaagtctgaaatagttttcactgggctaaaatcaagatgtcagcagagctgcattcctagaggagaatttttaagttttttttttttttccaagttctatagggtgctggcttatggccccatttcatattgaaagccagcagtcagccaggtgtggtagctcatgcctgtaatcccagcactttgggaggctgaggttgtccttgagtctaggagttccagatcaccctgggcaacatggtgagatctcgttccaacaacgacaacaacaaaaattagctggcacacagctgtagtcctagttactcaggaggctgaggcaggaggatcacttgaacctggaaggtcaagggtggagtgagattctagctcaaaaaaaaaaaaagtggctggttgcatccttgcatggcatcactctgacactgaacttctgcttccctttttcacgtagaaggtcccttgtgattacaccgagcccacggaggtaaacgaggataatctccctacttcaatatccttaaattagttgcatcaaaatcctttaggccatgtaaggtaacatgcccatatgttcagggaattaggatgtggacgtctttggggaaacattattttgcttcccattataatcaattgattcagcacaacttcttgactctgttctgaacctgggttcagagggacactggtctggtgacaatgataatagtaacaacaaacacttgtgccaagaatgtttctaagcattgtatgcatattatctcatttaattttcacaacactttgtactaagtgctactattattcctagcttagcgatgagtgaagtgaggagcagagaggtgaaatactttgctgaagatagggagcagcagagtttgactcaaccccaagtacctgagcttcgaagtccatgtgcttagttagcaccatgctatttttttttttaattttattttttgacagggtctcattctgtcgctcaggcaagagtgtagtgatgcaatcttgacctcctgggctccagtgatcctcctgcctcagcctcccaagtagctgtgactacaggtgtgcaccaccatacctagctaattttgttattttttgtagagacgctatattgccagggctggtcttgagcccctgggctcaagcaatcctcccacctcagcctccctagtagctgtgactacaggtgtgtgctaccacgctcggctaatttttgtattttttgtagagacagggtttcaccatgttgcccaggctggtctcgaactcctgagctcaagcaatccacttgcctcagcctcctaaagtgttgagattacaggcgtgagacactgtgcccggcctaccatgctatttttaaatgaataaacaaagtggataaatctagtttcagttagctgtgtgttcatgactaagtcacataaattctctgagcctcaatttcattatttgtaaaattagaatagtgatgcagcttttctgcattccacagggatgatttgagggcacgttgagacaacatgcatgaaagcagttcagataaggaaaacagagatccaagagtcattctgccacatgtcactggcagagccaggacagggactcaggtttcctggcagccaggctgggcaggctacttccaccacagagtggtaattagagcagttacaaattccagtcatcaaattgaacattttcccttcatcaccctcctgccctggaacggccaacattaaagccgtatctgtatattcaatcaattgttcattaagaacgccctccagttttagaagatactgttacaaaatccaaatgtgagataatacttcttagctggaacagggtaaagttgacaggtaatattttgtatcatttacaaatcaaaaggcagagaatttcagaaattgacagaaaggggaggctgtaagatatctgcttaagaaaaccacctcctcatgtgtttgcctcttttccatcctcatcctatgtttctgtcctcttctacttcccttcacttttccttagtaaagcagggattagaaaacctgaattttagctgtgggcatcattattgaccattttgctttgaatttcaaaggcaaaattgaagaacaaaagagccaagagtgggagattcactctaccagatcttaggatgtataattaagccacagcaataaaatcagcacagcactagcataggaacagatctagatcaatagaatagccacaagagctcagagacagacgtgtgtgtctctagggacttggcatacgatacagacgccatcatgcatctgaggggaaaagatggattgtttggtgggtgctgctgggaaaactggctcactaaatagagttaataatactgtattcctgctcaaactgtatgcaaggtgaaccccaggtggattaagacctgtgacaggtaaaagtatgaagccaactaggggaaaatgtaggagaatattttgcgactaacaggtgggaaaagattcttaaacaagaccccaagaccacactgcacaaggctaaaatttgatgcattaggctaaatgaaaattaaggatttctcctccattgcagcatagcaaagaccaagcaaacaggatgcatgaaagattgagagaaatatttgcagtgtttttctaaaactgacaaaagattaatatttagaacatataagaaactcaactgcttcaattcattcagaaaaaataataaaatccagcagaaaataggtaaaggatgtaaatagataattcacagaaggaaaacaatctcgatggttcttaagtatatggaaaaatggttaacaccaccaatcaaaaaaatacaaatcgaaattacaatgtgatactactttactgatttcagattgacataaattaggacatcggataataccaaatgttagcatataaaatgggaaacgggtaccttcctaccttcatgtgccattggtgggtgtgaatggcaaagccatctggaggccaacatgacagagtgaaaccaaacactgtggacttcatgacccagcgactcaatttcttatgttctgtaagggacacgtctaacatccattccagcatggtctgtggtagtaaggaactgctggcgacctaactagccgttatttgaggaattgataagtagaatatgatagacacacaaatcaaatattattattagtcattattaatgaactcttgttgtatagtgtcacatggatagatctctaagacactgagagaaaaacaaggaacagaatgagttctcatcacaatgccgttcatatatgttaaaaacagacacaaaccatgtatcttttgaggctgtatacggtgcatgaactgggacataccttaatagaggagagggtgcatatggcgggtagaagaatgggtgtggagaaggaacgagtaaaaaataaaaacaaaaaagaaaagggccttgctgactgacgagctgaacagtacgaacttgtccccaaggtccaaaaaaatcgccccaatcccccttccatctcgtcccattcttaacagaaccaagtgcaagggactcagcgtggctgtccagagcagggcttttcttcatcaaggacctaggtcctcttccttccacccacctcgccacgccctcggtgcccgagccccgagctctacttcgacggcacttttcaaacacaaccaaacacacccaggcttcaaccccggaccggcttgcttttattatttctcttgggaaagccttatcggtcgctaagattcagtttaagtgactcttctctgggaggccttttccgaatgctgcccttgaccaaaagccagcccctccagggctgtattcccacagccccctcccccgtcagccgggcaccccgcgtcctaactgcttattttgggcactcagcgctcccctcagggctggagttgtgctggggggggtctctgggttcacggcccgccagctggggtgggcggtcctgggaataactggacagttaagtcagcaggtacagccgcagcccagccagctccctctcctctgcttccgctctcattggctcagcctccccgccccccagcccccgccccccagcccccctccccagcgcccgcccccagcgcccgccctcagccggctgcgggaggcaaaaggctctgcgcacgcgctgtggggtggggcacacttggttgggggcggacgggggtttaggaggacggcgaggagcgggcgcagaagggtggcggggccgccgggtcgttgcgcggcagttgcgtccggcctcttgcgcgcggcgcccgggaaggggcggggccgaggcgggcaaggtggcgggcccccgcccctggccccgcccccgcagcccgcccgcgagcctcgccccgcctcctcgccgggcccgccccgccccctcgccgggccgtgctcttgctcccgccgcctggcagcctcacgctcggctccagcggccaagagccggagaaagtcctgctggtgggcggccgcggggctgagggcgtccggcatcccggggccgctccggcccgggcggcgagagtgcccggcggtccatgcatccgccgccgcccgccgccgcgatggatttcagtcagaacagcctgttcggttacatggaggacctgcaggagctcaccatcatcgagaggccggtccgccggagcctcaaggtgcgccccggggagaggacctgccctcacggcgtccggccgcctgccccgcgcggtcccgcgctgatctctgccccacgccaccaccctcccctcctccgggccgccgggaccctctcagtcgggccggcccctcctcctccacccctcttgccgtgtcgccctaagccagttccctctcggacccttcctcagagcggaccgggtcctctctagtctggacccccatccccaagggacgggtccctgccccagccccggaccggcgccagccccgcggcccttgcccctcctgaggcgtccgaatccccccggcccacccccaggaacggccgagctccagccctcggggcagccccagcgtcctccgtcgcggacccccttccttccgccccccccccccaaaggagctgcccctcgaggccgcagcccacttctccccggtcctctcctgggctccccaacctctggtccgctgacgccgcccgggttctggccccaggcccacccatcggtccacacattcccaactcctccccccacctctcccggagacaccaccccgcgtcccgtcccctcacccccagcccaagtcagatcaagctcgggtccttctgccctcgaggtagcccggcctcccctcgcttcccagccagcactctttctcagtgtcgtcctggtccctgtctacaagccctcgcgaccctttgccgccatcctgagtcaccgctcatcctttcctcccatcccctccaggactgtagctgggacccagctccccaatccccttgagggggtcaagcttcagcttgctccccccacccctactggctctcccaccccgcagagtcatcttcctcccggcggctccaacctttagcgccagcaaacctagtttacggaccggacccctttcccctggccattgcttaattagctgccttagckcctctcactcccacctgccgcaatatctcaaatctctggtttttttccagccccggagtttatttccttccctcccccactccagatcttgtccttttcatgcctactcggctgcagtcttcatccatctcccttttagcatttcttggggtggaaaatgctggagaaatagccttgaagtattagagataaaaagtgtgtgtattcgttttataacatgcgtatgaaatggatttcagccaaggttctgaagccacgatgtgattttcaagctgcagtccaggagctagaaggataaaaacagaaaaatacagccccctccccaaactccccaaaccacccaattagagacctccgtgattgatgtcgcctggtatcctcagctccttgattagttttcattgttaatgcttaattgtgaaactttttcattcgtttatcctcatagagggtcactgggaggttggggggcaagactgaaccaatatttgtggtgcataaatgtgtattttacccttgacagacaccggaagaaatagaaagattgacrgtcgatgaagacctcagtgatattgaaagggctgtttatctgctcaggtatttcctagtctttctgtgaaattgctcttcttttttccctgtgcagcagagatgaatgctttctaaaatgtatgttcgcgttatgttcagatttacttagccacttgaacagagtacttttgtgtgcatagtacttaactatattataaattagatttggctatggacttatgactttgagaatttaaataaaatacctaatttatagaatgttgcttggaggagcaagagcagatggttggagttgaacctcatcctttttttcttttctggctttggtttttctcgcgtaagattcagtaagtttacatgagacttgagtatacagtgattagttttaagttcattgtagagtaggaacattatacgggatctactatacggaaaaaaatccacaaatatggtagttcattttgctgttcaggatatcctgtttgtattacttttgccgtgcaagctttatgattttgtctgaggggttttagaaatttggtygagcctactgtcatttcaatttcaaaccatctcacaggctctacagaattgcttaaggcaaatggttattgcaaatatttacaagatttttctgaactatttaaaacattgtcttgtagattgagcatcttaaaaactaatacagtgaacatgaatgatgttttaattaattgattaaaatcctttagaaacaaatttcctacagcattttgcgtttatttaaaattgttcattagcttacacaacatatttttcccttttggcaaattagtcactctttttttttccagaatcaggttttgaaaactgatgtaatttacctcctaggatatttgtcacccttgtttccttagttcagcgccagtttcaggtactggcaagtttctcgttctcctttcttgtttacagatcatgttccagtcccatgttactcattgaatgattctgtaaaaaaaaaaaatccctctccaggtcttcaattttcttaattacttttttagccttctaaaagtggcatcatgagtttctgttgtaactttagtcagaatatcagcatatttaccatgtagaccattccctctgataattgtatcatttagaaatgtttctgcatcttagactttatgttgatgttattttcccccctctttggggtatctgtggtagcatgctctcatcatttctatttacttcaaagaaaacttctatttatgtgtgaattcaacggtatgtgttttgggtgtttacttagagaataatccaacttttaacccattttcatattgtgttatatttggaatactttattccttaacaattaacatgtttattatgatgaacaatagatgtcaacatttgccttttcccacagttcttttactcaaagtaggtagaaaattgatgaaagtgtggacaaatgtgttttaatctacaacagttaatgatttgaaataaactcctgtttattcctactgaattcttttctttagtataaacactggcttagaattaggaaatggagagtcttgctctatttacttgtgatagaagacaccgtattctaaatatcagtgataaggcttctttttaaggaaagcttatttgttttctattttgcttttattgtttgttagcaaactaggttgtctgagttgtctttatttctcagactcaacatcagtttcgctcagttctggaatttacaaagcccttaaagagacagatgggccctctcattcttggacaagagaattttaaaagagattcaatatctcctttagtttcttgtggctcacctaccttgaaggaggtttgcaaggtgactcacaaggggaacactggtttggttatgtatggattctccaactgagttcttcttttgtatccctaccatcttaccacctcctgggggaatgtgggatttcaccttagtccagctttgggagggatgatgccaagaatgcctgaaagggtctttcttccctgggattcaggggaggggacaggattgtttcatagagatgttctgaactttgcctctgtttaggccttctcatcttctctcatgtattgagcctgctattgtagatgtaatttattcctttttttctagtttgtactttgctgagtccttttttccgtctgtcattgattttcaggtttatttttgagcactttaccttttcctctgcattgaatattatataaatgtataatatataacatgttatatatatattttctctctrcttttatgtgtcaggtttgtttctttagttcttttattttgtgtattgaaactattttggagtattatgttaaattagaattcaaagtcagatgtgtaagcatcagtaagcaatgctttatattagtggggttctgatagcatttagattgaatccagtatctgaaaaaagcattttatatatagagtactgtcatcgataaaaaacaaattatactgttcattgtcttaccctgaaatatgacatgtcagttattaatgacattttcacaattaagtttagaatattacagtcttcaaagatttgacacagatgaatttgtggttttgcatacgtgcgatactgatatacccatctgtggcatttagcactgaagcaaaacaactttcctaatagtcacagcttgtgtcttagtcaaaatcatatcttatctttttcctgttttttctcttctttgtgattttgcgtatatttttggaatgtacttaaaacatgtgagtgattttattatagaagaatcctaagtatgtatactgtgctttcattaggtaaatctttacttgtatatttctgattgtctaccagataaagtgtagaccctgaaggctggcattcagaatactccataggtgactctatcttagctgtgcaatgtgatgtcccaccagtccctcacttttaaaaatggctttactgagatataattcatagtccttgtagttcacccatttaaactgtacagttaagtgagttttagtatattcacagaattgtgcaaccatcactgcaatcaattttagaacatttycatcacccccaaaagaaaccttgtactattagcagttgctcctcagtaccaaccctctcagcctttgggaaccactattctgctttctgtatctatggatttgcctattctggagattcctaaacacggaatcatacagtatatggccttttgtgactgacttctttcacttagcataakgtgttcaaggttcacccatgttgtagcagctatcagtagtttattcctttttattgcagtgtagtattctactgtatggatatagcgcttttgtttagccattcatcagttgatggatattgggttgtttccacttaattcttcactttttgattcagtcatgctggccttttcactgttactcagtttcattgtgtttatccttaatttttgcttttcctcatcctggagtactctttcaatatatccttatccaacatacaccatctctaggatccagctgtaatcttacatctttcataaagtcttctctaactgcttaaaccacatggatcccaggcttctttgagctccgttatcacttagtggcgctttcttcaattggccattaatcactgatttacattccttaactgtgtgtgcatgttttcttcagtagattgtaaggtcctggaggacaagcttttagaggacaagggcaagctttcttgttgttgttctttcttgttcttcgctgtgatataaatatatgcctcttaatggaataaagagtatttaagatgaccatactgccagatgaattaaggaaytgatatttttgattttaggtattatgagtcatatcttgttccacaatttattatctatgtgacagtggtgaagttagttatggttttcgagccctgcttttcatttgtaaagtggaaataatcattcccttttcccagtgtggttgaagcacctggcacataataggcatcccgttactgttaattcccttctgtctccttttccctttccctacttccttgctacttaggtgctcaagttacatttaaaactttaaaagaggataatggtattaattttgccttccaataatttaataaacggacaaagtataccaactgaagtttgtgatagatatccattaacttcgtttgctaatagtatttatcagaaattagaatcttcacaaatcataattaagcatttttaactgagtaatagtaaggtcagcctgttgatttatattttcttaccaaatgaccctaagtaatatttgctattatgcattaaatgtattgattggttaatgtactgagactagcttttatgttgcttacttttaaagtcacttgtgactttaaaaatatttttcactttgtgctgtgacttttaaagcattttgaactttgctttcccagggcagtcagataaagagctttgcttttttttttttttttttcttttttcttttttaaagacagggtctcactgtgtttcccaggctggagtgcagtggctattmacaggcacggtcacagtgctctaactcctgggctaaaatgatcctcccacctcagctttctgaatagctgggactacagaaggcacacaccacctccacagccactgcccccgatcataaagtgcatctttatttggaacttttttttttaactttctcttcctattttttaaagagtaagtgctccccctagtgatatgaaagagtgagatttctgcagtcaaatcagtggaaataaacaagtgttgtaccatgtgagaactctggcgtacttcttcttgggttmaagactaggatagggtagcaatgagacagtaaggaagaactccagtgattaaagctttgctacycacctagcttttggttgtttttcttttaaaatacctatcttatttgctatcccaaagtggaaagttgtgtgaaaaactcctttgaatgccctcctttttatgacgtgtgtccccacatttactttcattattgtcttgatttctgtttttgatgcttgcttcctttcagtattgttttagtgaggcatggtttgtgtgtgtgtgtatgtgtgtgtgtgagagagagaaagagagaggaagagagagagatcacatttgtgttgtgcatgcatgtgtatatgtgtatataggtggtcttgagtgaccagtattgcttgctcagttttctttagtgatacacaggagaggacttttgcattcttcacaattaagatagatagttggttagttaatacaaacaattggctagaatcataaaatcacaaatgttacatattttcaacatcaaattttaatgtaaactataaatatattttcatttgccaatcttttgatgtgaagtcatgatcttttctttgagtatgggtctgctgattaaagtttgaaattctccttctttcataaatcaccccataatgcatttacaatatcaagttcagttttctttaaagttgaacaagaatttaaatttgcttatgaagcagtctgaaagcatggttctaggtttttatgattttctacttgtgttttaaaagttttgttcttccatactttagtagcaattttctttgacaacttatgtttattgaatttagtttttctaaaacttttaacttaatttgatagaaacaaatatatgtgttcatatatttaggtaatatttaattaaattatgtaattgcaacagcaagtgaaatttgaaataaactagtttgagaacatacttagctgactcttaattacaactcaattagtgagagtggaattctgtgggctttccagagagtagcctattagcgacgagctttcagcttgcagttgcaagggagtagagagtattgcttaatcaggtcttttaacatcttgtcacatctcaaacayctttgtttgagagagatacataccatctcctttccaagtgtgctctgtgatgatcttgcttcattcttgatattcctctcctgtctctctgttgtatttgttcccatggtctggtttgttctttgtttgcctttatagatttaaaaaagtaatgaatttggaatatcagttaaagaagtactttcataagcttatattttattttttaacgcgaactttgaatgtatgcagaaatgtgcacaaatcataatacagcttgttgaattttcacaagtgaacacacccatgtacccagtatccaggttaaagcatagaacattatcatgttagcttagtagcttcctttgtattcctgtcccagtgccctgtacttcctgcaaagggtagctactctactgacttctaacactatacattgatttacctgattttgcactttatatagtaggaagcactctgtgtaccttttgtgtatagctgcttttgctcaatattttaaaaaagagatttatccatattgttgcatggagcaacagattgttcattctcattgctgtatactattccattatgtgaatataccacaatttattcattccactgctgatggacatttggcttagttttcagtttggggcttttatgaataatgctgttataatcattcatgtacaagtctcttggtgaatacatgtgtgcatttcttttaggtatcattatagaagccgaattgttggtcatagcatatgcctatgtccagcttaaaagatattgctaaacagttttccagtgtgctttgaccagtttgtacttctgccagcagtgtctgagtggtcccagcctatatatttttaggaaacaaaagtgacaaacttctagtacataatttctagcatatcaataatgaacttcctagttaatagcctttagatgtttcgtttctctgtgcatgacttacaccatctaactttttttctttccctacaagaaggggagttctataaggttttacttggctacactgttggttagaagactctcagttattagattgtctcttaggagatgaggcatgttgtgtgattagtttttcttagaaaaagagaaacaaagtggatattggagtctacctgcttatgggagtgctattctcagtccctgtgcttttaatgattctaagaggtcctcattaaaaaaattgcccacgttgtcatcctctgtgaagatgatgtacaaatgacttgcctttctacatggaaattgcaggcatcttcatttgtattttttaggacagagggatcactgtttaatatattaagagcagtatataatggattccagctgtataccttccattattgctaaggccaaattactgaagtctttggcaaaccttgaattccctgttttggaaaagtackaggtctgtgaatataaagggtttggagattgtttcccatctctgtttccttgtcttttgttatgagaacaaccatgggaggcatctgtgtcttttttcctacttaccaaacactcagaaaggtttctttgtgacatctgtagaaagcagaatgctctcatgggatctataggaaaagcttgaaaataaaaagtgaaatattttcatcaatgtaaaagtgacccatataatgtcattgaaaagacctctgaaagcgtaataacataatgtgatgtgagagaattgagcaaagttttcatcttgtaagcatagtgttttattactttaaaaaagcctatacaattctgtagtacaaaataatttcataatatagaataataaaatacattaaaattaatctataaaataagataatatataaagcaatataaaataaatgagtatacatatttgaataatgtgtcaagttatgtaactatcaatgtaatcatattataacatatgtatatcataaatgtatatgcatgtgtgtgtatatgtttattttcatgagcaattaattcatcccaacgctccctcttgagaagtagctaagtgagacacagggacataggaagattgagttctatcataaattataactaattagttcccagtaaaaagtgggagttgtactgcttggttcccagtcttgtaatgttgaattgtgcagtagtttcttagtattgacattaagaattagagggctcaccataccaagtggtaaaattcatagctttcttttttttttgagacacggtcttgctctgttcccaggctggagtgcagtggtgcgatcacagctcacaataaccttgaacttctgggctcaagtgttcctcctgcctcaacctcctgagtagctgagactacaggcactagccaccatgcctagctaattaagttttttttgtagagttaggrgtcttgctctattgcccagtcttgtcttgaactcctggcctcaagtgatccacctgcctcaaccccgcaaggtgctgggattataggtatgagtcaccaggcctgtcttccttcttaaaattaagattgcatgaagggaattaaagcactgaataaggtccaatgaacttttaaatctgtacgtctttcagtttgatattttgggtattatagtgtctttcattgactatgttggctatcaaatgtggaaagcatagagaaagtgtttagggttcttcatagtcatcacttttggcttatccttatactggtataatattggtatatggtaatcatgttagtaataattacaaaatctattatacccttagaatgtaattttccctccaatcagaaatgttaataatggaaaagatttgtaatgcaactaatagttgctttacagtatcttattaatttaagttaaaacatatatctgagtacttatgtgctaggcatctcctggggaatgaaggtcattatactagcagatacttgtattcaaggagatagtttaaggaagcaaatgcatttttcttaaatttcagtagaatagaggttatccccaattaacaggtactgggagtcagtgtgttgtattggaaatagtttaagacagacccagatttattcttggaggctgaggcttgctcatttacttactgagagaccttgggtaagttgcttatcttctgtgagcccaagtyccctaatgtaaaatgggaataaataggctgggcatagtggctttcacacttgtaatcccagcagtttgagaggtcaaggcaggaagatcagttgagcccaggaattcgagactagcctgggcaatatagcgagaccctgtctctacaaaaaaatttaagaaattatccaggaatggtggcttgtgcctgttttttggctacctgggaggctgaggtgggaggatcgcttgcgctcaggagtttgagcctgcaggaagccacgagtgtgccactgaactccagcctgggcaacagtgtgagaccctgtctcaaaacaaacaaaaaaaataaaatgaaaataataatatcttcattgcaggattgttgagaagatgagaggaaatgtatgtatagggcacagtgcttggtacagggtagtgttcagtaaaggatagttgttgctgcccttttaaatcatctgtttgggattaggaacatattttactttggatatataggaaacatcccatttggaaacatcccatttagaaacttcttgtgttacaaagtttcctctctagatcagttttctagattgggcaccaaattcccccatctccatttttggaaaataactttattgaagtataatttaaataaactaagtttatagtttgatgagttttgacaaatgggtacacctgtgtaactagcacaaamtatagaacattttcatcacccccacaaaagccactggtatctctttgcagttaatgccacaccctaaccctaagcaaccattaatctgctttttgtcactgtggaataattttgcctgttctggaatctagccatagttttttatatctcttggataaatgcctaagaatgtttgttgggtcatatgctgactatatatttttttcattttttgaagctttttgaggtataattcacatccaataaatcacatgtatttaaaccatgtaatttaatgatttttgacatatgtatacacgattcagatattgaacatatccgtcactcccaaacactacttgtgtgcttagattatctctctctccctcccgtgagccccttccattccaggcaaccactgatgtgctttccgttactataaattagtttccaatttctagaattttatagaaatggatcatacagtctactcttttgtctggcttctttcaatctaattattttgtagattatctttgatgttgcctatatcgttaatttactgctttttattattgataatgattccgtttaatgggtataacacatcttgtttatccattcatcagttgatggacatttgggtaattttcagttttcagctattacaaacttagtgactatacacattcatttataaatctttatgtagacatgtgctttccttcctctctggtaaacatcgaattgctggaccatatagtaaatatatgtttatacctttaagaaactgctaaactgtttctaaggtgatggtaccattttacatttccaccagcagtatatgagcgtttgagttgctccttatactctataacacttgatatgatcagtctttttaattttaagtcattctagtggtgtgtagtgttatttcattgtgtttatgatttgttctattgattacagagagtattgaagtctccaactgtaattgcaggtttgtctagtcctcctttaaaatatataattttttactagtagtttagtattttgaaactgtgtggtgaaatgcacawaaaattaggattattatgttttcttgaattgacccctttatcattatgtaatgtttattctttgaaatatactttgttaggccgrgcgtggtggctcacacctgcaatcccagcactttgggagtccgaggtgggcagatcacaaggcaggagtttgagaccagcctggccaacatggtgaaaccctgtctctactaaaaatacaaaaattacctgggtgtgttggtgggcacctgtaatcccagctactcgggaggctgaggcaagagaattgccccggaggcagaggttgcagtgagccaagatcgcgccactgtactccagcctggatgacagagcaagactctgtctcggaaaaaaaagaaaaaaaatatgttgttctgaaatctactttaatattcacatattcattccaactttcttttggctagcatttacaaagtatatctttttctstccttttaattaattttttaaatttcagaataattttaaattttcacaaacattgcaaagttagtatagaaagttcctatatatcttccaccagtgtcccctaatgctaacatgttattaatacataatcatggtacatctttcaaaaattcagaaattaacattgatacatcactccaaaytaaacttcagactttatttggatttcactagttttttcacttttttttttttctgtttcaagatcaactccaggaaactgcattgtatttagttgtcatgtctccttagtcttctcttggctgtgacgctttcttcacttttccttatttttcatgatcttgatagttttgaagaatactggtcaggtatttcatagactgtccctcaagttgggtttgtgtgatgttatttctcatcattagattggggttatgtgcttttaggaagagtaccatggtggtgaaatgcctttcttatttcatcatatcagggggttcatgctatcaccgtggatttatcatcagttatgttaatttaggtcattcagttaaggaaatacctgccaggtttctccactgtaggagtggtgagagatgacttgcagcctttcctcatcttaggagaaagcattctgtctcttaccattaactatatataatgtggtggtacttttttttatagataccattaggttaagtttcctctattcctaatttgctaagttttatcatgaacgggtattgaatcttgtagaattttttttctgtatctattgatatggtatatggcttttcttattttgtcttttagtatagtgaagtacgttgattaatttttgaatgatgaaccaacctctcattcttggaataaatcctacctgttcattatgtattagtctttttatatgtttctagactctatttgctaatattttgtggaggattttgtcatttatattaatgagaggattaatcttcagttttcttataatgtcttattttgattgtattttatgaagatgaccctacaatcaaaatgccttgtattctgttacactgcttagtttcttcattattactacataaatagcatatggacctagtctttggacaacatattgaaatcttgacagggatatgtctatcttgcctaatatatatatatgtgtgtatacacacacacacacttatataaacatttatatcttgatatagtacctaaattatttgctgttgaattacatatgttgtaattaataattatatttccttagacatttgtatagttgaaatttgctaagagagtagatcttaagtattctcaccacaaaaagtcagtatgtgaggtgatggacatgttgattagctttactgtagtaatcattttacaatgtatacatatagcaaaatatcataatcactttgtagcctgtaaatacataatttattttttctcaatttacaattaaaaagggttaaaaaatcccatcacattgtatatcttgaatatgcagcatttttgtcagttatgcctcaataaaactcaaaaaattattttagaataactagaggactgataattcatatattgttgaatgataagtatgtctaaaacaattaccataagagaaatcagggagaaaattgactttttttctcttagagaagaaaatatacatatgtaaaatttatttaaatgaatagttatttaggaacccatgagagagattataggatcaatagtttttaaaaatttgctcttgctttgtggagatgacattttgaccctgatagtaactagctggttgacctaagttccataatctctgtagatgttggtttcttcattgtcacaatgtgaaggagatgtattttatttccaagacccccttttagtttgaacatttcattgtattctatcttatcctgtccttattattagagaacagaaataattatttcacgtagcttttacagattgattttggattgactgatgagtttttaaatattataattgatttgtttgtattacatttcttctgattcagtgccccatttacagtgataatcagtcaaatgaacagacaggagccactgtatattatttgggactctctttctgggtcagattatrcactctggatttcagtcatcatttccatggcatgatttccaaatgtggctgtagccttggcctttccttctcaactttggatcatttctgtttgctgggcacctccaccagggtgtctccaccagaatgtcttgctggcttttcaaactcaatgtgctcgaaactgcatttatcactttttatctaaatatgcctctgcttgttattgaagcctgaccatctttctatatcatactggagggaaacctgggagtaattttatactctttttctctcagtactcttgacagtctttattgtctgacacattctgtgctaggcataaagcattattggattgtgttggagaatccagaaccagtgcctggcacccagcagttcctgaatgattgaacatgtcactttacctatttaggttagttaattgggtctcttctccttcctgtaatacttgtcaccccttcttcctgtaggtgccagggatttggcttgcttttatctttttttttttttttgagatagggtcttgctatattgcccagctggtctcaaactcctggcctcaagcaatcttcctgacttagcctctctagtagctgggattacaggcagtgtgccaccacacctggtttgtttgtttgtttatttttaataactgtcggctactattctgttttctgagtttgtcttactggctgggttggcagtatgttatcttagctagcccttttcccctgctatgtcttaacatatctrtatatttttaaaaagtattttaggctgggatggtggctcacgcctgtaatcctggcactctgggaggcagaggtgggtggatcacttgaggtcaggagtttgagaccagcctggccaatatagtgaaaccctgtctttactaaaaaattagccaggtgtggtggygtgtgcctgtagccccagctactcaggaggctgaggcaggagaattgcttgaccccgggaggcagaggttgcagtgagccaagattgtgtcattgcacttaagcctgggcgatgcagggagactctgtctcaaaaacataaataaataaataaataaaatagaaagtattttaaaggaatttttwctgctatttgttaatgaggaaatagaaaggctggttaaaaaaattaacaggagggagcttacaatgttcccagaactcttccaagtttatgtagttattcctgaactaatgttttgcatacctttcaatattcctgctatagctcatatatttaggacagactttgataatattcccttttactctatgcaaaatactgtagagcagtgatttccaacttttttttttttttttactatgaccttatcatgtaaggaatacatttcaaactgtgaccctacatatacagacacgtttgtgtgcatgtgtattaatatagataactgaaactaaaatttaacaattattcttccatgtataatacaataaaacatatcaaagttaatatcaaatgtaatctttgtattgcagtataatatggaacaaatccaagataaacaatacaaaaaaccaaggatttattaatgccacaggtgtacttgcaccttaataagttcttttcactccagaacaattgggagtcatacacatcttgttatactgttttgaaatgtgctgtggggtgtgaggagaaagggaaggttgaaataattctaaactgtatcctaaggaatcagagggctgtttgtaccctcgttggtataaagagggaggggaaaaataagctcatctgtttttttcaggcaaattttgagcctttatttattttttcgtttaagttgacatgtartaattgtatgtatttatgggatacagagcatatttcaatacatgtatgcagtgtgtaatgatcaaatcagagtagttagcattcatcaccttgaacatttatcattcctttgtgttgtgaacattcagaattctctcttctagctatttgaaaatatacactaaattgttgttaatcgtattcaccttacactggtacagaacagcagaacttattcctcctatcttgctgtataaattgttgaagagccactcaaaaggcagtgttctctatatcattgatgataaaggtttaagctaaagaggagtttatctcttcgcaaggaacatgaaactttcgtatrctgttttgacatggcattgataataaaggatacatagtggactttattagtaaaataccttattgtaacataaatattaaatcatgaacataactcttacaaaattatcaacttagaaatccttttaggctgtcatttcagccagttcttatgatgggactatgacctgagatggtatgatggctataggctatggactgagaaatcataggttggaatactagctctaatctttactagtcacatgactttgggtgaatcccattttttttcctgagcatcagtaaggatagaaatataccgctcatatattgtgatgattaatgtgattatgtatgtaaagtgccttgtatagcacatagtaggcccttaaatgttaacttttctgttactctttctttggtcctactaaaaaatattatttgtttctctatggtcttaagcatgaagactataatcaggtttgaatggttttctacataaaccttttaaggcaatgttttaaagatttaacattattaagaatttcattttacaggactaacatatggaaatatgctatatttgaaaaattactgatgttagggattggtattcaatatcttctgcttaagcttcttgtgtccctctatcagtcatctttgccttacaagaaggttttgtctttcttggaaggttaattctctaaggtaatcatttaatttattttgttctattcattaaaacaaactgtttaataatttaatttgagtaaggaaataattaactatcaactatgtaaagtttagtttttattgtgaactcaaagcaaggytttgtggcatctgctttattgttataaattcaagcacagtatcagcagcttatgagttatattttggattttaagtgagagctgctaggagtaggatcactggctctctataactacaaacatttgatatcctgcacatagttgaacagtagcaaagctggagttctcagatatagtactgactgattatgtcacgtcatcatttttggatagcatctgctcatctcctctctcttgtctaagtggtttaggattaaacaaattatgagggtgtccaggctaggaaaagaggactttgtgctatgtagycaaaatttttagtgtgtgaatctatcttccttattagattttaagttcttagaggtaggagcaaggtacaagaatagatgaagataatattgttagtacctggatttattctaacatgtggcttattcttcgtggaggagggcaaggatttcataaactagcacaggtagcctcattttgagagatcaaagatgtttctgaaaatgctttaggcaatatcgtaaactaagaatttctggttcctttcttgattgcaacaaattggttatcattttgtgtttttgtctagcatcattgatcattgaggacaaacttttttttttaaccatatgttttttaaaagcattaagcagcaaagttacacagttttctctagcagtgctgcatagcttaggagcaggagtgggataggaaaagctgatagatgtgtttggtattgtctggatgcacagtttggacaggagtcagtgtagtatagtggttggtatgagttttggagtagtacaggctgcataactttaggcaagtaccttaatttctctaagctctaatttccccatctacaacatgggataataataatatctacctaccttataaaattagtatgataattaaataagatgaatgcaagtaaggtgcttatttattagcacaatgcctggcttatagtatattagatgctatttttattttgttgtgattagaaggaggttattaaagtaaggttattggcgagaatctaattgaaataatagggaggttcaggctggcaaggaggaaagtgaaactaggaagaatgttaggtactggagaataagaaggttaataggttagaaatgtgatgagggtgaaatgtaggcttagcaatagaaaagtagaaaaataagagttaatggccaataagtgagatcacagcttgagattctagagatggaatatttccagataatatccagcctttgacaaaaggaatgggttgctgatatgaagtgaagatgaattcattttaacaaatatttatgaagcctttaccgtgtgctgctttgctaggcattggggaatgtcacatttgggtaaaacatccttggattacaggaaatcagaaaccagctgttggtcactcacctgaatgaaaaagtttaccatgacaatggcagaagctgggacaacaagaaagactataaaacttattgtatctaagaatacttcagtggattgacttgtttttcattggcataagattttactataaatggctctaaaataggtgcatctcccagtagggataaaataattagtaacattaatttagagtttaaaagataggtgtcctaaattcatttatttaactagtcttgtttttttcagctttcctttttagccactagtgtacagattagatgattaacccaattctttttagttttagaggaatggtttgttgagtgggcttgtgttcattttgtttctgagtaagtatcctagaaaaggagcatgtcccaaagaatagcacaactggggcaaaaaggagcagctcaagttgtaaccatgatgattgtttcctgtgccggcttttcaataggaagttgtagattttaaaatctgggaagctgggaagcttactttgaaacaaaaagaataatgttgatcaaatatttaaaaattacatgtgtgctataaagcagcaagaaagtgaaatcctgtatgccatttttttgggtttcttctagtcagtgatggtagcatagatccacacatacttgttttttttgttttcttttgtttgtttttttcttaagagatagagtctggctgtgctggtcaggctggacttgaatgcctgggcctgagctggagtgatcttcctctcttagtctcttgactagctgggactataggcgcagtaccccacaccgggcaatacttggttyatttatactgattatgactaaagtcagcagaacaaaacaacatgttcacagccccaagaaattcccaggcatgcaagttaagaactcccattttaatgcaagccaagtctagtcagtgacccttttgtctgatacacaaccttttcacaaactccttatacttttctctaatgtacatttaagtagacttacatgttattccatctctgctattttttttccatattacttttaacatcattatgaggagcccagtagccaggactaacagaagttgtgaacatatgcagtctactgtcagatggaccttccgcttcatttgggcaaactgctactgtgcacttggctcatttcactcacatctaaaaaatgttaagattctgcagtctccttttcctcttttttgtttttgactgtccttctaccatagtgactctcactgtgtgatccccagtagtatcacctggaaacttcttagaaacttcttagaaatcaagttcccaggcctaaacaagaccaactgaaccagaatctctgggggtgggacccagttttaacaagccctgtacaagtggattccgacacatgctgaagtttgagaaccgctgctctagcatgttgtagttaccaacctgtatacattttcttgatgtcactgacttaatatatttctgctaagctcaacatatatgttgaactgtggccagtaattaatgttggtggtttcatgtggctcaactaatatttgctttgtctaaaccaggatttcttagacatattttgttgagatattgacattctttgttgtaggcagctgtcttgtgcattgtaggatgtttagtgtcatctctggcttctacctactagattacagtagtatttcctaaatgatgattaaaaaaaaatgtccctagaccatgagtagaggggaggggaagggggagatcactcctggttgagaaccactagctaacccagtttcttttccttcaaactcataatacccaatgtactacccataatgtatcagtttttctccctgggtaggaaaagggccagatataaattaattatagaaattaaagattatggtgattataattttttataattttacaaaatttatatttctttttatgttttttcatgtcctatttatagtgagcaatatcaccctatagactagtattatttgctttccttgtatcttattgctgtgaaagtctaatgataatttgcttttctttttgttcctaagtaacttgcttattttgcttggatgcccaaaggatttttctttttctttaagattcaacagtaaatctcagtattggttatattggattgattttctcargtttgtggtatgtgcttttgaatctttttttttttttttgacttaaaaaaaattccttcccttgctttggttttggttttcttcttcaggaactcctattgaaagttgttagatcttctttgtctatcttatatattactttctctcaagcctgtattactttctttcaaaggtttttttttttttttttttggagacagaatttcattctgtcgtccaggctggagtgcagtggcacaatcttggctcactgcaacctccacccgccaggttcaagtgattcctcctgcctcagcctcccaagtggctgggattacagatgtttgccaccacacccagctaatttttgtatttttagtagagacggggtttcaccatgttggtcaagctggtcttgaactcctgacctcaggtgatctgcctgcgtcggcctcccaaagtgctgggattacaggcatgagccactgtgcctggcctcaaatcttttttatttaaaaatttttcttcttttcaccttttatttctcttgaagtattattgtgtttattcatctttttcttctttctartttagtcttttttgaaatattttcttctaattctttcctgagttctatcacttcatttctgagttttcataattacgattcatgtgttttttcatatcttacacattaaaaatttctttgcttgtggagaaatagtaggttatagttacctgtagtttgcgtatgtctttcatggtctttgggaatattagtctgctccttattctctctttaaaaattaactatccgtgtaatttaatcatgatccttatttttcatttttatgtgaaattagttttcataaaccttaggaggtgtggttcaggatagcttttctaatttcagggctctagagctcccttttttgttgttttgtatagtgttcgaattaggataccttactttgtgaggtttctcggttctgtttctctcctgtacttttatgtggaccttcttgttgttcctctgctgctcaatttggattctgtttcccagaatttttcttcatcttgggtctttgttctagaagttttgaaagttcatggggataagactgcttggtcctctcagatgttactatggacttgaattcatcagctgttggaggatacaaaaccatttgcagttttagctgccattcacacgtggcatgcatttttggtttgtgtgggaaatcttatcacgtagttatggtgtagatgttatgcatggtttattttatttattttgkttaattttattatttttgtcctagttgctctgtttttaatgagggattcaggaaattttaaaaaatgatgtgttcactgctgccatcttcataggggtactttcatcagtctttttgtatttatatactttattttgcaccagtttattgaggtattgatgtacagtaaactacatatatttaaaatggggaatttgatgacttttcacatatgtgtattcccatgaaaccctcaccatgatcaagataataagcatatccacctccgaaaatttccccatgtcccttttgtaacccagctttcattctcctttcctcattcccaggcaaaaactgctttctgccactatagttcagtttgtattttctgtgattttctgtaagtgaaaacatacagtagtattattttttttgtatggcttctttcattcagtgtaattgttttgaagtttatccatgattttgttcatttctttttattgctatatggatatatcactgtatggaatataataatttgattatccacttgttagtgaacatctggattgttttatgtattacaaacaaagctgctataaatatttacattaaagtgtttatgtgaacatatgctgttatttcccttggataaatgtctaagtatggaatatctgggtggtttggtaggtgtatgtgtatcctttaaagaaattgtcaaacttttccaaaatgatcgtattattttatattccatcagtagtatgtgaaaggaccattactcctcatccttgccaacatttggcacgttgagtccttataattttagttattttagtgaatgtgtagtgatatctcattgtggttgtaatgtaattttacctaacrattaaaattttgttgagcattttaagatgtatttatttgccatttttatattttctttggtgaggtgttcaaatcttttgtctgctttttattggatgttcttactcttgtagttaagaattctstatatattctagatacaagttgtttgctaaatatttattttgcaaatattttatgccagtctatggcttacattttcatttttgtaacagtgcctttgaaaaacaaacatttttaattgtgatgaagtttatttggttgatttttaaattttttatactttaccttttgtgttttcttcaagaaatcttgtcaaacccaaggtcactaagattttctgctgttttcttctagaagttttacattattggctcttaaattcaggcctgtgatccactttgaattaaattctgtttattgtttcaggttgaggagagactcattgtgtttgtatacggctatttaattgtcccaccaccacttgttgaaaagattatcatctcctcattgagttgtcgtttcacctttttaaaaactcaattgcgcatttatgtttgggtctatttctggactttctgttcttttccattgatcatatgccagtattgcacgacattgtctgttgtagctctactgttgtagctctgtgataggttttaaaatcaaacctgctagtattagccctacaactttgtttttgtcagatttgttttagctattctatatcctttgcatttccatatagattttagaataagcttgttcatttctgcagaaagcctactgggttttagaaggggatcatattgaatctgtcttcaatttgtgagattgacatcttaacagtattgagtctttgatacttgaatatatttagttcttctttatttctctcagcatgttctgtaatttttggtctacaaatcttaaacatcttttgtcaagttttctaaatatatttcatattgaaataggaaaagttccccagaccgctcgcagggcgtgcagtgggggagtggcgtgcttctttggtgccccactgctcaaacctctagggggagcatgcagaygggcaggttgtggggctctgaccccatggcagtgtctagaggtagatgtttagagctcccgaagtcccagtgggcatgtgttacagggtgctctttcagttttgctgtccgtaggcggcttgtgttagtcagctcaattagacccttgccttattgcaaggtcagagggctttctgtatctcggggtttcttgccttggtgtactggaagaatcggatcacacgtggacttggagaataagtgcaaggttgtattgagtagaagtagctctcagcagatgggggagccagaagagagacagagtggaaaggtagttttcccctggagtcgggctgcttagcagcccgcgctctcctctgactgccccagccaaactccacctcattccgggggttgatggcttgcggacctgccagtgcctgttattgtgctcttatgcggatgcgctcctcttgacggcctcttaacatctagctgcgtgtgttttcttccgctggagtgttcctttccacgtccagccacttgcrtctctgcctgctagggtcttggggtttttataggcacaggatgagggtgtggtgggccagggtggtcttgggaaatggcagaatttggacgtgaaggcaggagttcctgtcctcacctaggtccgtgggcacaggcccaggggtggtaccctagtcagggaacagccyttcccttcccggcacttccctgcaccccctcccatatcaatattgttatgttaatgtaaattagattacttttaaaattataatttatatttcttttctattatatggagaatataatatataaaagtagagatacttttatrtattgaccttgtattctgcatactgctagactcacttattctagccattttgtagattatttaggatattcaccatagacaactatgttgtttgtgaataaagataattaaacttctaatctgtaagtcctttatttccttttcttgccttattgcactggctcagagctccaacacagtgttggatagtggtaatggcctagtttcaataggttggtaccaattcttctttgaatgtctgatagaattcagctgtgaatctgtctagtcctggatttctctttgttggcaatttttaaattacaatttcaatcttgctgcttgttattggtctgttcagagtttctatttcttcctggtttaatctaggagggttgtatacttccaagaatgtatccatcttctctaggttttctactttgtgtgcataaaggtgttcccagtagccttgaatgatcttttgtatttctgtggtattggttgtgatatctcccgtttcatttctaattgagcttatttggatcttctctcttcttggttaatctcgctagtggtctatcaatgttgtttatcttttcaaagaaccagctttttgtttcacttatcttttktwttttttttttgtttccctttcatttagtcctgttctgatctttgttacttcttttcttctgctgggtttgggtttggtttgttgtttctctagttccttgaggtgcgacctcagctagtctatttgtgctctttcrgactttttgatgtrgacatttaatgctatgaactctcctcttagcaccgcttttgctctatcccagtgattttggtaagttgtgtcactattattcagttgaaagaattttttaatttccatcttgatttcattgttgactcaatgatcattcaggaacacattattaaatttccatgtatttgcatggttttgagggttccttttggagttgatttccaattttattccactgtggtctcagagagtacttaatgtaattttgattttcttaaatttattgagacttgttttgtggcctatcatatggtctttcttggagaatattccatgtgctgatgaatagaaagtgtgttcttcagttgttgggtagcatgttctgtagatcatctgttaagttcatttgttctagggtatagtttaagtccattgttgccttgttgactttmtgtcttgatgacctttctagtactgtcagtgaggtattgaagtcccccactattattgtgctgctgtcttaggtctagtagtaattgttttataaatttgggagctccagtgttaggtgtatatatatttaggattgtgatatttcactgttggacaagtcctttttatcattatgtaatgcccctctttgtctttttaaactgctgttgctttaaagtttgttttgtctgatgtaagaatagctactcctgctcacttttggtgaccgtttgcatggaatatctttttctacccctttaccttaagtttatgtgagtccttatgtgtgtttggtgagtctcttgaagacagcagctggttggtgaattcttatccattctgtgattctgtacctactaggtgtctacccagaggaaaagaagtcattatatgaaaaagatgcttgcaaatgcatgtttgtagcagtacaatttgcagttgctaaaatatggaaccagcccaaatgcccatcagtcaatgagtagataaagaaaatgtgtgtgtgtatatatataaatatatatatatacatatatatacacactcaccataaaaaggaacaaaatattggcatttgcagcaaccttgatggagactattattctaagtgaagtaactcaggaatggaaaagcaaacatcgtatgttctcacttataagcaggagctaagctatgaggacgcaaaggcataagaatgatacagtggactttggggaccctggggaaagggtgtgaggggtgtgaggggtaaaagactacacactgggtacagtgtacactgcttgggtgataggtgcaccaaaatctcagaaatcaccgctgaagaacttattcatataaccaaacaccacctgttccccaaaaacctatagaaataaagtgcttagatacgaatctaagaaaatgtgtgtaagatctgtttgttaaaaattacataaaactgaataaattattcaaagatataaataaacaaagataaatattgtgtttatggattaaaataaagaagtggtaatggtcaacatccctgccttgttcctgacttgggggaaagtattctttctttcaccattaagtatgatgctagctctaagtttgtcgtagatattctttatctggttgaagaagttcccttctatttgtagtttgctgatagttttaaatcatgggtacatactggatttctcagatttccacatgcagtgaggtatccatgtgttttttgaaaattctgttacattaactgatttcaaaaattaacccttttggcctggtgtggtggctcacgcctgtaatcccagcactttgggaggctgaagcaggtggatcatgaggtcaagagatcgagaccatcctggccaacatggtgaaaccctgtctctactaaaaaataaaaacaaaatattggccgggcgtggtggcacgtgcctgtaatcccagctactcgggaggctgaggcaggagaatagcttgaaccagggagtcagaggttgcagtgagccgagattgcaccactgcactccagcctggtgacagagccagactccatctcaaaaaaaaaaaaaaatctttttattttgagaaaactatagattcacatacagttgtaagaaataatacagaaatacccatgttctctttatccagttttcccctatagtaacatcttgacaggatgttgacattgataaaatcaggatacataagatttcyatcaccatgggatctctcacattacacttgtgtagtcacacctatttccctcctgctcctgtatctctccttagcccctggaattcactaacctgttctctatttgcataactttgtcatttcaagaatgctatataagtggaatcatacggtatgtaaccttttgggattgaatttttttcacttagcataatttctggagattcttcaggtggatacacatataaatagttctttttttttcctttttattgctgagtagcattccacagtatggtgtactacagttcatttatccgtttcttcacttaaggacatatcattgttttcatatcttttttttgttgttgttttgttcaaataaaggtgttataaacattcatccacaagtttttatgtgaacagaaatttttatttctttgggataaatgccccagagtacaattgctggcttgtatggtgttgcatatttaatattttaagaaacttccaaagtgttttccagagtggctataccggcttacattcctagcagcaatgagtcatccagtttttttgcttttggtagtgtttttaaaattttagccattctgataagtgtgtagtgatatctcattgtccttttactttgtgtttgcctgatggttaatgaattaarcatcttttagtgggcttatttgcaatctgtatatcatcctcagtaaaatgttccctcatgtcttttacccatttttgaattggattgtgtattttattactattgagttttgagagttctttatatggtctcgacactagccctttttcaaacattcatttgcaaatattttctcccagtctgtggcttgtcttttcatccttttacagggtctttcacaatgcaaaagttttaaattttgatgaagtctaacttttctttcttgtggatcatgcttttactgtcaagtttaagaattctttgtctagccctagatctagaagctatttgcccatgtttttcctgacaggtctattgttatatgtttcacacttgatcttagtgaaaaggttgagaagtgattagttttatgttttaagtataagtctgtgatttactttgagttagtgtgaggcataggtcatgtcagtttttttttgtttttaattttaaacacctgtggatatctagttgcttcagtgccgtttgatgaaaaggctgtcttttgtctactggattgtctctgcactgttgccaaaaatcagttgggcatatgtgtgggggtctatttctgggttctctcttctgttctgtggatctgtgtctctctccttccaccaatactgtgcagtgttggttactatagctatataataagtcttaacagtgggtggacacaattcctcctacttcattcctctttttcaaaattgtttcagctatgctcattcctttggtttttcatacaaatttagaaaaaatataatctatgtctccygaaatcttgttggtattttgataggaattgtgttaaagctgtataccactttggggagaatcgccatatttaccatgctgaatttccyagtgtgtgcctctctgattgcttagatatcctttgatttctttcagcattgtgtattttcagcctacaacttctgtacatattttgttagttttttggagtgattataaattatattgaatttgtaatttcagtgttcatgtgttgacttttgtcacatgttttttctgaattggtatgatcatgtgatatttttcttctttagcctgttaatgtgatggagtacattgatttttaatattgaaccagcgttgcatccctgcaataaacttcatttgatcatggtatataattcttgctaaaattttgttaaatatttttgtatctatatatatgaggtatactgctttgcagtttttcttcatgaagtgatttaggaagtgccacctcctcttctcttttctggaagagattgtgtagaatagtgttaatttttcattaaatggtagtattctccattgaaaccatctgggcctggacaattttttaagactttgaaaatattaattcaatttctctaatagttgtaggagcattcagattatctctttcatattggataagttgtgactatgtttatcaaagaattggaccattttgtctaagttttcaaatttatatgtatagaagtattcatagcattcacttattatccttttgatttctgcagtctgtagagatacctaccgtttcaatcctgttgttggtaattcatgtcttgtcttgttcttttgtcattcttgctgagattagttgatttttatcgatctttaaaacaactaggtctttgtttccttccttttattttttctatttttattattaatctcatctctttgtttcttctgcttgtattgtgattattttgttctaggttcttgaagtggaaagttagattattgatttgagatgttccatttttttctaatggttacatttccctctttgaatatgttacctgtatcycacaaatgttgattttttattttcattagttcagtgtattttttgatttcccgtgagacctttctctttgattcatgggaaaatacagaagtttgttgtttagtttccaagagttgggagatttttctgttacctttcttttactaacttctagtttgattccattgtggttagagaaaattctgtattatttaaattttcaaaaatttgttgaggtttgttttgtggtctgtcttgatatatattcttcgggcacttgaatggaatgtgtattctgctgttggatagagtgttctataaatgtctactaaatcttggttgatggtattcttgagttcttctatatctttgctgattccctgtgtagttctgtcagttgttgagagatgggttctgaaatctccagctgcacctgtgtatttttgtctgtttttcttttcagtctcatcagtttttgcatcacatattttgcaactcagtttgttgtatacacacttaggtttgctatttcttggtggattcatctcttttatcattttataatgtccctgtctgtctctggtgattttctcttctctgagatttactttacttgataytcatatagccactcctgctttcttttgattcacatttctatgatacattattttccattctttattttcaaccactgatactgttatatttgaagtgagtktcttgtagacagtatatagtcgaatcatttttaaaatccactctgccaattccggtcttaaattgatatatttagaccacttatatttaatgtaattgttgatattttaaggctaaagtgtatcattttattttttatttgttctttttttgcttctgttttctttttcttgccttcctgtgaaaagttttgttttcacctccatgaggtattagagattatacccttttttatcttaattgcaaattagtgaataaaattcactgaacattcaatatttaatgttcctgacatctgttcatctagttagccatctattcattcatgttttcaagagatatttattgaacctctaccctgggccaggcattgtcattttctttttctttcagattattctctttcagttctttagcagtgtagtaaatttatttcctctggttgttgtaacaaattaccgcaaaccaggtggcttaaaaataatagaaatttattctgtcacagttctagaaaacagaagtctgaagtcaagatgtcagcagggatctagaggagaatccattcttgcctattccaacttttggtggttgtcaccattccctgacttgtggctgtattgctcaaatttctgcatctgtggtcaaatggccatctattgtgttttattctctgagtttttcttttaaggacacttgctattggatttagggcctagatagtttggataacccaggataatctctttatctcaagagccctttaaaaattaagacaataatcgcaggttctaggattaagatgtagacatatcttttagggggccaccattcagttcactacaaatagtatttttctgtgcaactttgatttctctttttttgatcctctctccatttggcatgggttctctatttcacaccctttgctattccttctgaattttgtytattaaaggattctcctagagagtgatgagaacagtggaatgattatgatgtcctgtatttcatagcttaccgtatagcaacagaaaaagcctttcttcatgrcagggcagcttcatttagaatcagaatatgtttctttctaatagaacttactctaaagcaaaaataatattattttaaaaactatgtaaaacatgtattaaagtcttatgtacgtataactacaaatccatttgaagagataagtaaaaataattctaatcaataagtaaatattatggaatcagctatcaatatttaaattggtgtcagttaagaacaggtggaatttccctctgaggtgatgccatgtttattagcatctttttgatatatatatctatatctatctatctatmtatatatatgtatatttcaagtactttcagaacttaggccactttggttatatttgaaaacagttttttgctgtttgtggaaatggtttttttgggaagaatctgaacatttttttcaaggtatttaggccactagagtattgctgagattattttgataactccttaatgaatgttaatttaaaaaggagttatgtaaatataccctgctgatctttaagagtattgagtgtatctttaagaagtttctgacatggagtcaaatctagtgtaacaagtgatttcactgtaccaagagaaagttgtatgattttgctgtagttgattttattgctgtccctgttgctatgactattaatgttttaccgtaataaaatgttaccatttatatatttttataaastatggcaaactggcaggtcacaggaaaaaatgaggtagaattaaaaaatatgtatttaataatagtctcgaaacttttagacttaagacatataaaacaatagacaatcttgtttcagcacaagcataattaatatcttcatgtatttgttataagatttgcttaataaaatttcagttttggttttaattttatatctaaatgatgtatttctggcttaaaacttagaagtctgagtgcttaacattcaaagcagtyatttttccaattagtccatactttttataactgtgcagaggaattcagcttataattataaattttaaatttgtgttttctttgtaagtkctggtcaagatgtccaaggaacaagtgtgattgcaaatctcccatttttgatgcgacagaatcccactgagacgcttcggagagtgttgccaaaagtcagagtaagttggtatgaaataagattggagtttcccattttttcccagtagcatgttgtyattgttgaaaggattttggagctttgatggctgatcttttgcacctwaaaattgagtkgaggaagtkttattatatacattttgaattataatgaaaatatttagggaaattagctgatggaaatggagaaatccagatcttaagttgtaaaatttctttagtcattttctcagtagagacattttactaaaggtagtttttagtagctcaaaaacacctcttaattattcttaaaaaaaagtatttagtattctgttgacttaaatctatattaatagtatttgtataacattgataatataattgagctgatattcctrataattgaccctatgatgacttctgaagaatcatcagataaagattgaattatagccatcacaattttagatgtgtatgtaatttattgctttataaatttcttcagaattagtttttctgctatgaacaaaaatgtttgatctattacattctttcttctgactaatatttattgattattaawataaaattaaataatttcaactattaaatatttagtaattatttatttgtacttatgtgcaaagtgcttttctttataagaacttgaatgaataaaacagacaccagtgtgtgtgtcctccaagagtttacctactaatggggtcagtgaggttacatactaatgaggattatgtttgctaatagaggttggtagattttgctttgtttttttatttggatatagctcttgtcataatttttaatttatgtgtttaaaatactgaagttattattgagtccttgagttttatttttaggcatgtgtagcatggttctagttactgtgatttagatcagggacataccatgttattttcatgagatgcccacctatgcaggcactgtgaacattttgactgattacaatggtgaattaagatgatatttattttggcattgcatgtgattcaaaagtaaatcaagcttttttatatctgtttttcccagaatcatgccatgtttcaaaggaattaggcccacacagaccaggtttatttttacgttcaatttcagtgatactaactgacctacacttgtcagcatgacacctggaagtgccagttaaacaatagcagaaaggaacaggtatttaggtcctcttggctacagagttaatgtaagtaagcaaattagatttatagctaagaatactgcatgctgcacactttgcattgagcaggtaaaatctggtccacagaaagcatattagatatccaaagtttcatatgcaagaataaaagatgaaagagagcagtgaactttagaggtctctaaattactttgcaaaattccttttgttgagttcacaataaaggaagttaagtaacagctcccccaaaaccttaatttcatgggagtatataaagaatattatacacttttttttattttcttactttctatttaaaatattctaaagaaaattttatacaaattttcattacttttaaagcttattaaaaccatatcttctataactcaggcataccttacagtttcaaaagatacatttgattctttgtataaatatgctatatatatgagtgtataatacaaagaatcaaatgtatcatatttatacaaagaatcaaagtgtataaagaatattatacactcatgtataacatatttatacaaagaatcaaagtgtataaagaatattatacactcatatgtatagcgtatttatacaaagaatcaaatgtatcttttgaaactgtaaggtatgcctgagttttagaagatatggttttaataagctttaaaagtaatgaaaattaatccataatacagagtatattaactgaataatggatacaaaggtagtatatactaatgaacatgtactaaggaaacctttatttatatgtgaatgatttcactcatttattttactaatcaacatgcaaccatttatttaggaccatcgtcttgctgtactccgtttaaaagagatgccgaaaaggtagaagagtccagattagactgtatattaggaaggtctagtgaccatggaaaacaatgagagaacaagtataatagagtattgtgtgcttgtgacttgatgtaaaaatgctgaagaataaggcaaatgagaagggctttatgggggtaactccagtaataatgacttttatygatagtctaatatataatgtagacagccaaacatttaatcactcccatttcaaatgataaaatctgtgtttctgtgcatattattttaaattcattgtattcagattttgttatgacttaytggtactcctggttagcacctttgtcaattccacctcacttctgtgagtgtctactttccagtgatgaaatgctgacagcatctcgggtaactgctttatttacttttgcttggccatgatttctcaattttttaaaagaaagtaatcttgagcatttagtaataatggcattctcattcattcataaatatttactgagtccttttataaggcaggcactgttcgaagcactgggaaaatagaagtgaacaaaagatgggggacttgccctcaaggaggaggctacagtccagatggagaaacagacattaaacaagtaaatccctcctcacccaagaaaggtataatggtcatttgtgataagcactctgagtgtacagaacatgagttgatgagataaagtaatatagtaacgagggcacctgctgtgcattgggatggcaaggaatgcctttctgaggagcagaaaactgaagggatggaaagaagcagccatttgagagtcaggaccaagtagttcaggtggagagaacggtarttagccctaaggtgaaagagctgggtgggactgagagagacaggtgtgttttggacccagtggatggkgtggggtgtgattgagaagaggttagagaaatggttgatgaaagagcatgcaaatgttggttttcattcttaggacagtgaaaagtcgttgaagtctttaaagcaggcagtgacttaattgtgtttctatttcacagtgatcattttggttattgtatggagaatagattggagtgggatagttaggaagcttcagttctggccctcatagctagtatgaggacaactaattaagacagtagagagcagtagacatatctgagatacatgggttaaggtagaatgagcagaatttcgtaacagattgggtttgtgaagtgagagatgacttccagatttctggcttgaccatgcatatggttctgctggttttcagttatagttgatagtctgttaaattcataaggaaaataatttgtgtacttgataatactagtcttttgtgaatgatttacttttagataatttaaagatatgaacaatacatattttatgcaagaagttaatcaataccaagatttttaccacatttataacagtggtgtgtgcagcttttagagctcactttttaccttgtctttacctttaagaatatcagatgaagtaatggagattttgctggccttatgtattataaactttcaccagtgatatttttgttttattgcatttgcattttgttcttatgataatggattaattgaaaagtgatttaaaaaataggttgctttcactgttttagagataaaggaatttaatgtttaaaaataaaatgtcagaaacagagttagtgttacaattgagctaatccatcagattgaggttgctgtctagaataactaacaaagaagaaaaatagaaagtaagaaaaatagaattaagccaatccatagtatttccccaatttattttctaaattgtgtgctaagtgggcaatgaatggtagtgcagttaggccactcatctgaaggttaaatttagctagaaatttagaaaggaaatattttgacctccaatttaaatttcttaaatgtggagacattttaaaatatagtttttaccatatattcatgttacatgatttaatcctagggtatctattgaataatttttttcctgtgattttattaagttttaattctttttccacagtatattaaattgaaatcttagatgtttgttagacttcaatatttgctttgaacttctcattatctagaagtgaaagaatttgattgtcaagataaatatccaaaatattawaccatggtcttttataaaattcagaataatagcgwtataattacaccacataacgaaggtgattccattacaatccaatgcaaaaaacactctctacttatcraggtattaaatttatttagttgtttttacacttacattttggcaaccataaatttgtcataaaattatataaaagaaatcgagcaattccaggcacagataaaaataatgtagccaatatttattgaggtcttactatgtgtcaggcacygtattctgtcagatattctacacattttaatctgaatactcatagcagttctataatgatcacttgacagtggaagaaacaacttagttaagtaacttgctcaacgtcacaaagcttgcaagtggtataattaggtttaaacaggaagtctgagccctgagtcctcactctttactactcattagctgatcatgactgtaacagatataaaatgtgtaatttaatgtctcaagccttagtcatctcctgtctgtactacagcagcctcctcactgagtctgttgcttccattttgcctcctagagcaaactcacccagagaaatcttttaaaaagcatcaatcatatcttgtctcccacttgcatgaaaattacttaagtggtgtggtaggtagaatcatgctccttcccaaaagatattgggccctaatccctagaaattgtaaatgttaccttatttggaaaaggggtctttacagatacagttaaggatcttgagattgggagattatcctggattattggggtggtggtctaaatgccatcacatgtgtccttataagaaggcagacgagagttgacgtatacatgtagaagaatgcaatgtgaagatggaggtagagattggagtgatgtggccacaagccaaggaatgatagcaaccaccaaaagctgaaagaagcaaaaagcagattctaccccagagcctctagatggaatgtggccttgccaacactttgattttgaccaggtgatactgactttgaaattctggcctccagacctgtgagagaagaaatagctgttgttttaagccactcagtttgtggtaatttgttacagcagccacaggaaactaatgaaagtaacttcccatttcagatataatacaaccccctaccrtgtccttaaatcacccccatctacctttgtgacctcatcatctgccagtcttttccctttctttcataagggcagaatatttgtcagtctagtttctcactatacccccggaacctagaatagtgcctggcagataataggcactcaaaaaaattttgtaaatgagtgttcattgaacttaacatttagagacaatataaatatctacctgaaagaccaagggaacattggcctgatccactgatggcattcttggatgagaagtaggaacagaatttgtttggaaatttgacacktacatgtagaatggtatataacgctgatttatgttcgagagagactttttgggggtttggagaggattygggaaatatataataaagaaaggataaaagggacataatcaatgtgaaatgtgatttccttttatttcggtgcatgcccatagtctcagctgctcaggaggctggggcccaggagtttgaggctgcagtgaatagttactgactgcactccagctagggcggcatagcaagacyttgcctctaaaaaacaaaaaaaaaacagaaaaaaaaagaaagaaataataggaaaaaataataatttctcctaatatgattatttattatagaattttatgtctcctgtatatgggtagatttttttaacatcttattctagagtttttacagaaagcattcactttataaatacatttgtaaatagaaagcttaactttacttttttaaaagtcctatttcaagtagcatagttaagtgaacaaacaacacagattgagcattcctaatcctcaaatccaaaatcaaaatgctccaaaatttgaagctttttgagcataaatatgatgctacaagtagaaaaytccccatctgacctcatgcgatgaggtgcagttaaagtcaaaatgcagtcaaaacttagtttcatgcacaaaattatttaaaatattgtataaaattacattcagcctatgtgtataaaatgtatatgaaacaaatgaatttcatatttagacttgggtcctatccccaaggtatttcattatgaatatgcaaatattccaaaatcgcaaaacattcaaaatctgaaacacttctggttacaagcatttgggataagggatactcaagctgtaataatgtgtggaacactgtaggccaggcactatgcttaatgctttagatatatccttaaaaaaatcctcctaacagctccgtgtgatgtatttatactcattttacagttcggaaaatctaggcttaaaaaattcagtgtttatgaatattttattgggagatttctaggaagcatgaaagtatgtaatttattcttacagttcaccaagaaaaagaaatagttttgactaaaggaattaaagagcataaacaaatgatacagattgctttcttctttggtttgcagctaagaaaacagggatctgtcttcctcactgaagatgatgtgttctgagataagcataataagcagatcatgatgttccagacccttacagatcataaaaagcccacaatatagtattctttagacaggctaaacatttagggacactgataggaaggaatgtaaataagaaagtgaaataattcctataatgtaaggttgatagaagataatcatcagggtcagaattaagaggtcttgtggtttaggaagcataaaattatgtaacttattgtttatttcactcagaaaataaaagtattaatgaaaggaattagagatgaacagattgatacaaactgttctatggtttacagcttaaaaaataaaggtacatttaatgctatgcattttgagaataatgtcttttatgctttttctttttacatatrtatctatttgtatttaaggacaaaatagattgacattactaattacttcactattaataattaaagttctgtgaaacatttactgagtatatagtttttctgggtatatatagttatattagctggtatgcattatagacctaaaaatattgcctttcagtaaattcctagtggacaccagtgttttcacatatgcttcctagtcattcagtcatttgttatttttaccctatctgcaataaaaacgaacagaaacttctgaaattactttaaatgtgtagttaagcttgtaagtgagtaaggaatgatactagggctcaaaaacaaagcaatccgtttcacttccatttaggatatagaaagctgcaagagaacatcactcttattctaataacagtaggttatccacaaaatccacacagtcataacttcttgagcacatcagagttggtcaccaggcagccaagtgagctgaattctcaagagtaacaaacccctcttaggatagatgggacacaggaacattgacttggcagagcataggaggaagaggtgcccaccacataaagtagttagcagtatcagctaagattttaacacatttttaaagggtgaatgtgcrctcgcacagtttatgtgtttaggataacttgtagcttagacacagaggagctttgcatccatttgcaagctcttttccatacgtttccactgtttgatctgtgagaaagactaggggacaaggcaggagattggagagcatctcccttggtgataaaggtgtggtggtgatgagctgttgctgagggacaggagccaactctgcccatttcctgaaaaccttctcctttatgaagcaagagtctaagctgcagagggagaagcagtgaactttcctgcttttacagcccaggtgaagtgccattgctttgatgagtttggtaggagcaaaacccacttgcttctggaagagaggtagaaaaccctcactcctccaggaccatgcaaagatcacttacttctgggagaaaggtgggagcataagccttttgacactaggggctgggtgtggaaggcaggagatgttagaactaggaccctgcactgataaaaagcagaggtctgccaccagtggggatagggcaagaaacttgaccctggcaaaggtccccctcccgcaccccaagatacaaagttataggacaggaacactgaaaaagttacattcctgaggcccaggctcaaagaccccctacctaagatgaggctgcaccaagatatctgagaatactctacatccaccattagcctagtgtgtagtaacaagcaacagttgtctactactagagaagggacaagagtgtggagagagaccgcctgctgaaaactgagggtggagcaggaacactgaggcaaaccctttggcatctgaggctgcacgttaaacaaaaggtaatagtggcccactattggaggtctgaaacctgttgtgctgtgattgccatagcaacaaaaagcctgaaacccagctcaactgctaactagactggttattcaaccccctggacttaacagcctagcagaggtggaatgttcatttctgagcataaatactgttgcccctatcatcactgaatatccagcattcaacatttcaaaatcaaaaatttctgggcacacaaaataggaaaacttaccaaaacataaagcaacaacaggtctagtgtcagagatgacccagatattggaagtattagagaatttaaagtaactgtgatttatatggtaaaaaaaaatccactgaaaaaacaacatgcctggatgtatagggcatttcaacagagagaggatctataaaataatcaaatgaagatgctagaaataggccgggcgtggtggctcacgcctgtaatcccagcactttgggaggctgaggtgggcggatcacctgaggtcaggagtttgagaccagtctgaccarcatggagaaaccycatctctastaaaaatacaaaattagccaggcgtggtggcacatccccgtaatcccagctactcaggaggctgaggcaggagaatcgcttgaacccgggaggcggaggttgcggtgagccgagattgcaccattgcactctagcataggcaacaagagcaaaacactgtctcaaatgaaaaaaaaatgctagaaataaaaaagatgatatctgagatgacgcatttcttcaatgggcttatcaggagtttgaacatgtctggtgaaagaatcagtgaacttgaaaatagaaactatccaaactgaaacatagagatagaaaagagtgaaaaatgagaacatccaatggctttgagacagcataaaaagagatctaatatatatgcaatcggcatctcagaaagagaaaggagaaatgggaaggaagaattatttaaagaaatactagccaggacaaagcatagatctaagaagaccagaggactcagagcaggataaatgcgtgcgagcgcacacacacacacatacacacacaccctcacccctagacaccgcacgcgcgtgcacacacacacacacacctcctcacccctagacaccgcacgcgcgcgcacacacacacaccctcacccctagacaccgcacgcgcgcacacacacaccctcacccctagacaccgcacgcgcgcacacacacacccccctcacctctagacactgcgcgcgcgcacacacacacactcacccctagacactgcacgcgcacacacacacaccctcacccctagacaccgcacgcgcgcacacacacacccccctcacctctagacactgcgcgcgcgcacacacacacactcacccctagacactgcacgcgcgcgcgcrcacacaccctcacccctagacaccgcacgtgcgcgcgcgcacacacacacacacaccctcacccctagatacctcataaactgctgaaaataaaaaggataatcttggaagtagccagagacaaaggtgacaattgaacaggcttctgatcagaaactatgtagtctagaggacaaaagaatatcatattaaaagtactgaaagtaaaaagcaaaaattaaaaagtcaactgaaatatatacccagttaaaatacctttccaggatgaagacaaagtagctttttagataaacagaaattgagagaattaattatatcaaatctataccacaagaaatggtaaaggaaaatcttttttttttttcttttcttttcttttttttttttttttgagatggagttttgctcttgttgcccaggctggagtgcaatggcacgatctaggctcactgcaacctctgcctcccgggttcaagcgattctcctgcctcagcttcccaaatagtggggaacaggtctgctgccatgcccagctaatttttatgtttttagtagagacagggtttcaccatgttggccaggttggtcttgaactcctgacctcgggtgatctgcccccaaaagtgctgggattacagatgtgagctaccgtgcctggctgtaaaggaaattatttaggtaaaagtaatgtgataccagatggaaattgatttacatgaataaatgagcactggaaatggtaaaaattagggtaaatgtaaaggaaataacaattctacacaaattctttcagaaaatagaggaggaggtaagaacttcctgataaactttcaggcccagcattaccctgatgtatatatactcatgagcgtagatgcaaacacccaaaaaatgagaaatcaaatccaacaatatatcagaaggataataatacattatgactagtcagggtttatctcaggaattcaagattgtttcaaaatttaaaaactagtcagtataaatcttgtcagaaacctaaaaaaggaacaccaccatctaatcatctcagtagatttagaaaaagtatatgacaaaatccaacaactatttctggaaaaaaaaatcttagccaggtgtgatgacacacacctgtaatcccagctattaggaggctgaggctggagaatctcttgagcccaacagttttagtctagtctaggcaagatagtgagaccctgtcttaaaataaaataaggcctggcatggtggctcacgcctgtaatcctagcactttcggaggccgaggcaggtggatcatgaagtcaggagttcgaggccagcctggccaacatggtgaaaccccatccctactaaaaatacaaaaattagccaggygtggtggcaggcatctgtaatcccagctactcaggaagctgaggcaggagaattgcttgaacctgggaggcagagttgcagtgagccgagattgtgccactgtattccagcttgggcagcagagcgagactccatctcataaataaataaataaataaataacctcacaactcagtaaactagaaatagatgggagcttcctctgtgagaaacctacatgttcagttaaaggtgaaagactttttcctaagatcaggaaaaggccaaaagtgtctgctcttaaccacttttgtttaacagtatactggacattctagccagtacagtaaggcaacaaaaagaaaaagcattcacattgcagagaaagaagtaaagctgtcttttttttttctcagataacattatcatatgtaggaacctgcaaaagaaaaatgctggaacttccaagcgagtatagaaaggttatgggatataagatcaatatacaaaaatcagctgtgtttctacaaaccagcaaccaacaattggaaactgaagtttttcttaaactatcaaaatagcattaaaataagtgatacttagagataaatctggtaaatgttacataagatctataaactgmaaactatagaacatttctgagaggaaataatgagagaactaagtgaactgaaatatagatcatattcgtggatcagaagactcaatattgtgaagatgtcagtttgccccagatcaatgcgtatatttaatgcaaaataatcaaaattcaagtaggttaggtttttgtaggaaatgacaaactaattctaagattcgtatgagaatgtaaaggacctagaatagccaaaacaactttgaaaaataggaacaaaattggaggacttrcattacctgatttcaagacataatatatagccacagcagttaatactgtatgattggtgtaaagacagataaagtaatcaatgagacatagagaaagtttaagaaaactcacacctaccccacaaattgtcagtttgtttttgacacggggcaaaggcaattcattatagagaggatagacttttcaacaaatgatgctcaaacagtttgaaaaataaatccataccttgctccatatgcaaaagataaaatagatcatagacctaaatgttaaagactgaaattattaaaacttctagaggaaaccataagagaaaatttttgtgaccttgggttrggtaaaagtttcttacatatgactctagaagcatgatccttagaagaaaaatttgataaattagatctgttcttcagaagacactattaagtgaatgaaaagacaagtcagaatgggagaaaatatttgtaaatcacatagatgacaaaggactgtgttcagaattcataaagaacttctcaaaacacaataataaaacaacccaatttttagaaatatggaaaaatttttaagatgcttcaccaaagaacattggcagatggccagtaaacataagaaaagatgttcaacatcattagtcattaggacaatgtgagtaaatctccaatacacttgttaaaatatctgtactaaaaataacaaaaaacaaacaaacaaaaaaacagcaattgaccatacgaagtattgtggaagactgtagagcaactcaaactcccttacactgttggtgggaatataaaatggtacaacaactttagaaaacaggttctcaaaaatttaaatatacatctactatattactcagctatttaattcctaaggattaagagaaaatgaagcatcttttcatataaagtcttatacatgaatgttcattgcagctttacttgttatagctaaaactggaaacaacccaaatatcagtcaactgttgatggataagtcaattgtggtataaccattcaatgatataatactctttacatattctggttatgtgttgaaatttcttctttgactctgtggcttctcctgatgttttagattttattttgtaaacaacatgattgggttttattttttaatccaatctcacactgtattttaattagaatatttttcccatttacatttaatgtaattgcataggtcatcttacaatttgctttttctttttgccaactgctctatgtttctatttctcttatttattttatttgaattgattaagtagttttattatttcactttccccctcatctattagcttggaagttacagactcttttacttttcttgtgttagtgagcttagacattacaaaaaggacatattatcaaagtcgaatttcattggtatttttacccttttcctagataataatataattattatttaatcctcttctgacttatatgttactgttgttagctattttatttatatatttcaggtctcctagatattgttttatctaaccaatatctatttagatttacccacatagctatcattttttattacctgtagtatttccatttggaatcttttttttttttctgcctgaagaacaccttttagtattcagtacaagtctgctggtaacaaattatctttgtttttgtctgtttgaaaatgtcttccacatgcattttaaatagatgtttttattagcataggattttacactgtatatctgtagatttctagaaatatggaggcatatttatggctttttgactctgtggcttattttctttggccagttttggaaaattctcaggtatctttttacatgtgcctctgcctaatcttctctctctcctccttctaagactccaattttatgtatattagatcttttaatagtatttccatgtcctttatcttcttttctttcttttccatccttttttctgtttgtgattcattggtgttttattctaatacaccttctgtctcactaattcatctgtatctaacctgatttttattttgattattgtatttatctagtctagaatttccatttagctttttaaaatctgccattttttatatcttagagaattctctgttgaaatcctcaattgtatcttttatcctcttgaaccatgtatgtatcatatagcactagtatctggagctccttttggcatgtttatattttgtattgtttctgcttattatcttatctccttatatatgtkgatattattgattatgtgcttggtcttgtatttgacaaattatttgtagaaatagtttgaggcctargatgatatctttctcatggaaggaatatattttcttctggcagacacctaactgcactagcaatagagtcttacttaacctgatttcaggtactggatgatttgaagctgggctgtcctcccctgcaaaggacagtctattcaggactgcccttattccctactgcagaggggcttaccagggactctgcaaggctgtcagagaagtcacttaggctctcagtccctcaagaccctcttctagaatcagcaaataccccccaggcccaaagcaggccccaaattacatgctcacttttctggatatttgttgtctcttagatcttggaagggtaattttttactaccctgttagtttccataggcctgtatgcagatgatttttatgttttgttcagctttaaaaattatccttgccaagagggttgattagagttacctagtctgcctttattgaaagaggaagttccctttcctgttattattccttcttgatttaatcttagaatgagattaaccccaacatttctatttatatacctgcataggttctctgtgcacatatatccctctaccataccctgtcaccatctccacatccacacagatcaactgattgttttctaacaatacgttagaagtaatcaagaacctaaaattaaatattttgccaaaacccttgtgatatatgtccttaatttacacttctagttcttaagcttccttattttgttggtatgacattacatgtatgaagagaartaattagatgaagggcaagataaggggagataggaaagcaaacattcccagcattgagaaggaaagagaagcatgcagattgaatktagattcaaagaactgagagaaaatcagtgtgcctagagcataaagcaaaaggagttgccgagacagtgaaaaagcccaaattatgcagatccttaggtgcattatgcaagagaatattcaaattatagttttaaatgctttgaaatctcatgctgactgtaaagtcgaaaatgaatcagaagagagtgatgtaggatggaatggaagggatgtagtgggtgaggatcacttggaatctgttacccttacctgagcaaaccttcaaagtagcttggactatggtggaagtagcctggttggagaggtggatggattaaagaaatagacaacaaagcaaaaccaggactatatgagcaataaaaaaccaatagtatcaacgataactcctgaaatcctggtttgtaaaccaggtgggtaacagtggcacacactaagataggagactagagaaagcccacattaggacaagagactggaggaggcccaggtgttacaggaaatactgtgagctcaattttggacttgttacctttgagatacctttgagacatccgaagtagagtttgcagagagttgtatatacggatgtgatactctgaacaggtctgccaataaaaaagtaaaatttatacagattacatttaaagtcgttggtgtggaggagattgtctacagagaaaatgaagaccaaaagtggagaactgctattggaaacataattttacaccaagaaaataaggaagcttaagaactagaagtgtaaattaaggacatatatcacaagggttttggcaaaatatttaattttaggttcttgattacttctaacgtattgttagaaaacaatcagttgatctgtgtggatgtggagatggtgaacagggtatggtagaggggtatgtgtgcacagagaacctatgcaggtatataaatagaaatgttggggttaatctcattctaagattaaatcaagaaggaataataacaggaaagggaacttcctctttcaataaaggcagacgaggtaactctaatcaactctcttggcaaggataatttttaaagctgaacaaaacataaaaatcatctgcatacaggcctatggaaactaacagggtagtaaaaaattacccttccaagatctaagagacaacaaatatccagaaaagtgagcatgtaatttggggcctgctttgggcctgggggtgtttgctgattctagaagagggtcttgagggactgagagcctaagtgacttctctgacagccttgcggagtccctgataagcccctctgcagtaggaataagggcagtcctgaatagactgtcctttgcaggggaggacagcccagcttcaaatcatccagtacctgaaatcaggttaagtaagactctactgccagtgcagttaggtgtctgtacattgttagtcctgctcattgctgggtctctaggtctctagcacctagcagcacagtgccttgaacataattgagcatttgagtgagtgtatatagtcaacaggaatcactgaaaggtagagatccttatctttgacttctttccagtttcccagaatacgtagtatgatgctgggacttgaatgaaattaaaatgatattatcttcagaattagattttctttgggctacttttgagagagattaggatagaaggtgaaagtattatgactgacttgggagaaaaaaagccctgtttcctctttcttatagatatttgctagactttccatggctgcttttttttctaagagaactgtgtataatttttggaaaaaaatattgaattaattaaatattgctatagtgaatcattcagaaggaatggttctttatcattcacatccattaacaagattatttctttgaaaagcacatcctttctttgcaaagttttgaattgctgcttatttacattttaagcctaaattatgaaattcctgtgattctaatttattacgtttaaaaatgacttagcagagtactgcagctggaaggctcagttgcaaaactatggtctttaaattgatttgtttgttttgatgttcttatgatttgcatggcagcatattttattgtatatttacaatagtcatatgatacttgtatttcctttatggaaagagttcttaaggatatttttatgtgtacctcctcatgaatcttgctaatcactgaaatacagacttaggaatggtaaaacatatctccctttgttatttctgtttattgtcttcacttcatttttccctctcagattttgattttcagtgatctcatctagtcctttacaccctttattttagtggtggaatgtggcaatcagggatagggaaaatgatgaggtataatcattaaaggtatcttagaacctggcatatttcaattattcatatttaacctatttgaaagtcttttataaatatcatgattttataatgaagagggctattacactattatgttaattactaaaacctcccacatttatgatctttaatagcccagatattttatatgtccctgatcttcagtgttttaatatagaagtccctattatttaatttcaaaataatcaatgctatctctaaaaatacacagatattttgtaattttagagttcctttaccttttactagcaytattcatgataaatatatttttcagttttattcaataagattcttttcagaatttgtgaaacttaaacacttgctcttttggagtaagccaatgatttatttaatgcttttctatattgtgtattttaaggagaaatatcttcctgatggatataatacaggcttgttggagacagctatttccctctctgcaaggagtgtattatgttgttttacaaaatgctttcttgcaccactcatgttaactaaagagcgaatttaaacacagacgtgtctactgcactttccttccttgaatgggtacagtttttaaaacttggaaacgtgccattaactcttaatgtctcatttcatttttgaggaattcaagttgggatgccagccgtacaatagtaatgtaagaggaatggtaactggcttaaggcatgcacttaagcaatagaggaatttacttttcagtgtcttccaaggtccatgaggatgcacacttatttatccagagagtatggatctcacatatgtttgtccagagggtgtgactctgtggaggagaacacttactggtaagtattgaactcttattgtattatgtttcagaaaaatatgtttagaaaatcagttgatttttagcagtgatgaamtctcttagtctgtgctggtttcttaacagtggacagtcccagatgttgaagtcagcacaacaagagaaaaacccaaatcctgataagacttgaggatttttcgaaaattaaatgcaaaatagttggggcaaatgttgctgcgggagtcaagactaagtaatacagtaagaagatatgaagttggagagcttctcatgttcttcctttgtataaagtttgcatacgtacaaaacccaggactttaatgactttaagagggggcagaattgcatctyttggaagttaacagactcatgtgaactggaatgtacgttgtggccctcacaattgattttaatatttatttgcaaagtcctttctgtttctaaataaaagctgtgccttctgaaacctgtaagtgatgtatactggccacatcaaatcttttaaaagtgttttccaaaccccaaattgttagtgtggaagaaatgtttcttttgggaacactaaaacaaaggggtatgggaggattgatttcagagaccacttgctgcttctgctttatactttaacattctttccctctttctctcagccaagaactctcatgatatgtaactgacttttggttgaaaaaacatgtaaaataatgtttttgtgtatgatacaaaagtttagaataaaacaaaaatcagccactctaatatgtggtaggttttctggcaattaaccatagcacatagacatttgccacaggaaatgccactgccagatctcccacaccgccacatgaaggcttagcattgctttaagtcatgccttaataaatgatgaatggaagtgcagagtccgtgaggaagaattcagtgcataggagtgttttggcatctggtagacaattgtttgttagagttgccagttattagcttgctggcctttatcaaagtgctttactattctgtttcttctgctgtagaaatccctgtgttatcccctattgtgatgactgacagtgtcccactgtgctgaatcaagaagactgggtatataggtccaaatcatggttatggagatgttagggtagaagacagcagtatggacatgatagaaagaggattgagaatacatttctatgtgatccatttttgctttgccttctatctaattctgccaattcctaatctttaggactcacctcaaaatctcttgaagccactttttgggagatgtgcaaaatgtgtgtgaagggagagagcatcaagagcagaaagcgtaggtgagagggtaagagacatttagtcacccggcagctgcttactgaatgcctgctgtgtgctaggaggtggggacacatgaagcttgtgtccagttttgaaagataggccataaacaaataaatatgttgtgtattggatgatggtaatgaataaactggtaaaggggggtagtgagaactgggataaggaggtgactttcagctcgaagtagggtcatcagggaaggcctcattgacaaggtggtatttgagtagaggcttgaaagaggtaggggagccagccatatggaaatccaggaaaagtggaactgagaacacatactgtaagtcattaaaaggactttgacatttcctttgagtgagatggaagcccattggagagttttgagcagaaaagtgacattatctgacttatttcttaaaataattcctcaggctacagtatagagaatggatagtagaggaacagtgatggaatcagggactggttaaaggttttttgagtaattgaggctggagaagatggtgacttggactagggtggcaacaggagaggtgattagtgttcagattctggatttgttttgaaggtagacccttcaggatttattggtcttttgactgtggggagtgagggaatgagaggagttaaggatgaccccacagtttttgggctgagcagctggaatggcagagatgacatttactatttatcaggatgaggaagattacaggaggagcaggttttagggagagatcagtgaaggtgcgagcaactgagattccaactagatatccaaaggtaacatagacagaagacagtggatatacaatagtaattatttaaacgttcattttgcacaagttgataaatcacaaaagttctgtttaaatgatttaaatcttcatgaagatgttgctataattcacattttatagattaggaaataatgcagaaggattaatattcctaagatcactgatatgaaactattttatgactaagttccaggttgttctactgactttattatattataaaataggcatataagggaaattttcattattgccataattgagcaagtaatacttcttgttgcctttacatyacacacacaaacacacacactttctctctctatctctctctctcatagagaagtacagtaatatctttgaggcttacgtagaaagatagtttttttgaccctttggtgtgttgaaaacatactataatataggctttaattttggatatgcattttaaaattctttaaatggtgaatggagatgactatgaatataattaatttttaaaagcatattcttaagaaattttcttttgaaaacagtttacttcatggtaatttgtgttctcttcagttgtttaaaggggaaatattttgcatactcttaagtgtattcttttttatagtagaatgtatgatgtttattttttgaaacacaaatacaaataatggaaacacatgtgattgtctgagctttgacattgttctaggtaggatgacaaactgtcacaatccaaacaggaaaacagaaattaaaacctctctaaagtttctactctgttgcttaaaggtttatgyactgtttataatttttattcaataaagcgrtggcaagttactttatcttataaaatcctaagacacttaaattttatgtagtgtaatgagttaaatgatcaggagcagattaatatagttctctgaaataagtacatatccttaaaggtcatatgtcttaattttgtggaatatgactatttagtttctacaaccttggatttttaaaaattataatttgtgatctctcatctatgtaaatagcaaactctttctgattatacaggaagccctgcatgttgcaggagtggaaatgcagttaacggctgcgatgtcatttctgaccattctgcaggacgaatcagtgtcaattcatgcatatacccactcattcctccaagtcattctcctgcatctggagcacagggacacaggtcaggggcctggcatgcttaattatatacttgtttattgtttttttgtgtatggccatgatattatataaatactgttagcctgatgaggataactgagtaaggccatgctgcctakgagttgagcagtggaatgacttaaaatagctatggctgtcttataaaacccacaaaatttaatatccttgaaagctgaagatccattaattcatcttatgatttatactttcttgttactttttttccttttctagcagtcatgtttatagtattgtacaataaaagagcaaaccttggtttaaagatatctcaccaatactatttttaaaaatataaaaattttctagatgttgactgagacaaaataatagagaaactttttagaatagtaatgaaaataattatttccattttatcattaagtgctattgtaactattaatggctgagttgaaactgaatttgaagtgagacgtttaatttagtatgttttatctctgtcaaccaggtgtcagcaatgcatggctggaaactcttctgtctgttatagaagtattgccaaaagaaaccctacggcatgaggtaatactttcatgggggcaaatactaataagtaagtcactctaaggtttttttttaaaaggtttcttgtcaaaaatggtttttaaaaaagaaagttgtttttcattttgaatgtaacacgtgcacattggaggaaatttgagaaatataaaatatagaaggaagaaaaaagaattcatagctctgtacttgtccacttttaaggtcctgatgtatttcctttcagatttttttcctatatatggttgctgcttggcttgctatatcagtgatcatactgaatttatatatggttgtttttcacttagcattactttcctatattttttaaactcatttgatagtagctgcagaatattttacttgtgaaacatttaagcctgttttcaggcttatattttactattgaataggacattaatgagcatttctgtagagctcttcctgtttttcagataatttaattgtagctttcaaacaggaattaatggatcagagggcattaatattcttaagcttttgactaacaatatgtgaagatgctcttttcctagacttttatcagcaatagtgtttctgttacatttaatgggccaaaaatggaattacattttattggaatttttaaattattgtgctgttgaatattttctcatatttatatcagtttctctttattcctttgcaattgtttgatcctatcctttaatcactatttatatgtgctatttacctattatggttgccaattctttgttatatttacaaatattattcccagcatgttgtttgcctattaattttcaacattgaacagcatactcttctctaaagactttaaataaattacaatgacagaagaagaaaaatggaaagaaaagtatccactaatgaaaagattttgtattctttgaacattattcctatatacatttctttccaaatatgtcatgattgaaaaaaagagtcatcagccaatgaaatgtcctctactgacttcattaagtgtctttgtcctttctttgtcttcatacagtttatggtcctgtcacaaygcttaaatactggcttgaaaatgggaagattttctagttataaggatgtttgcatacttgatgccaaacatctagatgattatgcatatttaagtgctgaatgtaatatagacatgtgatttttatatttttttgaaaagcaatatgctgtataatgcaatttttactctagaataccatattatttaacatgtggtttcaaagattttagatatgtaatttattctaaacttttcacttctaaattatcaatgcatattcagtaattccagctactttgagaggaaacaagccagttgactatagagtcatagaattttagaaattaaagagatcttagtaggacatattcttgtttccattttaaatagatgagaaactggagattagaaatagcgagattatgggctgggcgcggtggctcacacctgtaatcccagccctgtgggaggctgaggcgggcggatcatgaggtcaggagattgagaccgtcctggctaacacggtgaaaccccgtctctactaaaaatacaaaaaattagctgggcgtggtggcaggcgcstgtagtcccagctactcgggaggctgaggcaagagaatggcgtgaacccgggaggtggagcttgcagtgagccgagatcgcgccactgcactccagcctgggcgacagagcgagactccgtctcaaaaaaaaaaaaagagaaatagcgagattatttggacaaactagagaactgggactagaatcagagtctgatcttcatagtgttttatggtctgtcaggctgttgtagtatttgagtgtccagtatatacataatgcaatatcagacttggcttattgtactcaaatgacagaattatttaataggatttatttgaagctataatgtttttcatcccattaggatacatataaaaattaatctatatggaataaaaatacatttcaaggtatttagtcattatttgctcttttctttttaaaatatgtatttcaaaattctacttttatctgtgcatacagagcattgtaaaatcaccataaactttacttcagttttttcctaattgttttaattgcataatttgtaattatctttaccttaataactcagaagacaaataagataatccaagttattgagtcatgaacctcaaatcgtaattcaggttctttaaaaacatttagaactttaaaatactctgaaggaatagctgacatgagtggcatgaatgtataaaattttgtgaatttttttctctaaattttctctttagattttgaatccacttgtttccaaggcacaactttcccaaacagtccagtctcgtttagttagttgtaaaattttaggaaaattgaccaacaaatttgatgcccacacgtgagtatttgtatgtaattttcggtctactttattacattsgtttaaaatgtataatgactgtgtaacaatatatttgtgttatttcatactgcatacaaatttagttatcttaactrttttaactttatggaattctcatgacgaatttacttattcagatgccttycttttcaatctcataacttttcagaattggtaaggttaacttttttcctacttcctatcttaatcttccctatctcataccaaatatagttttgaggataaaatagcgttatcttattgactttcaaaattggcagcggcataaagatagaattgctgcttttttacactgttgttatgaatttgttattttgaataatttaacttattgtgaggttttatggagcatgtttataattcatgtgctacttcttgcctgcttattaaataccaaatgaaaagaatggaatgttttataattatgatacaagagtaaagctgaagartattttggttgatggttgctagactcagatattctactgctacagccttttatcttagctatagacatttcaactgccaatccaaaattaaccattattttaaaaagactgtgtgatatacataatttacaagtagctaataacatccaaatttaataacatgtaaaataccttgtaaactattattttttttctattaaagtacrtttgttattattaaggtgagttaagattttaatgataattgyttgggaatattattctgaaacactcattcatttgcatgtttcttttctccccaccttcagcattaagcgagaaatacttcctctggtaaaatcactctgtcaagatgtagaatatgaagttcgatcttgtatgtgtcggcaattagaaaatatagcccagggcattgggtaggtatactttgaattccttatgccatttccatgaaaacatgccattgaaaggctgtatttgatctttaaaaatgatcataacaagtamctcctctatgtctggattaaaagagataaagaggaatgtgcttagcatggtggtaggcgtttgattaatgttaatttctttttttctcaccttagttgcttagttatcattccagacacctagattcaggaaagaaaagatagcccaatataaaccatacttggaatatgtttgactggctattctttgactatattattgggtcatttcagatgggattgcagttgtccctccatatccttgggaacttggttccaggacctcttttggataccaaaatctgaggatgctcaagtctctgatataaaagagtgtagtatttccatatgacttgcttatatccttccacatgtttaaaatcatctctagatgctaatagtacctaatacaatataaatgctatgtaaatagttatgctgtattgttcaggaaatattgacaagaaaaaagtctgtacatgttcagtaaagaagaaatttttttctgaatattttctattcatggttggttaaatccacagatgtggaacctgcagatgttgagggccgactacactctaatggaagcctttctatagctcctgtgcaacttcaggcttccaatgtttgttttgttgctctccttgttctttttttttttttttttttttttttttttgagagggagtctcactctgtcacccaggctggagtgcagtggcgcgatctcggctcactgcaagctccgcctcccaggttcatgccattctcctgcctcagcctcccaagtagctgggactacaggtgcccaccaccacgcccggctaattttttgtatttttagtagagacggggtttcaccgtgttagccaggatggtctcgatctcctgacctcgtgatccgcctgcctcggcctcccaaagtgctgggattacaggtgtgagccaccgcgcccagctgttgctccccttgttctatgggtgcctgaagctccaggagaggcatagcagccaatctcttcacccataagaactgatctcatttcaatcttagaagtgtgatattaaagggagtcttacctaaaaaccatcttgggaaatcttttcttttaaaaacaagattcaaaattggtacaaaaatcattggaacctctcatttttagcagaagttgcactgatttcatctggttctttgttgcacaagctaggacaatcagattgtggtcattggtacctttgttaattttttaaaaatctgggccaatatttaaggctccgaaaaggcttttgaatgtcacacagggtatggtagagtgtcacacagggtatggtggaatgtcacacagggtatggtagtgtactctgtcctgtgtccactgttgctaaatagtatttaagtgtcgtgttggaagtttaacacaattaatgaaagagttatctgttatgattattttcttttttaatgcccagagataattaagttgaatttgcatcactgtcacatgtttttgaaaaaaagagaactctgtttaaagattgaatggaaataacttttactatagagatgaaattatttttcttaaactattttctttcattgttaataaattcaaggatttcagtaggtatacaaatatattctgagcaaaatttatatgaaataaatttttatgaactttggatttgttctatcacattttactcttctacctcctctgtctatatcctgtatttgctgaatgtttgtgaagtactggtaatgttaacatctctatctgtatgatctagatcaatctcttagaaaaacatgtttttttgtggctcttcaattgcttaagtccttgtcattgtggtatgctgcctaatatggtagcccctagtcacatgtggctattttagtttaaaataaggaaaattaaagaaaattagagctttagttcctcattcataataaacttattttaaaaaatgctcaatagtaccctactgaagagtacaaatgataaacatttccatcattggagaaagttctacttgacagcattgtcttagagtctttgagatttgcgctgaaatttttaaaagttttctacaactcttaataactttcttggactctatcaacatcttatgtcaattataattgatgctgttttccatcttgtacccaagaaagctaaccacatcacaaggctctccttgatcagagtgtttgtcattacagtgacaccttatcatgaggaataagcagaaacaaaatgttgaatacaaactatttgtgattgtattataaatattgtatactccctaaaagtatttatattatgtttcattctgctaggtaggacacctagagtgatatatcatcttctatatagaaattagttaccataatttcatgtattaggtgaatggaaaataatttataccctgaaatctagatagaaatatattatttaggtttctgcagttactactgataagtttttctaattagtccagatttttgctgaagttgcttaaaatggaaaactatattataatttataaagtttgatataaactcttagttattaagatttctgtaggtaacaatattatgctggaggaagtgggattgattgaaatcattatgaaattactattaatgtttcttatatgtatggtgtgctttcccaataagactgaaagcttctggagagcaggaacagtatctttatgatttttcatattttctgcagcaactagcccmgtcactggtttttagtaagttcctgctacacatttattgatttgatttattttcttctattgcttattgtgcaggacagaacttacaaaaagtgtggtgctccctgaattaatagaactttctagggatgaaggcagcagtgtacgacttgcagcttttgaaactttggttaatctgcttgatatatttgatacaggtaaatcatgtggctacatctttgcttctgaaaacagtgtttttctacatgttttatgtcactaataaggaataaaagtagatttagaatttcctatgttaagcctcccttcctctccctctttttatgattcattctgttttcgtgtcttcttggctttcacttttaccctcatggtgtcgtagtccattttgtgttgctgtaacagaatacctgagaccaggtaatttataaaggaatttattttggcccacatttctagaggctgggaagttcaagatcaggcagccccatctgacctgtttctgatgagggcctcatgccacctcgtaatctggcagagaagtggaaggtgaagcaggcctgcaaaagggagagggaacaaaagaagctgactttgtaacaacctgctctccagagaactaacccagtcccacgagagctaacccagtcacttgtgaaggagatctcaataccacaggaacttcaccagtcaacccacgagggtggagccagtgggtggacccatgcggccccacctcttaaagatttcaccttccagtattgctgcactggggccaagccttgacaggcattttgatggagacaaaccatattaaaaccagtaccctatggcatacagtgttgctacatattccatctctcttttctcycatcaaaacttaactgacttgtgtgtgtatagggctaagaatttgactttaactttttcacctaattgacattaagacagatcctgagacattgtctacatgagtttcctctccttaataatattttaatgctagagatctcatggccattgggggagaaatttgggatggggtatttgagtgggagagggtaaagagatattccttagtgttatgtaaatcatgtcacaaagacagttaactgctctactgaatgtatggctagactcttgactaatgctggatattagttatcagtaaacattaactattttgataaagagaaatttggaggagtaaatgtcaagtacttaggtacagaattcaatcgtataattatagtattacatttacttggattaccaacattttatctgaactctaggaagcctcttaaagattattgcaatatggacaataattgtgtttggaaattccagaacagtcatttagacaatatgacaaaccagaggagtaaaactgcagtacatgataagtgaatgaataaatcttttttcctctaataatggggcatccccaggctccaaactagaaccttgccatcatctttgatcttttctcttttactgcccacacccatttatcacagagctgggcctaacctgtgtttgtggctttatttcctaccattctttcccactcctcttgtgtctgatgctccagtcccacttccttagcataccagattctttcacacctctagtcttctctcatactttttctttctctattgtttccttccctctatttttgtcctagccaactccttctgcttcttttttttttttattattatagtttaagttctagggtacatgggcacgacgtgcaggtttgttacatatgtatacatgtgccatgttggtgtgctgcacccattaactcgtcatttacattaggtatatctcctaatgctatccctcccccctccccccaccccacgacaggccccggtgttcgatgttccccaccctgtgtccaagtgttctcattgttcaattcccacctatgagtgagaacttgcggtgtttggtttttttgtccttgcaatagtttgctgagaatgatccttctgcttctttagttcccagtttaaatacagtttcctccctgacatctttctaaatcctttacaccaggggttggcaaactatggcccttagaccaaatctggcccaccgcctgtttttgtgaataaagtttattgggacagagccacacttatttgttcacatattgtctgtggctgtttttgtgatgcaagaacagagctgagtagttgagacagagcctgcaaagcctagaatatttacaaaaaaagtttatagatccctgccttataccagctattaagacagtgatcacattgtcttatattttttgtgtttggcttttttgctggtttacatttctcaaaatcagagaccatttattattcatatttctacttctacttagttacaaggcttgttctgtaagaaatacagtgtgttgaatgaatgtcatttaacaaaaatagtagatatggcaccgaaatgtaatgataatagtaataataatactcataagcctgttatagcattttatttagtatttctagataataaagaagtgattcatttctgaaatttaagaaaactgtgagaaatttggagagcatttagaattgagacttaaaaatcaccagtatgtcagatacttatgacctaagcagatgtactcaaataattgattaattttttaaagaagagccatctaagaagtaaaagtgatgaaattcaatacatagaacatattataagctaatgtaattttagtaawaaatgaaatgataaaatgggcttaagctgtagcatggtatgagatgtgtgtaaaagagaataagaaaagtttcctttgcttactrtttatctatttatgttaatggtgttagaattcttttagttattcaggctcaaatcctcaatcatcttagctttttaattcataatcactctttatattctgttcccaatggcctgcagtatgaagtccaaaccccttaacctgacattaaagtttttgatcatttcaagcctcctcttacccctttttcaccacccacctccatcgttgttgctttcaggtattttctattactatgaggctaacatagtaatttttctttctggaatttgtgtgtgtattagtttccacatgtgcaatgtggacgactgaatttaaagtatgtattattttgttttgttttccagatgacagaagtcaaactatacttcccttagtgaaatcattttgtgaaaaatctttcaaagcagatgaatcaattcttatttctttatctttccatttaggaaaactatgtcatggactatatggtatgatatatcctaagaattttgagactgtagataatttttcccttttttttctacctcagtcattaaactttggctcttcagttaattgtaaagcctaactcttaagtatataaaaatcttatgagatcttagaattttgatagcatcatttagagcacatttaggaatgactttttcaccaatagaacctatttgaaagaacagtgacagaatgaagtaagcatagctctttaaatctctgaatattttataattatgtattatttggtatgtgataatagaagctcaggcttattaactatttgtacgtagtaagtatacacttattaaccatttattgaataatttattatatcattagagaagttcagcttgggatgtagaataatgccataactcttggcattttgaacacatagttcttagctttccgtatcgatgtgagatagactgtttaataatgaactcgtaacaatatattatgagtttctagctccttgagatagttaatgaagtggaaccattccattgattaaaaatattttgaatttatttgctgtctttcagattcaatttttaagctccttccctgcagagacacatacacacatgcatgtgtcttttctgtcagcaattttagaacatttactataatagcagatgtataaatagccacaatgttactattagtgactttttagtggcctacaatatgatacatgctgcagcaattaatgcagctacagttcctgcgttatgtaagttatacttttgaaattaaaatattactggtattaacatgaggtaaaataatgtgatctgttagattcctaacagatactcttttcatgttccttttatttataaagtatctgtaaccatttatttaagtatttggctccaattatatttttattgtactttgattttccctttttaaattttgttttcaattgaaatgttgagctagttttttatatttgttttaggaattttcactccagatcagcacttgagatttttggaattttataagaaactttgtacattgggtttgcaacaagaaaatggacacaatgaaaaccagattccaccccaaatcctagagcaggagaagaaatatatttcagtacggaagaactgtgcttataactttccggtaataaatatgtatttatatttactgaggatttttattataactttaaaatatgtgcatagatggcattcaaaatattgccatttttgacacttgctgcttgcattatgtctagcatacatagtatgtgcagagtaaatatttgtgaaatttatatctctacgtataaatcagaataatagacacatatttggatcttycaaatatgatttttagttaaattacaattcagagaacatgatttcaatttaagtgaaacgattataatattaggtattgatgcatgtttttctttccttcccactcatctcctcccttccacctccaccaggccatgattgtttttgttgatcctaaaaacttccacatggaactctattctacattcttctgcctttgccatgaccctgaagtaccagtcagatacactattgctatttgcttttatgaagtaagtctgaagacttgatatcactttacgtttgttgttaattctacctatgtatactagatgattttgtgcttatagattataagatatagactggatatctctttcatgttctagtcttaaatcttgtttaaaaatttccttaattttcttcttttttagtatgtttactgaatcatttccataaatacattatatttgtgtattcttttattaacccattcattcagcatatctataccaagtgtttaaaccagacattgtggtagatatgggtgatgcggattttaaagtaaaatcagtttttatatgctttataatatttacagttaactttgcacctaaacttaagcacttgagaaccaatagaaaattgagacacattaattatttttactacaaatggatggtgtttcgtgagcatggcttttagattctgctattatgactataaagtaagagcaaaaataaattgaaacttttatgatgaatttaactttttaacccttgaagttgaaatttggggcatgtttcttgaatgacagcaagaagtgcacgtatgccgtggttgcaataaatacggataagctataactttcaacttcaaaactgacacataaaagcctctggataagtggtacaagttcttattctcagtgagaatatttcacccccttccttgcactgtgttcctatgtcagagcactttgatgatctgcaagtgtgcaggatatccatccatagcatcattattaatgttgcttagatttttttttggctattgggtgatagttttgcttttttaaaagaacgctttttctggtatgaaaatatatatgcattatacaaaatcctggacatcttctctttaaattaatttcagtgctgcacaattatatcatctttgtaaaacacacctgtagaactctgctttcggaggagcggggatagggcagaaagcactggccagctgagcagaatattcacctccaagatgcattaaatggtcacttaggcttggttaccatgtccacatgtacttgttagatcagtggtctccagagagggttgtacaagtttggagtctgagaatgcagtatttatgcaattttagactttctatttttttctcatcagtttaatatttaattttatttatgttttatagtagacataacatagcaccatataattaaacatatggaaatgtacatgtgtatacaaatatgtttcactggtggaagtgagtttgataatcattgatctatatttgctgggtggctagtttccatattctaccacaatcataccatgtaggtagggtaagaatgatgtgcctctccataaaatgaggggctagtgtaaattttttttttttttaaagtaatgaaaatccactggtggatttaaatttttctaacagtgtcaatgctagagtctgataattgcttttgtattctttgttctcatttttcagaataataacactttggaaatatttttgacaagtcaaaaacaaccctgttagagcaaagaattttaaaacactttctttatccagggaccattttttttttcaaataaaactttattcaagcccagtgtgttttagaaagaataaggtgaaatagaaactggtaaattcaccattgtgggctccgagtttataaggaggagacaaaaaaactactgtctacaaggggaactgtattattctggactctcccaactcctctcatgctggttaaagtctttgatggggaaaagtaaagttggtttgctttcttaggagttataactaccccgacatcactgtaggccttcagtagaagttaccctttgggaagttctgaactggtatgaacacttgtatgcctaggatatcctttaagaccctgttggctcctctaagactttaaaatgtgaactagaggcccctgtgggcttgttattgctgttgatgtgaaagtaatgactctggtaaatcccattcttttgtatttcctcaccccatgtgtgtctgcacattccagcatgtcacgaggcagactagaaagctggttatttgtgccactaatttttatagaatctaattttatatttgtgttataacatggctttattttagaagaaatatataacaaggatgtatttttaaaaattattattgtaacctgtatctgtctagtactctcaaatctgagagactttattgctatattttaggtatctaagcttctgaattctggagtatatttaatacataaagaactaataacattattacaagatgaatcactggaggtaatattttcttactctttgatttttaattcttttatgtttggtccaaatataccaatgccttttctccccttcttcttggaatcgtgtcaactctttcagctgactagccccagaagcttcaaattgttgtaccactatatcataaataggatattgggaagatagtttaaaaaataaggttttaaaatatattcagttttaaaacttagtatatgtatatttgtttattaagaaaaatttaggaagtgccaaaaaacagacaaaagaatgcctttaatttcaattactgttactatttgttttctttttcttttttatatgaatattcttttctatataaaggtttttattttactcaattgtaatcatatatcacattttataacttgtttctcttgccattgtgtagtattttaccacttaatatgtacttatgaagactttgaaatactttattttgatgctatatttagatattcctttcacctaaatgactgttagtttgccaaagcgcagctcatgaatattttgatatcactgagaatattatccaatttaaacaacgtttcgaaagtttggaggcagtttttgaacatgttagttttgtagaagtagctgtctcagatttagactatttggacaatgtcaagaggcaggtacactaatctctttttgaaggttggccaaggcagttgatcatgtttctaagacttttcagcaagaagatggcagagtaagaaaatacaaatcctcaaaatgttatttgggggaaaaaaaaaaaccactactactatatagaaattgacatgtagaattaatctagcaaaaacatagtaatcactataacagtaatcaatatctctgttaaaaggtactagatgctcttatagatcatcttccagaaatcttggaacttatgtctactggtggagaaagcagtgttcaagaaaataaggtaaacttcatctttcagaaacattctgagttgtgtaaatattatcctactctacagggtgttttgaggcatcaatgaaagaatgtttggaaaacttgtaaaatagtgcatgccacatagcaggtggtcagtaaaagcctattagagtttgaacagcttgaatttcctctatctttcttacattaataattttaaattaccatgattgttgtctattgtctttggagtttatgttcatattttcatttttcattagcattaatgattattccaagaatagcaaataggacaaaagggtagaaatttattctttattattattttttaagcctctgtgtaacctaagaaaagggtaggatttaggaggtcaaagcttattgacagtaataatatgtaatacattttactgtagttggaagagttgctrtgataatctgacaggaagaagaatgagttgtagtttttatttcaaaatttggttcccaggaatcatactttttacttaatgatttcttttaaaagtgtttgatttaaccagataattatctccttgtgacaactaagatgtctcctaaactctgaaatgagaaggagtattctcttccccaatgtgttataagactgagtaattttactgagtgctgcaatttatttataattgattttttgatgcgtttcattttcagttatcttctctgcctgacttgattccagcactcacagctgctgaacagcgagctgcagcctctttaaaatggagaactcatgagaagctacttcagaaatatgcctgcctgccacatgtcatatcaagcgatcagatttattaccgtttcttacaaagaatgttcacaatcatgatgacaaatgtgagctcagtacctttcatcttattcttttgaactcatggttggttctggaattaccaaaactcttcatattttcaaaatagtagaacaaactcagttcattccattctacctaggaggatgtcagcttcgtaggtccagaagaggggactcaggtttccctttgcctccccactaggtctccctctgagaatcttctctctagctggagagaggaacgactaggtggcactttcacctaccctttgtttatatactgccaagaacagagtagactcacttcaaacttgaaatagttcttcttaagaggaaggttgacaggactcagtgaccttgactgcaaaggaccttcttctgttctgatgtgcacctctgatgcatccacaaccttagtgtttgaccccagctatgctgttttgccaaggcaccccttaagcttcctactataagtttggttacttttagagtgtggcaatggaacagagaaagcttatacaaatacatggatgccctrctattgataaccttataattagtgttaaaagaaaaagactcctccctcaaaacaaggtggcactcaagcctccccacaaagttaattgtctacttttttcacagaaatttccaaggggattatttaactcataattcactgtacatttaacatgacatcctattgcaattttttgaaatatagaaacattccatggctctgtgatctcggcacagaaggcttgggacaagcccaactggtcaggcctgcctctggggcagatgctgagttggggtagtgcaagctgggtgggccccacactcatctgctgggctgaaaaccctgggctgcatgtgcctacctggttgtataccagttgtaccactgccctgcccagggatctcccatctttgacccactgcactgccagactaccagcagacataccttgcaagctcctctgagctggaatcaatcctactgaaactattcaaaaaattgaggaggaagtgttcctgtttaactcattctacaaagccaccatcaccctgataccaaaatctggmaaagacacaagaaaagaaaactgcaagtcagtattcctgacgaacatcaacataaaaatcctcaagaaaatactagcaaaccaaatccagtagcacatcaaaaagttaattcaccacaatcaagtgggcttcattcctgcaatgtgaggttagttcaacataagcaaatcaataaatgttatttgccacataaacaggattaaaagcaaaaattacatgatcatctcaatggatgcagaaaaggcttttgataaagtccagtgtctctttgtgttaaaaaccctcagcaaactaggcattgaaggaacatacctcaaaataataatagctgtctatgacaaacccactgccaacatcaaactgattgggcaaaagctggaagccatccccttgagaaytggaacaagacaaggatgcccactcataccactcctattaaacatagtactagaagtcctaggcagagcaatcaggcaaaagaaagaaattgaaggcatccaaataggaaaagaggaagtcaaatgatctctctttgctgatgatatgattctatacctagaaaaccctaaggatcttgtcagaaggctcctagacctgataaaccactgcagtaaagtttcaggttgcaaaaccagtgtacaaaaatcagtagcatttctatacaccaataatgttcaagctgagagccaaatcaagaatgcaatcccaattttaatagccacaaaaaaaatatccagtaacacatctaaccaaggaggcgaaagagctctgcaaggggagctataaaacactgctgaaagaaatcatagatgacataaacaaatggaaaaacattccttactcatggattagaagaattaatattgttaaaatgaccatattgcccaaagcaatctacagattcaacacattcctatcaaactaccaatgtcatttttcacagaattaaaaaaattattttaaaattactcttgaatagccagcgcaatcttcagctgctatttcagccctctgtttacccagtgtcctatcagccttttacctgttagttgtagaatccattgatgatccttgcttgaattggtgatttcattataacttgaaaaataattttaaaattccatcatttatgcatttttaatggtggcattctgtgaagaagtgcattcctttgtccacattggttatttgattaccttgagctacgtttactaatgtaaagacaggatgaattcttaattttttcccttgaattatcaattttcagagctaggaggtggcgtagtagctatttttaatggtgacaaatgcactttgtttttaatgttgactctcttttagataaatgttattgcagttattattttttgtgcacaaattgttacaacttctttaagctggctcttatgtgcttttgacttgattacatttatctttgacttctggcccaaaagaataccttatgccataaactataatatatattttatatgaggtacaaaatatacatgttttcatatgactgttatatatgtatttgaaattctatcagtatatataaaatgaaagaaaagaataatatgcttttrtttagttcaccatttatcaaaaattcattttccttaagtctaatcatgtttctgcttatgtatattttttaaattttcttttctaaatcataggaaataccctctttttacattcaacagattaaaaaccccactcaaattgtacccgatagaatgtgaatagctcatataaaatatgagaggaggtagcaggcaacactgtctcagcaatgtaaagtttcaatttgaatttcaaggatccccactataatatttgggatctttagtaattcaacattatatttgtatgtaaatcaagataatgaacatgaatttatactggacacartacgtctggttgagagatttttctctaatatatggtttgaacccaaacccaggaaagataaatggccatatttatttagaattaaggttctgcctagtggtgtgacagaaattgaaaggacaaagggacttgaaatactggtaagaatgattgacatggtgtcctttggattctaaatgtcatctgtatcatgaagagctagaattaagccagaaggattgaagagtatacctgatcacaggatctctaaattaatatttcagtagtggcatatttttggtgatgtacctgacacatggcatgttatagcaaatgtttgtcagatgaatgaatgacaaagtccagggaacagctaaaagaataggtggcaggggtgtatttgatcatgtaagatgagatggcaaggaaatgagagtcaaatctggaggatttggacatgactatgccaaattaactttgtaatataattattggttgatttgcctgagtgattaacattaaattatgaagatacttccagaaggatgtaagttcartgagttgagaggcagtgaacactttagttttgtcaataacttaaaattgatttkgtggggtcaaattatctagactagaattagcctagtgtaactgtctgtcttacttacttcttcaagaatgttttacctgtccaaaaggcggcttcacgaactctatgcatttttctgcgttataatcgtaaacaagaacagagacatgaggtcattcaaaaattaattgaacgtaagtaatcattgtctactattttraaaaaggaaagtaaacaaactagttggctttagttatgtctaacttatgtatcattttgctgtgaataattaggttactattgggttttataagatgatttttattttctagaaatccttatggcaagattagatctgtgatgaatgaaagtaataattactctgttttcttttgtaaatgtctacactttagaaattaaaatatatttacttatattgaaagcccagtatctcccctgatgaaatagcatttggaactaaaatataaatagaatatccatgcatctaatcatttattttatggtcctatttcaatattcacataattaacagaatctgggatttttctttgaatagagttgatagtatatttgaatattaatttgatgagcctagttggtttataatgtcttaagaaactaagtcagtttacaaatgcaaatttattttaatttgktaagagctaaaatcaaggcaaaaacatttggtttatagtattgattctagaaatagttgcacacacctatatatacttagtgagtttgttaattattgtatatttgctttgcccataatgtcttaatatttttaccaaactatattatccagcataggcaggtaatgggattttctagttattggagtttaccagtttaagtgtgtatcactacttttcaaaaaattagagtacttttataaaattccatttaagaaaaaatatgctcagtatactttaatctttctttttatagtcttattttaattcggttttcatttttcagtggcaagagctcatgtttagaatgttttattttgaaagaagattcagtttggttttatttttgaacatttatgtaaaaagtagaaaattaaccttttaaatattgacctgaattattgtcagtaatgctgtttatatatgactgtatctactttaggcatttttaaggaaacaaagggaagaaaacagttaatttgattattaaaacacttagaagttatacagagctgtgtttgaattctagctctgcacctgccagctgtgtgactttaaactcactaaatcttagtatccttatcttttaagaggaagaagtatgtgcatcccttgggctgcttttcagggctaaatgagataatatgtgtaaagtacttagcacatagtgggtgataaaaagtagtaaatacagtcattccatagttaataaatgcttatgaaattgaatgaaatgtttgacaaaactgttttatggtttttgaggtgtcattttggggatttacaaacctgaggtatataataatgatatttttcctcttatgtcttgtatttgctagccaaattgtgggtatgaagaaacttcttatgcattttgtgtgtctaactttgtcactttaatttcatataggaaaaattaacttaagataatttttgttgttgtttctagaattgggccaaggaaaaagttactggaatagacttcgatttttggatacctgtgaatttattatagagatattttcaaaatcatttttctgtaaatatttctttctacctgctattgaactgacacatgatccagtagcaaatgtgaggtatgttatcaatgaaggaaaatattggaaattgtatttatttttatctactatagtgaacatatgcaaaatcttttccttagccaattaaaaacttaagtcaagaatttacacrtgctttgaaattcttagtattcataattgatgggcatcagtaagacttggaagcatactctttcaacactgtctcagatcttttgtctttactgggttgagagcagttagtcaaagccagattggtaagcttcttcggccatttggatatacacattgaaatgattagaagrttgagtagatgttattaatttatctaccattaaaactaaagaaaagacggtcagtagccttatcacttcaaagttgtttggtgagcatccgttagtttctagaggcccatttattcaaagaagtagaactgcttcaaagtcttcatcttgtcttctatgttttgccttatattattgaaatccagtaaaatgttaattgcatttgattaactgttaagttggaaggaacagacctgaaaatggcttgcctggaaatggaaaaaaataataaatatattttgtcctttttctctccaaaagagcacatcacttcctttttttttactgtggtaaaatatgtataatataaaatttactattttaaccatttataagtgtatagttgagtggcattaaagtacatgcacattattaagagctatttttgtacatttgataatagaatgaaaagaatgttaaaccctcagccattagatttctgtgttctaagtcctgtgtctctattttgaacttgaactcagatctgcaggaaagagagacatcagagtcagttggccaaaggcattcctgaacaaactctagaactccctgctgaattttcatacattggggcacttagtcttatgcatctgaaagatgcatatgtaccacttttataaacaactgatgtgaattttaggcaatatgtaaaacatcaaaactttttaataggaagagttggtgagataataagctaactgagattaatagtcttggtgttgagatatatatgaagatgaattgtcaaaagatacygaaaagttcaacttaagacttttatgagcattttttaatgggaacaaatctagaagtttttcttttgtattttaaatgtgagaaaatacagaaagcacaactgcattgactttagtttttgttgcatatttcttgtgctttataaatgagaggtggggtattgctgacatttaaagtgaattgaaaagaaccttttgggctgggcgtcatggctcatgcctgtaaatcccagcactttgggaggccgaggcagacaggatcacttgaggccaggagtttgagaccagcctggccaacatggtgaaaccccatctctactaaaaatacaaaaatgagccggtcgtggtggcacatgcctgcagtcccagctacttgggaggctgaggcaggagaatcgtatgaacctgggaggtggaggttgcagtgaaccgagatcacaccactgcactccagcctaggtgacagagcaagacttcgtctcaaaaaaaggaacctttggtaattctttagattttagctcttcctaaacaactaatgggtccatctttatgaacattttgtgaattaaaattgtgattctataaaagcaactttcaatgtgatgtattgtcacttatcaggcagttgacaaaaataatttgaaaggaaacgaaatcatctctactttgatcagtgtaactaagagcataacattgactctttgagaaagaaatctgccaattcaaaaaaccaaatgaagagtaattaaatattactctattaatttcagagatctgcagggcagcagattattgtataactgtgtgtcttggttcctactctcttgcctggccagctgccagccaagatatgtgtccagcaacactgtatgctaactggctttgggtataaaagcccttgctcagtgctttagggatgtgcagatagaatgaaagccatcacaggcaagggtggtaggatcatgttggttaggaggacagtttccggagccacactccctgagctgaaattccagctctatattaaatgtgtatctttagccaagttacaaaacttctgtgtgcattgatttccttagtacctaatttataaagtattctgaggtacaaataactgagataatatacataaattatctgaaaggtgtggtccctaatctcaagaatttgatcatctcatgggcccaggagtctcatagagatgaatcattaygatggcttgggtagcttctgctgaatatctgttttctagacatgccttgggttataaagaatggagtgtgcatagattgttaagtgtttttgtttttccttaagttaatgtttaaaatttaaattcaccaagtttagacaatgtcaagctggaaaaagactcttggtattcagagaagccttttccacagctgccagaaatgaaataatttatttggggggattgataytccttaattagagaaagcattactaggtttagctgtatccgtggtgagctgtgaatgagattgagaccattgttgctatttacaatgctggaaattctacaggaggagcttctttaccctttttggttaaatcaaaagcaaattttgttgtatatgaagaatcctcaagtaaaaattcagctgagaaagtgttctggaaactctaaaaatgggattcaggtgtctcaaggttgcaataaaaataaaaaataataatttgtagagcattcagatgaataaatgaatatagcagctataaaatagatacccacctagcatccctctctaaaacagccatggaaaaagagtagacttttagcttagcaaaggagagtatttcctctgaaatgcctcctcctggaaaggcttttttttaggctctgggattwactcttaacttcctggcattcttcaacctccttgtttcttcctttccaacccagtctagactgtggtagtgccttagaccaccttagactaggtccttttatccttttcttctctaactgtacacattactttggtgatctctcccatttcatggtttaaatatcatctccttgctgaagattcctcactctatctccagcattgacatctaccctggacagccaacttattgagcctgttgcccacttgcatttccattgcatatctgatagaaatctcagacttaatctgtccagaattaaatcttcatctttcttatctgcttttgctccttctgtagtcttctccatctcaggaaataaccatcacatctgcttagatgaaaaccttaaataaattcttctctctgtcattctacctccaatccctcagcacatcctgctgctggtaaaagatattcagaatccggactgggcgcggtggctcctgcctgtaatcccagcactttgggaggccaaggcaggcggatcacaagttcaggagatcgagaccatcctgtataacatggtgaaaccctgtctctactaaaaatacaaaaagaaattagccaggcatggtggcgggcacctgtagtcccagctactcgggaggctgaggcaggagaatggcatgaacctgggaggcggagcctgcagtgagccgagatcacaccactgcattccagcctgggcgacagagcaagactctgtctcaaaaaaaaaaaaaaatggtattcagaatccaactacttctcaccaccttttactgctaccactctggttcaatgtaccatcatctcttgcctgaattattgtaagagcttttcctattgtttctctttttctgttcttgactagctgcagtctaatttcaacacagtagacagatgatgcttgtaaaacattgtcagatcatttcacccctctgctgaaaacctaccaatggcttcttgtcatactcaaaataaaagacaatttccttacagtagccctcaaagcctcttatttaccactctgagctctcctgctagtctcaccttcactctgtttaggcatagtggccaatttgctcatttggaccaacagtagagacaagctctctatatttgctgtgatgctcttttccagatattcacatagctcattccctaattttctttaggtctttgcttaaatatcatcttttcagtggaaccttcaatgacaaccctctttggccacctgctttaaaactgattaatcccctgcccctggtackcccttgtctttattcytcactttatttttctccatagcatttaacactatctgacagattttacttgtttcttttctcttctctgctcccatactagaatgtaagttccaggagagcagagaattttgttggttttatttactgttgtatctcagcatccagaatgatgaatgtttgacacataatagacactccatgaatatatcttgcatgaataaatgaactctcaggctatctaaaacttgatttttgttttatgtttctgtyattcttagttattaamttcactcaagagtaaayactattttattgtagaatgaaactttgctacctgttgcccaaagtgaaatctactctgaagattcctgctgataagcatctacttcagcagttagaaatgtgtgtgaggaaactcctgtgtcaagaaaaagataaagatgttctggctattgtaaaaagagtaagtatcactcttgccacaatgttgcattttttgcattaaggcagtaagaatcttagcttcactatttcagcttgacaggatagcaatatattacaatatttttatccttgctaaaattgtaagaattagtaaatgatttggttgatatgtgctacaactggatatgaaactttcgaagggcacctagacattaaacctgtattactagtaatataagcccatgttgagagagtttgacacatgttaggtgctcaataaacactgttcaattaataatgaatgttttattcatcagactttctttataagtgattataatccagtgaaactttgttggtaaaattggcaaagtcacattttatagaaacttatccctggaagggccctttgagttaattcaggggtctgtttgactttatagaagttatatgcctagaaatattgtgtctacttgagatcatattagtaagtagcagaatcaggaggactagaatagagacctcttacctgctcctgagtgcatttctttgtaaataatgtaacattgtatcctatgagttttttgtttgttttagcatgagatcttagtatatggattctttggagatgttggaaaaactaaacagtaaaaatttgggttagtgagccacatcttagaataatttttactcttcaaaaattgtttatgctgaatatataactaatatttttataagttgaagtgaaattatttacttttatgaatctgaatataaacttcaggacacattgtttttgagcatttatttatagtgagggaaatttccttattagtgtcataaataaattagcatacatggtgagaaaagagagaattcttattttttctctttttttctagaaatcattgccagatgtcacatgaagaatcttttaattaagtgatttgatgacttagtatgaattagtatagttttagttttaatgaaatgtgaattcttctttcattaactggtataaccagaaatacgtagagttgcacatgcatttaaatctacacacacacacacacacacacacacacacacacttgtttctaccagacagttccttccttactatttaatatttaagtatagaagtttaggcaatggagttaacttgtcaaaataataaacatgagatggttaattacttttccagaataatttattaattcaagagacaatataagctaatgctatacaggtgtaacagtgatgtaataaaattaatggattattagtctatagtggattattctggagtacagctcttattttcagtatgctgcatatagtgaagccagtctgtcacatggaaattctgtagtataatgagacattagtatggaaaactcccaggaagctacacaaaacttttggataaaaattgaatagtttcatcagttttataatatgagaagtaactttatttaaaaagagagtctttcatggcatgcattatgaatttttcataaatttcagcagaaaaagcttccactaaattttatgtttgtcatggatagctttgggcatatgcatatccaaatgtactttattttggccattagggttactcttgtagaataagttttagaagtactgccctctatcagagacagaaccctgggttagattgaccattgttttgattgggataatttgtttcaaactagtgtattccaaaagacaaatagtaaattgagagaatattttcagagcagatataaaatttctacagaagggaactaaggattattaggccccatgatggcttgtctcattcrtatatagctaaaagactttttaaaacttcaaaagctacattatgtttctgaaaattcagaaaagattggcactgggagttactagaaattagttagattatatgcatttggtatttgaaatatgcctgtagacttggtcttcttaaggttaaaaactttcaaaagttaaaattgaccctggcatgattgtataaagaytgattgtaagtacaatgtagaatkgggcagaactttagttttctgacttagtcttccccctagtgcagaagtcttctatttgaacctccatttgcaaaataagttgctgagaaatgattggttgttttaatttaattactttagaataattttaaaaactttccttatagactgtattagagttggacagaatggaaatgtctatggatgctgtaagtatactctctttaccttattgtgttggtccattttcatgctgctgaaaaagacatacccaagactgggcaatttacaaaagaaagaggtttaattgaactcacagttccacgtggctggggaggcctcacaatcgtgacagaaggcaaggaggagcaagtcacatcttacatggatggcggcaggcaaagagagagyttgtgcagggaaactcccccttacaataccwtcagatctcgagagactcattcactatcatgagaagagcataggaaagacccacccccataattcagtcatctcccacccggtccctcccacaacatgtgggaattaggggagctrcaagatgaaatttggatggggacacagagtcaaaccatatcatttatattgaaaggaatattttaaacttggcagaaactcatcactaatgtttcacaatttcattttaaactttaaacagtttcagaaaaagttttatgagaaagatttgttggatcaagagaaagaaagagaagaactacttcttttgsaaatggtatgttgttttcacatgcacacacatatactcttttctgattaataactgtgtttttttattaaacttaatcatttctttccatttcaccatttcacattactcttttttcttcttaaatgatagtccagttttttgaaatctgttcttttatgaactagatagaaaactatatttgagagccttttaaaraaactactttgctgaagtataattgacaactacatatatttaaagtgtactatttaatgaattttgacatatcgatgaaaccatcaccacaatgaaaatatgaaacatttctattcctttaaagatttctgcccctttgtaatccatgtcttctactctagtccccaacaaccaatgatatagtttctgtcactgtagattagcttgcatttccataatttatataaatggaatcatatattaggtattaatactatttttggtcctgcatctttctaccaacataattactttgagattcatccatattatcgtatgcatcaagaagccattcctttttatttctgagtagtagtctatatttcggatatatcacaatttgcttatccattcacctctttatggacatttggcttacttctaatttggggatattacaaatatagttgctttgaacattagtgaagaagtccttgagtagacctgttttcatttctcttgggtaaatacctaggaatagaatggctgatttgtatggcatgcttaacttaaaaataaaataaaactaaatttaaaaaaatggccgggtgtggtagctcatgcctgtaatcctarcacttttgggaggccgaggcagacggatcacgaggtcaggagatcaagaccatcccggctaacatggtgaaaccccatctctactaaaaaatacaaaaaattagctgggcatggtggcgggttcctgtagtcccagctactcaggaggccgaggcaagagaatggcgtgaacccgggaggcagagcttgcagtgaaccgtggttgtgccactgcacaccagcctgggtgacagagtgagactctgtccccccaaaaaacaaaacaaaacaaaaaaacctgctttcaagtggttgtaccattttacatctacattgtctatgctggaaagctttagttaccagccatactattgggtatgtaatggtatctcattttttttttaatctctttttctattcctgatgcctaaagatgtcaagcatcttgtctttgcttactggccatctttatctcttatttgataaagtttgttttcagaattttaagtgggttgtttattattgttgagaggtaagagcttttaatycattctgaatacaatttctttcacagatatacatattatgaattttttcttggagtctgaggcttatctgttcatttattaatggtgtcttttgaacaacagaaatatttgattttgatgaagcccagtttatcaattctttctttgataattcttttttgttccaagaatcctttgtctgtcccaagatcatagattttttcctctattttcttttaaaaattctcattttaggttttatatttaggtttatgatccatttcaagtacatttttatataatatatgtttatttttttccatagggaatattcatttattccagcaccatttgttaaaaagccttcttttccccattgaattgtcttagcgtccttaagaaatagttgtacacatatgtgtctatttcttgacttcctattattctgttccacttatttataagtttatcttttaagcaataccaaactgtcttgatcactgtaactttatagcgttcttgaaatttggtaggatacgttttccatctttgttccctcttaaaattgctttggccagtctagggcctttgcattttgatatgaagtctggaatttatttctacgtattttatgtttttggcattattataaatggaagtatacatttttttatttcactttccagttttttgttgctggagtataagaatactgttgatttttatatattaaccttgtatcttataaactttctaaatttgtttattctaaaaattgttttttagattttctaaaactaaaattttatacgtaagtgatcatatcttctttaaawacagcaatattacttctttctattcaatatttatgccttttgtttctttcttttgtcttattgcaagatccaggacctccagtaaaattaaggtggtacaagtaggcatccttgtctttttactgatcttagggggaaacagttcagtctttcatcatcaggtatgatggtagaaataggttttatgtagattccctttatcagattgaggaagttacctcttactcctagtttgctaggagtttttatgaatggttgttgcattttgttgtatctagaaatgatatttgatttttctccttcattctgctaatatactgaattacactgatttttcaaatggtaaaccaatgttgtcttttggagataaaccctatttggcaatggtttattgtcctttttctccattggatccttggctaatgtttttgttaagggattttgcatctgtattcatagattcatagtgaaattggcctataattcccctttttgtcatttttgggattagatttggtattaatgttattctggcctcataaaacaagatggatggtattcccaccttctctattttctgaccaagtttgtataacttggttttatttttgccttaagwgttttatagaattcactagtgaagttatctaagcctggaattttcattttggaaagtattttgataattgattctatttccttagtagacattagataatgtagatcttctgtttcttctgttgtcaattttggtaagttgcttcccttccaccccagtttacatgttrtttaaactgacaaatctgttggcatgaagttatttataatattctattatccttttaattatggcattaatctatgatgataaccattttattcttgtgttagggatttcctctctcctttttttggaaattttttttgcttgtttctctagggattttaatatccatacctaaccttttacagtctacatattgttattattatatcatgtcacttaacaataatacaaatctctttacctcctccacacccattcttcatgttacagttgtcatatgaattatatctgcattgaagaccccaccagtgttgtaattttgctttaagttgtcatatgtatcttgaagaatacactcttagtgtaaacttttacatttactcagatctttaccatttccagtgctcttcattcattgcttaagatctaaatttccctctggtatttttttccttaagataaaagaattttctttagcaaatcttgaagcacaggtcttctggtgacaacttctcttattttttctttatctaaaatgtcttatttttaccttcattcctgaaggatattttcactgggtatagaagtctgggttgacagccttttccttactgcattctaataatgtgtttctgtctgtcttctggccaccataacatctgataaaatagctactctcattgaattgttgatgcttctttatgaagcattgtttttctctggacactttaaatatttttttcctttagcttttgtttttagcagcttacttttgatgcatctaggcattatttacttgaaatttatccagtttggatttggtaatcttactgaacctgtaaatgtatatcattccccaaatttgggaagatttggtcattgtttatttaaatatatattctcttccaatttttctctctcttatttctgggtcaccagttgcacatatattagatcgtttattattgtccgtaggccaagaggctttgttctttctcaatttttaaaaaaactctgtgctactcagtgtgaataatttctcttgatgtatcttcagtgttaccaacccttccctgtcatctccattcagctgctgagcctatccarttaatttttttatttccaatattatatttttcagttctaaaatttccatttggttcttttagtgttttctatttctatgccaagaatttgtgtgactaaagtggaaattttattatttcagcagcctttcaaagcaagattagaattcaggattgccagtgggagaaactgtagggaagactctaaaaaattttaggaccaaatgacctagcccaagacaaaaacagacaatagaaagagaaccgcagataatcctgatactggaattagtagacaaggacttcaagataactgtgattaatatgatcaagataatagaggcaaacatgtagaaaatagataactccgttaatccaacccaatgaaaattttcagttttatgctttatttctgttttagaatttccatttgatttttttatgtagtccacttctatgtggaaattctttatcttattttctccatatttttccttagtttacatgtgcatttgaaaagaatatttattctccacttgttgactctagtattctagcatgtcagttataccaagtttgttcagaacttgctgtgtttgttgattttcwtgcctattctgttagcataagggcctcctgtgttttggtaacgttttgtttcatgatattggagctggttatacaagtgcgtctattttgggaaaattcattgagctatgaatttgtatacctataatttgtgtactttctttatacatatttatgtatstatatttgagatggagtctcactctgtcacccaggctggagtgcagtggcatggtccaggctcrctgcaacctccacctcccgggttgaagtgattctcctgcctyagcctcctgagtagctgggattacaggygtgcatcaccatgcctggctaattttttttatgtttttagtagagatggggtttcatcatgttggcctggctggtctcaaactcctgatctcagatgactcacccatcttggcctcccaaagtgctgggattactggtgtgagccactgtgcccagsctctctatgtatattatacttaaataaagcatttaaaaatatccaagaccattttcttttctctcaatctttttaaagaaagatattatttagccrtttaccaatctgaaattgaaacgaccaaagtaatggatattttgctaatgtgatttaggaaataccgtctagaaaatgaagggtaattattacartgataccaaactcattgttttagcttgacaaaccctcaagggcataattctgtagatatgaaaagagcacaaatctgaaagaaccctgaattctttagacactaacattggaaaaaaatacttcttttaggcatttttatgaactttacttgaatctctaatgcttaatttctcagaacaattttctagacctacttcagttgtacctttaatgcaagatactgtcttaataacaggaacaattagagaaagaaaagcaacagaatgatggaaggcccatgagtgataaaatgtttgaaaagaaacgtaagtagtttttctatgtcttcaacacttaattacataattaatgttgcatcctggtattctgaaagaccatgctgaattttttatttgatatggaaaattgctttactttctttcatttttgaaaagtcgtttttgaaaattggccacttaatgtggtacagatgttaagagtacatgaatgaaaggcaggaaccagggtggaygttcagatgcttcaaaagaaaagcttcaagtctgataacagctgtaagattgtgaaattgatcactgaataacaaagattgaaatatgtaaatattaccaagtaagaatatttggaaaagaaagctgcttagctagggatagtgattcatattgtctgagttgtcttgtgtatttatggagattaataaggacttagaggaaattatacaacttaaagcagaatttattttaggtagagacactaagacaccaacgcaaagtctgcccaagaacatccccatttctgttcctggaccctcttctgtcaccccatcgacaagtaagaaataacttctttttatatctttttgtaatttttcttccttgtatacaaattgctgggaaagtcactctattagatgagatacagtaggataatntatctcattctaaagcacttttcaccttctatcattaggtgttttggtagtttttaattggtagtaagggtaagagatacttcagtgagctcaaattaaggaaaaaaggctaaagccatctgtgttttactgaaaatgatggtagttggggagggaatgggggttggagcagccgaggatgaactgaatacattttycttttttctgcttattgctctaggtaaagaaatcaagaaatccaaactgattcgaagccagtcttttaataatcaagcttttcatgcaaaatatggcaacttagagaaatgtgctaggtaygatctgtaagcccttcaatttttaacataatttttatctttattcacatcttcatatatatgagtttacattttataaaaatcagaattaattttgaggtttttttataggccagtattttgtgagtgttcttctgtagggattgttatatttaaaaataagagacctccaacaattttcacaaaaataggtattctggcattctaggaagaatactgacatgatactatttaataatatcatagaatccatatattatttcatgagggagatagtagtatatcacatgtgccacttaacttttaatacgtatgagtatgttccattatctaaatgtatatagacatccctttgctactaatattgtttctgtctataaagaatccattggcatgttcatatgataaagtgatcacagcagagttagcgtgacaatagatgaatgtctggtttcccctttagcccaggagacaaaattacaagcagttaagattaggatagaatcaatataagttaaattaccatgattttttatatgtgctatacaaactgctgtatgtcaattgacaagcaaaataattttaagaaaacaaatatctttaaaactattcctttgtctatcaagataaattacatgtttcaggaaaaagtatttttcttttattaaagatagcttcttacagaatttcagctgtgtttttgggcattatcagtagatccatcaagagtacctggccagtagagtgatctcaagatagaaaaaagagattataactaaagataagttttgtttccaagaaaattttacccatyttagctgccttgcttgaacctcaaaagaaaaactgtaattctgatgaagcaaaagtttaaggaaatgctttcaagttatagacgaagtaagtgttgtgaggcatgaatataaaaaaaatgagaaataaaagcaacaaacgtttcataagtagaggaaagcattaaaaagaagattaaaacagcacaagtgttagatgactgagattgtaagaagtgtgtttttgtattttaaactaaatcatgttgttttctagtaaaagttctacaacaggatatacaacttctgtctcagggttaggaaagacttctgtgctttcactagctggtaagtagcaatctaagttcttcaaaaagttgctaaatttaacaaaatattattttccttaaatgacctatttctttagtactagatgtagtgttttcttaaatctawatctttatcaggtccctaagaaattaaacttttgtctagcaattgagaaaatatttgactaaactattttgtcttcactgtgtcaagactcaagagtttagtacttttaaaatagaaaaagaacaaaagtgatagggtatgttttgccatactgggaaggtttactgaggcacagacaaaaaggttttgcaataatttttagggaagttaaaaacaacaggacttcactgtaaatctagatgaacagctagacatttacaatattatgtatttggaagtttgtggcaggggtcagcacatttccctgaagggccagaaggtaaacatacaggctttgttggccaaattgaactctgctgttactgagtaaaagcagctatagacagtacataatgaatagatatggcggtgttccaataaaactttatctacaaaaacaggcagtggattgacccacagactgtaatttgctggcctctggtttatataatagagcatagaattatactataaataatgtagactatattgttaaaattactagtggctaaatgtgtgtttttaactttatgctttggagatactggttgaaaattttactattgatctatggtaatttttttaggtgtaaatagtagtgaatctgctcaaagatctgaaatttttaagagattagttacattttctttttaggttacattttgagtattctgtcttctttttctttttctttttaattcttaggaggaatgtatatactcattggctcttctgtaaactggttcatttgctggaagagaaaatctttctagcattaaagcatcgacattcacgtacagtatatagagtggttttctgcaaggtagatggtgattatcgcaagaaataatttgataacagaaagttgattaactaaaattttccccatatcttggactataaataataaaaccattgattactttcagctcagtaaagctgtgaattctttaggaggtactaaggaacattcagagtttaagaactttatttaaaatatagagtgcctttaaaaattttagtgtacaaaaccagtttgaattagcttcgagctaatggtgcagatgattatagatgttcataaggggttcttcagacttggatggatctcacctgtcctcttggtacttcttcacttagctgtaatgagcatgtttattcatgattttgtaacattttttgtcaagaaatttctttgtctaaatcattaagaatattgattcagaagtggtttttaaaagttttaattaagtgcattaatttatttagttttaactttgctagtttttaagtgaccttaagaaccaagagagtagatatggtccacagattctaaaacttacatccaaagtcttaagttatgtattttatgaggtgtatttgtctgttctcatgctgttaataaagacatacccaagactgggtaatttataaaggaagaggtttaattgactcacagttccacacggctggggaggcctcacaatcatggcagaaggcaaagggaaagcaagacgtgtcttacatggcagcaagcaagagggtgtatgtaggggaactgcccttttataaaaccaccagatctcgtgagacttattcactatcacgagaacagcatgggaaaaattygcccccatgattcagttacctcccaccgggtccctcccacaacacatgggggttattacagttcaaggtgagatttgggtagcgacacagagccaaactatatcatgagagtaaatattttattaaaatatttgaaaaatattctattttaatgtctcaatattatttttagttgagggagaactgtaggttgaatgaaatatctcctagagttcttggttagaaaaaggtgcttattattgttattcattacttaaaatagaaactgaaaatatttactatgtaatacatctataaagagaaaatggaagcagaacatcttttaacaaatttgtcagatgtttgcatagagaagagatcttatttgtyggactcaaaacaggcttcaagatgattatgtcatttgagatgaaccttaaggtatgctaggattttgacaggcagagatgtgtatagaataacattccattcacagtaccggtcataaacaaaagatgattgttggtgttttcagggagcagcagctgactagtttgrctggagtgtggagtgagtataatggagtagtgttacataaaactgtaaggaggccgggcgctgtggctcacgcctgcaatcccagcaccttgggaggctgaggtgggcagatcatgaggtcaggagatccggwtaatcctggctaacacagtgaaacactgtctctactaaaaataaaaaaaaaaaaatttagtcgggcgtggcgtcaggcgcctgtagttccagctactcaggaggctgaggcaggagaatggtgtgaacccgggaggcagagcttgcagtgagccgggagagagagcgagactccatctccagaaaaaacaaaaacaaaaacaaaaacaaacaaacaaacaaacaaaactgtaaggaaaggtcagagtcagagcttggaatgccagattggatactttttacttaacacgaatccactgttcattgtgtggggacttatgcctgtcttcagttatactactcaaaactgttcaggaaagtctgagaaactgtcacagccaaggagagcctaaggagaactaacaagtaaatgtgatatagtatcctggatgggatcctgagacagaagaagttgctattagataaaataataactactatggattttagttaataatgtatcagtattggttcattaaatataataaatatagcatacttatgtaagctgttagtagaggaaattggatgaggggaatatatgagaattattctgtcatctcaatttttctgtaaatcaaaactgttctgaaaaagacagtttatttaaaaaaataacatttacagtatcttcaaaaacactaagtgctcagggacaaatttaacaaaatatgctagagatacataaaaaactttgaaatattgctgaaagaagctaaagacctaaataaatggagaaatataacatgtttatggattgaaaaacttaatattgttccaatgtcagtttttttctaaattgatccagagattcagtgaaatcctaattaaaattctagtagtctttttgcagaaatttataagctgattctaaaaatctgtattgaaatgcaaaaggaccccagtgtagccaaaatagttttgaaaaagaaaaagctggagaacttaaatataagtttgatttcaacaattactataaaatgctggtaatcaagacattgtgttctatgttgtcatatatagtcagtagattttaacaaaggcttcaaagataaatcaatggtgatagaataatattttaaaaaatggtgctggatggaccaattcctggaaagacacaattcatccaggtgcagtggctcatgcctgtaatcccagcaatttgggaggcagagacgggtggatcacctgaggtcaggagttcaagacctgcctgaccaacatggcaaaaccctrtcaactaaaaatacaaaaatcagctgggtgtggtggtgtgcacctatggtcccagatactcgggaggctgagacaggagaatcgcttgaacctgggaggacgaggttgcagtgagccaagatcatgccagtgcacttcagcctgggagacagagtgagactccatctcaaaaaaaaaaamaacaacaacaacaacaaaaaaagactcaattcaaaactcacagaagaagaaatagacaatctgaataggctcatatctattaaagaaattgaattggtaattaataatcttccaaaacagaaagcatctagcccagatgggttcactgataaattctaccaaatatttgaggaataaattttaccaattatctacaatctctttcacaagatagaagcaacgggaatacaccctaactcattctgtgaggtcagcattacccaactaccaaagtcattccaagaaaagaataatacataccaacatctctcaagatcacaaatgtgaaaattatcaaaaaaattagcaaatcacatccaacaatatataaaaagaattatacaccaaaactgagtaggatttataacagttatagaagactaattcaccatttgaagaacccttaatgtaatacatcacactaacaggccaaggaagaaaaatcacatgatcatggtaatacatgaagaaaagacatttgacaaaacccaacacctattcatgataaaaaccatcagtaagctaggaatagagaacttcctcaacttgatagggaacatctacaaaaaacctacagataacatcacagtagtgaggaaccagaagcattccctctaagatcaggaacaagacaatgatgtattcctctcaccattcctttttaccatcatactggaagttctagaaaaggaaagaaaagatatactgattttggaaggaagaactcaaattgtctttgatcacagataacatgatcatctatgtagaaaatccacaagaattggcaaaaacactcctggaactaagaagtgattatggcaaggttgcagaatataagggtaatatatgaaggtcaatgtaaggttaatgtgcaaagttgagtatgtcctatattccagcagtgaacaggtaggaatttaaaattaaaagcaaaataccatttactatcagcactcagaaaaatgaaatactcaggcataattctaacaaaatatgtacaagatctatataaggaaaactacaaaattctgataggagaaatcaaagaactaataaagraggagatgtctcatgttcattgctagaaatactcaatattgtcaagacgtcagttcttcccaacttgatctataaactaaatgcagtctcagtcaaaatcccaacaagttatttggtggatatcaacaaactgttgcgaagtttacctagagaagaaaagtcccggaatagccaacatgataatgaagaagaacaaagctagaagattgacaccacctgacttcaggacttagtataaagctacagcgatcaagacagtgtggtattggcaaaagaatagtcaaacagattgaaggaacagaataggaagcccagaaatagacccacgtaagtgtagtcacatgatcattaacaaaggagcaaagccaatacaatggagaaaagatagtcttttcaaacaaatgcagctggaacaataggacacccacatgaaaaaacaaaattagatcttttacacccttcacaaaaatgtattcaaaaatgaatcgctgttctaaatgtaaaatgcaaaactataaaattcctagaagttaacataggagaaaatctagatgaccctgcttatggtaatgacattttagataccatgtcaaaggcgcaatctatgaaataaagaataagctgaaattcattaaaattaaaactactatttgaaaaatactgtcaagagaatgagaaggcaagccactgactgggagaaaatgtttgcaaaacacataatctgataaaggacttttatccaaaatatacaaaaaacttgtaaaacttaacagtaggaaaactaacaacctgattaaaaaatgggcaaagacttgaataaatacctcactgaagaagatatatagatggaaaacaagcatatgcaaagatgttcctcatatgtcatcaggtttatgcaaattaaaacaatgaagccccatgacacacctattagaatggtctaaatccaaaacgctgacagcaaatgctggtgaggatgtgaagcaatgggaactctcattcattgctggtgggaatacaaaatggtacagccactatggaacatcagtttggtagtttcttacaaaaccagacattcttaccatatgatctagcagttgtgctccttggtatttatccacaggagttgaaaacttacatccacacgaaaatctgagcatgaatgtttattcataattgccaaaatttggaaacaaacaaattattcttcagtaggtagatgaataaacaaactgtgatacatccagacagtggaatattatgcagtgctaaaatgaaatgagctatcaggccatgaaaagacatgaagaaaccttaaatacatactactaagtgaaagaagcaaatcgaaacattccaactatatgacattctggagaagatgaaactatggagacagtaaaatgataagtagttgtcaggggttcgggggaaggagaaatgaatagatggagcacagataatttttagggcagtgaaaacactctgtatgataccaaaacgatggaaacatgtcaattatatattgtccaaatccgtagcatgtacgccattaagagtgaatcctaatgtgaactgtggactttgggtgataatgacatgtcaatgtgggttcatcaatgcaacaaatgtaccactggtgggagacattgaagttgggaggctgtatatgaatgggaagatatgggagatctctgtaccttccactcaattgtgctgtaaacttaaaactgttctaaaaaatagagtctacttaaaaagtagtgctggaaccattggatatccatattaaagaaacaaaaacaaaaacaaaccctgaaccttaattatttgttaaatttatataaatttaaggcatacaagttcagttttattacatggatatattacacagtggttaagtctgggcatttagtgtaacctaatagtgtacattttaccattaagtaatttctcatccatcatcccctctgacactcccaccctttctagtctccagtgacaagtattctacattctatgaccacatgtacacattatttagctcccacttataagtgaaaacaggcagtatctgactttccgttcctgtgaatctcaagtcttatcactatacacaaaattatactatactcaaaatgtattataaacctaagcataaaagtgtctatattttctaaagaaaatacagaagaaagtctttgtgattttggaatacacaaagatttatcttgaccataaaacaaaaatatcaacacactggacttaatcaaaattaaagcgtctgggctttgaaatagagcattaaaaaaataaaaggcaaggcatagatttggaggaaatactcatagcatatgtaccagacaaagaatttgtatccagaatatatacaaagatgtctttgtaaaaattaggcaaccaattttaaaatgggaaaaaggtttgaacatgaacttcacaaaagatacacaagtaagtgcatgaaaagatgcttaacgtcctaatcattagggaaatggaaatttaaaagcaataaaaaaagcacccaaggagatatcacttcacacttgctagaatgtctaaaactagaaagactcacaatatcaagtgtgtgtgaggatgtggagtaactctccagaatactcacatgttcctggcagaaatgtcaggaaagaaaagaaattctgcacatcaatttggcagtttcttttgaagttaaatatatatttagtctatgacccagcacttccactccttggcatttactgagaagaaactaaaacatatgtccacacacagacttgtacgtgagtgttcatagcagctttatttgtaatatataaaaactggaaaaaaatagaaatgtctatcaacagatattatgggtaaacaaattttgacagattcacacaataccagtcagaaatagaaaggaaggaagtattgatacataaaacatgaatgattttcaaaattatgctgaatgaaagaagccagacaaaaaagagtatatgctgtatgttttcatttatataaaattctagacaatacaaactaatttatagttgacaggagtggtttggagagggaggaggaggattgtgatggggtatgagggactgtttcatagtgatagacatgttcacatcttgattgtggtgatgacttcatgggggtgtacatatgtcaaaaccttaactttttgcagtttgttgtatgtaaattataccctcataaaattgatttaaaaggtgaaaaagttagctatcattaaccttttcttctctttggttaccctctttgttagtatatttggtatgtctgactttatatgtattgctttcagatgattcattccggactcgtaatgccagtagcgttccatcttccttttctcctaatactcccttaccgagtacttcccgtgggacaggtaactcagttgaccccaagagcagtggaagtaaagatacacaaccacggaaggctaccttgtaagtaatcaagtgatgtcagactgagtgtattatcctcctcttttgcttaacacactttccttcccacttaagtactttccaaagaatagaaaatgtctgtgatgagaaaatgttataaattaaagggtattattgtcacatgtgactctgttatgttagtttatayagaataacttatatatggcaaaggcattataaccttagggaatcaacaggaaacatttaaatggctcccactaatgtctgaaatctattttttttctatgaaatgtttacatttagggaatttatctctaagaaggcatccctttaaacacctagcttaaggatatggtatttaatcacccagtgtgcagaaagattggtaaagctgatgtcacttaagaaataagtggcagcatkgaacccagaattgtgagtccaataaactgaagagatttacagactgtacttgtgtcttgaagctgaggttataaagggcctcctttctccttttcccccatgattccttttaatgtgctgtttgtatcttgatttgctgaagtctttcttttaccttaaatatttaagagaggggtaccataaaaatcaccatgataagagactatatcagggtataaatgattcagccaggatacccaaaccatagttacaagttagccatttcatataggacacctgaaccttctggttggaacagacttttaacaagatttagattttcttttaaatgtattttagtgaatgcatgggcatttttgaataaagtttcttaaatacattcttttgcaaaaactgtgctggagtcccttttaggatctgatttaggctgttttgcattgctataaagaaatacctgggcctgggtaatttatgaagcaaagaggtttaattggctcatagttctgcagactttacaggaagcatagcggcatctgcttctggggaagcttcaggaggcttattatcctggtagatggtgaagcaggagcaggcacatcacatggtaaaaacaggagcaggagagagaaagtggggttgggggaggtgccacacacttttaaatgatcagatcttgcgagaactcactgtcacaaagaaaacaccaagccgtgagggatcagccccatgatccaaacacctcccaccaggcctcatctccagcattgcagattacaattcaacatgagatttgggcagggacaaacatccaaactatgtgtattccaaattgtaattggtcgttgggtatatgcccaacttcattcaaaatttagaaataagtttagaaataaatttattgactagagctcaaggaaagaggaccaatgtactattacaaaaatgtaatagtaatagaaaaaaatgaacattgatattacaggttaatgtcaatgcagagtatatttttatttacagagaatgctctttagctatacaattattgctcccatgattatacgatggaagttccacttaaaagtcatgaaagtgccaggtgcagtggctcacgcctgtaatcccagcaatatgggaggccgaggcaggtggatcatctgaggtcaggagtttgagaccagcctggccaacatggtgaaaccctgtctctactaaaaaattacaaaaattagctagctgtggtggcatgtgcctgtaatcccagctactcaagaggctgaggcaggagaatcgcttcaacccgggaggcggaggtttcagtgagctgagattgcgccactgcactccagcctgggcaacaagagtgaaactccgtctcaaaaaaaaagtcatgaaaacagaggcaggacatggtaatggtgtatagagagctttgtgtgcctcgttcccagcagcagctaagtggttgtgcaaagttcaactcagcgcactggccctcgctgtgcatgtctgtcacatgacagggctgtctcatggttcctcctcctctaaggtgccttctagctctggcatcctgaaatcctctttattaccctaaaccctcttcctctgaaaagattgccctgaaattcttctgttgaagagcatatttagtaacatcaaaagtaatctcttgtccacttgctatatttttctaaatgccataggcattttttacagtaaagaccattgaaacccagtatatttatgctggttctcctttctttcagattactctctttatctgttgtttcactgttgagcatgcttttccttttcatagactgaattttttcttgttcaacatacgtagtatgtagttatttatataatttatatatatgtataattgattaaaaagtgaatctagaaacaaacattttgataacacatcaggtttatttagtcttttctgattctaaaggagggacgttgatatccacagttgcttttttaacttgtgactgggtatacaagtttgtaactatatttccatctgatgtggcacttatatggatctctcttgagtgcacactgccacatggctggatgggtgatgatatccacattggtctttcttctgtgaaatagtatccacaattcaaaacaggccatatccaagtgaaaatatgttcttttcatttaaaataagcctatgaggtgattttggaaagtataatttatcttaatttttgcttctcaaattctatgcaatacattccccagcttttcagtgtcattgagatgacacatttggtatttaggaatattagtgtcttaaaggaagcataggtatgttattatatcttgtcttttaaggcagttcatatatttatgcctatgtaacttccattatggttatacaaaattaaaaatgtaggaaaaatatgaattaaattgaatgctatgttatatatatacacagaatttttggtaattaaagatcattccaagtaatctttaatgtgtaattcattttttcccttaatcagacttctcatatattagaattattcaaagtagagtatctatatatttttaatttactttgtacacattatatgaataacatttttcatatttttttctttttctccctttctcactccctccttccccaccctccctctcttccttcatttctttcttcccaaagaaaatccagaaaatccaatccttaaatcaactgcttgatgaaggaggcaaaacaaaggcagcaggagataatgtgattggtacacaaaagctaaagcagtggctggggctttgtttttaaattttgggtttttttttttgttgttgttaatgagcagaaagagagacataatgacagctgatgttaaacttttcatatttcaaattagattccctaggaggtataatatatatttcttgagtaataatgtggttacggaattccaatgttatagtgaagtgtaatgaaaaacatctctaggaatgtgctttaaccactgctgcaaaagagacaagtctgcatttatttgtgcaggaaaccagccatttaattgttctagagttttagcatttaaaaatcgtatgaaagtctacatcagctgaattgtcctagcttgataagcacttggagggggacttggaaggtgagaaagatactgcattttctcatgagtctccaagcccacttgaaaagtcacactgaaaggatgcaaatagccgtctgcgattttggcggccctccggattgtggtgacaatatgttgtacccggacattcccaaatttaaatttggcartgaaaattccacaaagatttctggtaactttgagctataaataccttaaaaataatagattgatgattttctttatttcctagagaatttattttataaatactttgtttacattttagattgtacttgtctttatttaaaatgatgaatctagtctgaatcagctgttattccaagctatcatgcttaagctatgtcaacagcatttatttgtactaatgctaatatttccatcaaaatttgcctgtggaatatatacagttcttaattttaaactgtcagttcttgagatataccgtgtgaagctattgtcagcttctctatttcaaaatgcaatcagcatataactatattgatattagaagatatttgttttttaaaatatattgatgtatgataaagatgatctaatttgtgaatgcatatgtatgtgtggttactttttataatgtgaaataatgaataatgaatttactcaaaataaaacataggttaatgagatacctgtgtttgtgaaaaaaagtcttaaatactttcctgcagtttttattctataattaaagagtaagatagttcatttttaggtagtgaataaaagaaatataccagcgtcaactataagagcatagttactcagtgagagaccttttcatgccatttgttttccttcttccttccatatggcttctttatggctatttttagtgattcttaataatatcctttgccaaaggacaatcaggtaaatggaattgttactgctcattttgtcagtagttaaaattcaataggtatgagaaatttgacagtactggttaatcagtatactcgctgtggatttcatttaactgttttcattatgtctcctactagcaccaataatgtggaactgaatatattaagatctggagaatgtggtacagaacgagacatcaaaattgcatcagtttttttggtgctttgattcataacattctattaatttaataaaatggagaatttcaatgtatttgttataataaatttagcagaattataaggtttcactttcccatgatgcaaatgggaaaaggggacactgatttgacagagagaaacaactactgcttataaagttcaggaatgtagagcagtcaattgcagtcttagtcctagttagtactaagttatcaaaactgttcatcaaaattacttttggaagttttttaacagaacatgacatttcctaaaatctttgaaatatttattaaaattatactctcaaggacagatatatagaaacaggataaacagcaaattactgacagttatgaataactacatgtatctccatttatatcaaaaacaagatggatacttttgtgaaagttctcagtttaacaacttatcaaattaatcctttaagctagttgtatggcaaagaaaaatctccctccatctgtagttgtagggaaaagggacatcttcatcatcattttgttaattactaaaacttgcatttttaagaacaagtccaggaatttcactagttagccttacaagctaactgtagagctcacttttactgcagaaatggagataggtctataaaggattttacttaatagaggttaaataaggagcacataaagtttttctttataacctcttacacatttaaaaaatcatttctattatttgacttcctgagcttgaatatcttagtctggagatgagtcagttttgccatacaattagtggatatatgagaaatctttgaattgaaatgaaacaggctcttcagctggagtggaagttttacaatgaagatagaatgaattagattaagtcagtaacctgttctcagttgttacagcatatatatgtgagaacgtgtggttgagtgtgtctgtgtaggaacaatttttaagactcgacacttggccgggcgtggtggctcatgcctgtaatcccagcactttgggaggccgaggcgggcagatcacaaggtcaggagatcaagaccatcctgactaacacagtgaaaccccatctctacttaaaatacaaaaaattagccggtcgtggtggcaggtgcctgtagtcccagctactcgggaggctgaggcaggagaatggcacgaacccgggaggtggaggttgcagtgagctgagatcgcaccactgcactccagcctgggtgacagagcaagactctgtctcaaaacaaaaacaaaaacaaaaacaaaaactcgacacatatatagtgaagacttctacaatgttaagatttcccccgctcggttggaaaccctgaatttgtgtgtatgtatttgtgtaaggtaagttacattttttattggtctgcgtttttctgtcatgcctgtgtacttgggaaatctgaaactgagtgtcttaggaacttcttaaagcaaatgtgagggaacattaaaaagtatatttaaaatatagaataggtccattttctaccttaaagagtagtatattaaatacaattattatgctgttgttgctttgcagtgtatgtggtgggaagaaggcaggagttttttatctgcatgctatatgaatccttcaataataatgtacctttttattactgggtttggccatattgatttcagtgagtattgtgctctcacagacttatttttccagatttcatctcttaaaagtgggaaattggactggatgctactttattcctctttctactatttttccacaaacaaatctgactaattgaacacaaacaaggtgacttaagaatgtcagatagagttagtcctctgtctttggccctctagggcctagaattgcctgtcccttcataagtgtcaattagtactcttggaatgaatacaggaatgaattttattttattaatatgcagtctaaatactgacttttcatcagtccaggttatggaatgatgaaaagtcagtatttagactgcatattaatattattacctattcacattactctgaattatattaaacaactaatcaataaatgaattttaggtttttttaaacattagatagcagacagacagaaatccaattaggcatttagttaacatagttcacactgtaaatcagctctattcaggattctctgaatatagtcttttctgtttctgtgacagaaaataactgcctaaggaagatcagggatatttacgattttccttttcaccctgggacaaagttcgtgcttatattctgtttaacccccatgggtagctgtagtgcatgctgtttacctggtccccatcagatgttttagatggaaggaagagtaaaaagggcttggagactagactcaggaaaggtaggcttctgactctgccattgccacactggaagaccttggacaagtattttgttcccactggtatataaggtatgacttatccactagatgcagaagacacagtgcccaaggctgacagtactgtaagggcccatgaaggtgttttgcttattgccatatgctagacatataactttgaagctagatatgcaactttgaaagacgaatatattcatctttctaccaatgcagccatagaacatatatatcttcatgaaggaaggaggagtctacaaggttaaacgtgcctagggcccatgaaagtaagaatatggacctgtttctgggtccctctttctttcctttgtaaaatgaaggtattgaactagatgatctgtgattcagccaatgcctctgccaagcgatttgatgcaccatggaagcagatgctgtgatcaggactggttagagctattttcttctgatgtcagtcagcaagaaatgactccgtaatagattaaaataaaacacttattttgcaccagagagaaggaaagagagagaagcacatgactcaaggagaatgtttacatgtgttcctcccaaaggctttatcttgacatagtgttctcatctgcaactttttaaaaatgaaaatatgtgagcaacagagaaaagatattctacccagctagtctttagccaagtaactaaggttcttagaaacaagcttaaaataccagacagattgcacaaacatcttaaaaaatatgtatcaatttaatgcttttgtagtagtcctcccttatccatggttttgctttctgcagtctcagttaaccatggtcaaccatggtccaaaaacattaaatgaaaaattccagaaataaacaatctaaaagtcttaagcagcatgccattctgagtagtgggatggaatcttgcattgtcctgctctgtcccacccaggatgtgaattctccccttgcccaatgtctccacactgtctatgctcctcgcccatgagtcacttagtagccttctctataatcagtttgactgttatggtattgcagtgcttgcgttcaagtaactcattttacttaatgttgttattattgttaatctcttactgtgcctaatttataaattaaactttatcataggtatgtatgtgtaggaaaaaatatatataaggttcagcactgtccaccgtttcaggcatctgctgggggtctttgaatgtatccccctcagataagtggggactactgtatttatttgagaacaccctaaactagttaagaacaaaaggaacactctcccctgccatccattgctggtatcctgtgtgtgtttgatacctcagattcagcatctactacagcacgaagtgcttatgcgtgtcctgaattataggagagtcggattcaccaccctgcccagaaacagaagcattccagaggtttcttcatagatcatgaaatgaaatggccggtccactttgatgacaggaggcatggaataagcagtaatttctgacaagattccygccactgcctcagtgcccctttcatcaacttcaatcactgttcttygtaaaacctggaaaaaggaaataatgtgaaaaaccatttgtgtggcagtgcaaaggaggaattaaatgagccccttgaaattcttcacagtggtcctacccatggggtcatgctcctgggatttagtggagcaggcccatctacgttaagaggagtggtctggggttgcaccagggactgccacaggagtcttaaacaataccaggagacctcaggaacccaatgtgaagtattgtggaatatgtgaaacacattccgggcatggactcaggatgcactcatgcatcaaatctttattgagcatgtaatttatgctactaattcttgagctgagctggtgctcctaaaaggttttcaagctgcctggatcccttgatccctggatcccttgagtcctctgactttccttttggcaggcaaggtggaggcagggaatggctagtcttctgtagcagcttcccagcacctggtactactctgaggcatttttctgggccaagcccaggggtccctggagccttcctgaattctggctgcctatactgtggctgcttgctatgtttgggaggcccttttttacagaaacaagatgtgatatgagtgatgtacctatataattactgtgttataagagataatgaaaacataacatgtaattacactgattttcactccaggaaattccctgatttcctagaggaaaattaattccccagagcaaacagagggagaatatttaatcatttacagtttaaatttcatgatgacccttcataaagcagcagcgcatttcagtttttcatgtgttcatagcagaaacactttcaggtgctggtctgacggattgttttatttaattgtcttacctctcttgaggttgtaagacctgattccaggccacagttaccctactgtgtcctacttaagtggatgccatttttagtctctcttggaattgaaaattgcaattgtataagaaaatattaaaccacacagctaaggaagaatgtagagagatgtagctgccatttggaaatgtgtgggagcatttttatagtgatgactggagtttcctactggcattagtgaacatgggccagcaatgctaaccagttccctgcaacatgcacaactgctctggacaacaagcagttcccctcaaaaccaagaacccttccactgagaaacactgagtaactgaagggattctatgtggatggtgactaaacttgttcttagaagttttagagatagaactaggaccaaaaagtatgaatcagaagttacaggactctctctctctctctctccatatatatatgtatgtctctctccatatatatatatatgtgtgtgtatatatatatacacacacacatatacacacatatacatttatacacacatacatatatacatatatatacacacatatatatatatacatataacaattttagctatttgtggattgggcagctcttcaaagaaatggtgagtttgatgtcactggaagcatgaagaggaagagaagttggagggctatttcgtagggctatggaggggatttccacaaggagggagaag

SEQ ID NO: 94751 - DNA, 58664 bp, Homo sapiens
  misc_feature (1)...(58664): n = A,T,C or G
tggttttgaatgcagcccaacacaaatttgtaaactttcttaaaatattatgagatctttttttgtgatttttttttaagctcatcagccatcattagtgttagtatattttatgtgtgacccaagacaattcttcttcttccaatgtagcccaaggaagccaaaagattgaacacccctggtctacaccatctctcctttatcaatccctgcttggtactgtttactgttaagtgtttgtgtatgggtgacaataaggttgtatattctcagagatcaacatccaggtcagagctttatacatctgactgtaaacaatttgagggcaagggccttctcttgttccttactgtacccatgaagttatcagacaggctgttatacagttggtattcattaaatgtttcttaaatgaatgaacatttgacagatccatgacataaaaatgcagacaagtgggcctaaaacttaggtaatttttcattgctttttttaaaaaatagagacagggtcttgttatgttgtccaggccggtctcaaaatcctaggctcaagcaatcctcctacctcggcctcccaaaatgctaggattatagatgtgagtcactgtgcccagtccaggtaagttttcttagagaacttttagtctgtggctctgttgggatggacaactaataaaaatgggatattttgcaaataaaggaacagtagttaatgattatttgtaggcatagtggtgcacgcctgtagtcccaactacttgggaagctgaagtaggaggatctcttgagctcaggagcttaagttcagcctggacaacataacaaaaccccatttcaaaaatatatggccaagcatagtggctcacaactataattccagcactttgggggcctgaggtaggagaaccatttgagcccagtagcaacagagtgagatccagtctttactccccccccccacaaaaaaaagttagctgggcatggtggcacaagcctgtgctcctagctactcaggagactgacatgggagaattgcttgaccccagaaggttaaggctgcagtgagtcatgattgcaccactgcactccagcctgggtgacatagtgagaccctgtcattcattaacaaataaataaacaaataattatctgtggtaacatatcttgtatataagtaaaacattgaatgttttaaatttttaaaaatttatctaaaagtgataagattaaatccttgaccgccaggatttcttaaaatgcccctgcagagatgtgaactagtcttaatatcacgagaaaatgtcaatttagtagaattctatatttgcagcacatgcaataaaaaagcaggatgaaagtaactcctggccaggtgtggtggctcaagcctgtaatctcagcactttgggaagccgaggcaggcagatcacttgaagtgaggagttcaagaccggcctggccaacatgggggtgaaaccctgtctctactaaaatacaaaaattagccgggcatggtggcaggcatctgtaatcccagctactcgggaggctgaggcaggagaattgcttgaacctgggaggcagagttgaagtgagacaagattgtgccactgcactccagcctgggcgacagagcaagactacctctcaaaaaaaaaaaaaaagaaagtaactcccataagaaacagtttggataataatatatttattcaggattctaaaggctatgtagaaacaaaatctaaagttgttcacttagactgatccacctataaagtaccatctgctataaggtgatctcaagaatgatttatgaagggaaacatggcctctaaggtaaacccgaataaagttatagatgaatttataaagtaaacccagttttggacctactagaagaaaaaagcagaagtactacccaccccccgcccccccttttttttttgagaaacagtcacaccattgctcaggctggaatacagtggcacggctcactgcagccatgatctccctgggctcaggtgatcctctgaactcagcctcctgagtagctggaactacaggtacatggccaccacacccagctaatttttgtattttttgtaaagacagggttttgccatgttgtccagactggtcttgaactcctgggcttaagcaatccgtctgccttggcctcccaaagtgttaggattacaggcatgaaccaccatgaccagccagaaattctatctattttgatacataatagttctaaattttatatatggcttgttggacaaaattaacatcacttggcaaaaaacagagaattaaattcaggaaaaaaagaaaaccaccattcaggaacatttgaaatacatttataaatttaagctagtggagatattaccttacatctggatacaagtcctacctaacagcaccataatgatcttgtctgtatgaggattcagccaagacactccacatttctttgttgaccaggaacaaggaaaactggacagaaaaagaattacaaaaccaagtcaacaaaacatgaagtggcttattccaagtttaaaagcattagtgttctaaacaatgaaacaaggaaaatttatttagtaataattcctggaacttcatagtaaaggcacctaccagtaactgtggaaggaaatgctaccagataaactactaaatagcaacttcctactctactatctgtactatcagttgttgctcaccagcagatgacagtaacaacatccagttctttggtagaaaatgaggggattcagaagaatgtagactctatatccacctctaccagagtatgaaatcttggcatttccctgagccatattcatgtcacaacagctttatctacaaaatcaaacttagtcaataaaaaatatatataatacaataaaataaactaggccaagtgtggcgactcatgcctgtaatcccagcactttgggaggccaaggcaggaggatcacctgagctcaggagttcaagaccagcctaggcaacatggcaaaaccctgtctctacaaaaaatacaaaattagccaggcatggtggtgcatgcctacagtcccagctatgccagaggctgaggtgggaggatcacttaagtccaggaggtcgaagctgtaatgagccatgatcctgccactgtactccagcatggttaagagtaagaccctatctcaaaaaaaccatcaaaaaacccaaaaaccaataaaagaaactataaagtactataactaaggtactacgcatacattaataatcttgttatagtcaaatttttatgttcatacattaatctgtaagcctatgttcaaatgaggagtcttggactgactttcatattataaagttaccaatttctagaataaattccaaatatacagcctgtgacagaagatgccctactctcttttctgcagcttatcaacagtgtgctttttcagaaccttacacatacaaaattaatggtaactttatagattttacatcagagataaactcttcaatatatggcgattccgcctatggactcacgggagtgtgaaagtataccagaaatacactcagaaaaagctatgatcggccaggcgtggtggctcacgcctgtaatcccagtactttggtaggccgaggcgggcggatcacctgaggttggaagttcgagactagcctgaccaaaatggagaaaccccgtgtctactaaaattacaaaagtagccgggcatggtggcgcatgcctggattcccagctactcgggaggctgaggcaggagaattgcttgaacctgggaggtggaggctgcggtgggccgagatcgtgctattgcactccagcctgggaaacaagagcgaaactccatctcaaaaaaaaagaaaagaaaaagccatgatcatgctggcagatggtatgtataataaggtttacgccagcctgaccaacatggagaaaccctgtctctactaaaaatacaaaattagccagggatggtggtgtgtgcctgtaatcccagctactcgggaggctgaggcaggagaatcgcttgaactgggaggtggaggttgcggtgagccgagatcgtgccattgcactccagcctgggcaacaagagcaaaactctgtctcaaaaaaaaaaaaaaaaaattttacagccgggggcggtggctcatgcctgtaaatctcaacactttgggagaccaaggcgggtggatcacctgaggccaggagttcaagaccagcctggccagcatggtgaaactctgtctctaccaaaaatacaaaaattagcctggcatggtggcacgcacctatagtctgttactggggaggctgaggcaggagaattgcttgaacccgggaggcagaggttgtggtgagccgagattgcgccattgcactccagcctaggcaacaagagcaaaactcttgtctcaaaaaaaaggtttacagccggggcggtggcccacgcctgtaatctcaacactttgggaggccgaggcaggtggatcacctgaggccaggagttcgagaccagcctggccagcatggtgaaactccatctctaccaaaaatacaaaaattagccgggtgtggtggcatgcacctgtagtcccacttactggggaggctgaggcaggagaatcgcttgaaccaaggaggtggaggttgcagggagccgagatgccccactgcactccagcctgggtgacagaagactctctctcagaaaaaaaaaaaaaaaagtttacaaggcttatcattaccaaatcggcatgttccctcagaagaaacagaaattcagaaacagaaactatgcaagtgggaaacaaggcggaggggagtaattagaggtcaaagacatcgggaaggagtgtacggattaagtcctccctagagaaatggtgacgaaggatctacaaccacatttaaaataaactttttaatttgaaatggagtataacagagcagagcttcaaccacaagtctcctaactattggcttggcactcagaataccgtaccttccttaatgactcactgactgactctcattgaaaaatgagaatacttgtgagtacactccttttcagaggtgtattcgggatttcaggagtcggggaggcaagttgaagagcttccaactttatgcaactttcaggaaagaaggctgcggaccggtattagcaaatggaaatccggggggcggtcgtgggcaggaagtatcggccacacaggacctagtgaggccgaggaccctgctcccgacctcggtggcagcactcccctccccgcccggctccctggcgtgccgctgctcttcggaggctggcagcctcgccctcaaccaccgccctcgggaaagtcctcgactgcctatcaaaaaacatttggcctgggacgtccgctggctgcactatcccttacagaatcagcaagggtgaaaagccaggaaagagatgcaacccaaaggagtaaggcagtgccgggagcggcagaagcggagcgggggcgagggcaaggtagccgcggccacgctggctgcggcatggagacacgggaggaacgggacccgcgggcggcacgggaaagggctgcggctcagaccactgcggcgggacgggcggatcagcggggatctaagtctcctgaggcaagggcgccccgaccgcagcgactcctgacacacccaggccgcaggacgaagcgctaccgcctggggctgccagctcccgcctcccgcccgcagagcccgggccccacgtagaggatccggcgccgccgacactcgcacactcaccgcgcgcgcgccacccttgcgcggcagcccgccgccctcggcgcgacctccgccccaccccgcgcgccgcggcgcctgggctacgtcacgggcgcgtgcgctctccgcgcgccgtcagcggcgcgggtggggcattgccagctcggcgtcccggttcccttggagacagagctggccagggcggccgcggctgggcaactacgacagcggagcccctggggaagccaagatgccgtcgaagggaaaggacaaaaagaaaggcaagagcaaaggcaaagacacgaagtaaggagaagccacccgagagtcccctctccctgggcctgcctgggatttcgggtctggggctggcaacctggcgccccccgcgccggcccactcggaccctctccccggctctcccggcttgtgaggattacagctcccatgtccatagtctggcagatctctactatgtgttcagattatcttaaacgtgtagaggatgtataaagtagttccttgggccttttcagagatctcttttggttcaaaggggacacctaaagtattttaccaagttggataattattgaggttttcccaaactgatcagagccactgaggtgggtaatgttctagcactaaccccttacaggcctggagttgctgctagattgctactagccctattgggggaccccggtggtttctggacacgttggagtcatacgtggtgtccagcaacaacaccatatatgggaacacagagttggcaccaaacttgagatgtttgtaaagtaacttaagagagtaattcatgctcaatacagaaagtttgggaaacatgggaagtaccaaaagaaaaaacaaaaatcacctgtagtctcattatccaaaaataaacactactatattttggagtattcttttttaataaaacgatagcccaatgtacatacttatatgtggcttttttcttcccatttgttaatgtaagtattcttttatggtattttttttttgtttttacataactgcacagttagtctagcccttaaagtgccaagggcttatcacattcctagaactcactaacatatgttttcagattttgaccatgcttctacagtacacatttgaacaatgaggaacactaagggtaagagaccttattccttggattttccatgacccattgtttgagaaacctggctttgtttctacagtgagtatcagtggtcctattagagtgtctaatttcttgcatcaagtacttttttttttttcttgacaccaagttttgctcttgttgcccaagccggagtgcaatggcacgatctcagctcactgcaacctctgccttctgggttcaaccaattctcctgcctcagcctcccgagtagctgtgattacaggcacccgtcaccacgcccagctaatttttttatttttagtggagacagggtttcaccatgttggccaggctggtctcgaactcctgacttcaggtgatccacccgcctcggcctcccaaagtgctgggatgacagccgtgagccaccatgccctgtcgcatcaagtacttcgagccactcagacctgatacctggatggtcgtagtgagacagtgtatcactagtgcctaaatcatgccagaaagggacatcaacagctataacaggctgaggggttgggaatggagctggccttaatttgaagagaacaaaaggtgaaagtgggactttggttctctccactgcaaacccattacctctgtggaagaggactgagaaccagaggtaggaaagtggatgtggagggtggcagtatagaaaggtccacatgtacatatgtgtgaaaatatttagmattcaaatacaggtgaaatattcttaaatatgtacatatttatatatcatggtacctaccatatataagggggagtgttttgttaatgcttatacaataaatatttagaaaaatctcttcctttaccactttaatctttgaatccatcctttttcctctccacctctatataaatgattatggtttctcaggcatccttaaagcccggtgggtggggcatcgtggctcatgcccagcactttgggaggctgagcaggggaagatcacttgagcccaggagttcaagaccagcctgaacaacayaggaagaccctgtctctacaaaaatttttattaaaaattagttgggcatgctaactcatgcctgtagtcacagttacttaggaggctgaggtggaggatcgtttgggcctgggaggttgaggctgcagtgagctgtgatggtgctactgcactacagcctggatgacagagcaagatcttgtttcaaaaaaaaaaaaaaagtccggtgaactgtggcaccagctgataaactatttaacgtatttgccctagtgacttgactttttgtccaagacctagcccaaaacaaaacaaaacaaaaacaccatcctggctaacacggtgaaaccccgtctctactgaaaatacaaaaaattagccgggcctggtggcgggctcctgtagtcccagctactcgggaggctgaggcaggagaatggcatgaacctgggaggcggagcttgcagtgagccgagatcacgccactgctcttcagcctgggtgaaagagtgagactccgtccctcccccagaaaaaaaaaaaacacactcaaaagtggagggtaaagtgggtgggagatcacagttatactaccaatgggtatcatcatgcagaaactgaacagagataatgggtttgcagtggagagaaccaaagtccagcactgagtgagtaggaatagaaaagatagtttaactacaggagaatcaggctagggcactggttcacacctgtaatctcagcacgttgagaggccaaggtgggaggatacttgagcccagaagttggagaccagcataggcaacatagtgggaccccatctctattaaaaaaaaaataaatatgggagaatcaaataagtaaatgaaaaggtataaaaactgcccaagcgcagtggctcacacckgtaatctcagcactttcggaggctgaggtaggaggatcacttgagcccaggagttcaagaccagcctgggcaacatggcaaaaactcatttctacaaaaagtacaaaaattagctgggcatagttgcatgaacctgtagtcccagccacttgggaggctgaggtgggtggatggcttgagcccaagaggcagaggttctggggagccgagatcgtgctactgcactccagcccggtgacacagccaggcccagtttcaaaaagaaaaaaaaaagatatgaaagctttctgaaatgagtttggcttatcctgtcttttccctttgttttaccagtcttttcgagttatgctccaggactcccctcctccaggaagaggcacttacttaattatcttatgtgaatacaagtgaatatgtatttctttttttttcttttttcaaatgtgaatatgtatttcttattaacttattcttccaacaatatttgatcatgtgtgccaggcaatgccaagcaaaacaaataaaaaaagagaaaaatttaatagtaatataatagagttatatactatctgcatattagagttgtataaatagtcatatactgtcaatatcctcttcccatgcaggaagttaataaaaacagatgaatctgtggtggacagagccaaggccaatgcctccctttgggaggccaggttggaagtcacagaactctctaggattaagtatcgtgatacttcacngatactggcaaaaagtaatgaggacttaaakaaaaagcaatgtaaamtggagaaagacataatgtcagtattaagttacctgaagaagcaggatcaggagaaagataatatggtaggtaggtagaaagcctccttggcctcattaactacctctatggtgatgctgatgtggttatgtatttcaaagatttttaattccttgaaatcttaacatatacttaagacatttcaattgaccttaactctgtttgaagcaagacactttttcagaatggttttactgttatcggctctcttttattttcaatccttgttgcatgttttcttgtctgaagcaaacagagattgatgatcataagggaactttatgatctactttattttaaggataagagcatggtatgtgatctatatattttttgatgctgatttttagttttaaaaatttgtaaagcagttcactgataatccatgataactttctgaacccagcaagttgaatctttatttttatttttggccagttgaatcttgtatcttattgtaccttattaaagtgttgagagtaaagctatcattttatatttggaagaaaaaaggaggccgggtgtggtggctcacgcctgtaatcccaccactttgggaggctgaggtgggcagattgcctgagcccaggagttcgtgaccagcctgggcaacacagtgaaaccccgtctctactaaaatacaaaaaattaaccgggcatggctgcatgtgcctatagtcccagctactcgggaggctgaggcaggagaattgcttgaacccgggaggcagaggttgcagcgagctgagatcataccattacactccagcctggcagcctgggcgacagagcgagagactccatctcaaaaaaaaaaaaaaaaaagaaaagaaaagaaaaagggaagggaactaacattttggagccactacaatgtactatactgggtgctttacctctcttgattcttttactaacctcctatttaattatttttatgaccccatgtagctataatattgttatttccatattacagatgaagaaattgactttcagaaaggacaggtaacttgcccaaagtcacacccctagtgggtgttaaaagtggaaattcaggctgggtgtggtagctcatgcctataatcccaacactttgggaggaagaggctggaggataacttagcttaggagttcaggaccagcctggggaacaaagcaagacccagtctctacacaaagtaaaaaatagccaggcgtggcagtgtgcacctgtagtcccagctactcgggaggctaaggcgggaggatcacttaagcccaggaagttgaagctgcagtgagccatggtcatgtcacggcagtccaacctggacatcagagcaaaactctgtctcatattattattactttattattatttttgagacagggtctctctctattgcctggtctagagtgcagtggtatgatcacggctcaccacaggatcgacatccgggctcagatgatcctcctgcctcagtcttccaagtagctgggactacaggcacgcacctccatgcctggctaattttttgtatttttggtagagacagggtttcgccatgttgcccaggctggtcttgaactcctgagctcaagtgatccacccgcgttggcctcccaaagtgctgggattgcaagcatgagccaccatgcctggctgatttttttgtagtttttgtggagatgggatttcgccatgtcgcccaggctagcctcgaactcctgggctcaagaaatcctcccaacttagcctcccaaagtgctgacattacaggcatgagcaatagcacctggtccagaaatttctatctttattttattttattttttgtatttttagtagggacggggttttggcatgttgttggccaggctgatctggaactcctggccttgagtgatccgcccacctcaccytcccaaagtgttgggattacatgcatgagccacaaaacctggccaatttttatttttaaaattactcttttaatagtaggtattattaaattgccctctataaagtattgttctaaagtaagtttttttagtcaaccatagaaataatttccaaatgtgttacttagatgctttgttttgtggcttgtaatagctcattgttattggtctacatcagtatcacttgtacttcctgattctcatctgcctccttatatcaaagggcagcatctggcagtaacaggtgggtaatttttataatcatggattgccattaaaccaaaagaaacaaccttgggaggaagaaacaaagtagactaaatatatcctcattaactagctttcccatagttttgttactcattttgctatatactagaaaaatgttatgttgttaaactttgtttaaactgtttatagtcatgttaattatagaaataatagaaatgaaatgtgttttgaaaactattttattatgaacaaaattaggagattccccttaagagaatttaatgctgtactgaattaatcacagaataatctcattaaatgtcacaccagttttatgtgatttaggattgtcccagtttattttttagaatatctagattttttcctaaggtggtctaaaacattgtacatagtatctcacttgtgtcaacaaccatgtcaacaagtctttagtttaaaaagctactcagattcccttctaaaacaaaccagcattccttggagaaatggttgatttcaggactggaacagggaatataaaacatgaggctgggctgttcatggtggcccatgcctgtaatcccagcactttgggaggctgagtggcggggtggggggggtgcatcacatgaggccaggagtttgagaccatcctggccaacagagtgaaaccccatctctactagaaatacaaagaattagctaggcatggtggtgcgtgtctgcagtcccagctgcttgggaggttgaggcacgagaattgcttgaacccaggtggcagaggttgcagtgagccaagattgtgccactgcagtcaagcctgggcaacagagtgagactctgtctcaaaaaaaaaaaaaagagagagactgggggcggtggctcatgcctgtaatcccagcactttgggagtccaaggcgggtggattactgaggtcagcagtttgagaccagcctggccaacatgacgaaaccccatctctactgaaaatacaaaaattagccaggtgtggtggtgggcacctgtaattccagctactcaggaggctgaggcaggagaatcatttgaacacaggaggcggaggttgcagtgagccaagatcatgccattttgcactccagcctgggcaacaagagtgaaactccatctcaaaaaaaaaaaaaaaaaaaaaaaagagtctggaatatgttattgtgccagaaaataaaaaattttaaaggacatggccttgtttgaaggggcttccattggccaaatctgggacaatcaaaatattaggttggtgcattaaaagaatggcaaaaaccacaattgcttttgcaccaacctaataaataatagcaaaaatggctgggtgcagtggctcacacctgtaatcccagaactttgggaggccgaggtgggcagatcacctgaggtcaggagttcaagactagactggccaacatggcagaaccctgtctctactaaaaatacaaaaattagccgggtgtggtagtgtgcacctgtaatcccagctactcaggaagctgagacaggagaatcgcttgaacccaggaggtggaggttgcagtgagctgagattgcgccactgcactccaccctcagggacagagtgagactccatctcaaaaggaaaaaaaaaaaatggcaaaaactgcagttgcttttgcactgacctaataaataacaacagtaatagattataacctattgaatgaaataaaaatccacgagtgtgtactactaataaacacatacatgaataaataagggagaaaggaagccttttttttttttttttttttttgagacagagtctcgctctgtcacccaggctggagtgcagtggtgcgatcttggctcactgcaacctcaaaggatcactgcaaaggattctcctgcctcagcatcctgagtagctgagactacagttgtgccaccaccccgcctggctaatttttgtgtttgtagtagagacggggtttcactgtgctggccaggttggtctcgaactcctgacctcaggtgatctacccgcctcagcttcccaaagtgttgggattacagccatgagccacctcgcccagcttttttttttttttttttttttttttgcagaagaatgccaattaataaatttccaaggagtgatggagttagaaaaatcaccatttggcatcacagtaataactgaatcagtcaagaatcatcaatggatgctaaaacctactgggtgaaagtttgatgaggaggataattgcatagtctcaaaagattgtaccacaaattacttaataatcacagaagaaaaaataataacttttaggtggagaaagtgggcagacacaaccttaaccaactggttaaaattagcatcaatcacctaatgatgtgatgtactgaaaaggatacatcatcacttaggtactatatataacctaccaaaaacatacaacctgaatctactcatgaagaagcatcagctaagcccaaccctggccagtattctttttaaaaagtcaatttaaaaacaaagaccaagaaactgttccagattaaaggggactaagacacatgacagataaatgcaacgcatgatcaagggttgtattgtagacaagaaaaataaaaaattgcaataaaggacattattgggataattgtagcagaatttaaatatagagtatatattacatagtagtatattaatgttagacttcctgatctttataattttatagtgcttgtaaaagggaatgccctttttcttcaaaaatagatactgaaaggccaggcacagtggctcatgcctgtaatcccagcactttgggaggctgaggctggtggatcacctgaggtcagaagttcgagaccagcctggccaacatggtgaaaccctgtctctacaaaaaatacaaaaaattagccaagtgtggtggcgcatgcctatagtcccaggtacttgggaggcagaggcaggagaattgctttagcccaggaggcataggttgctgtgagccaagattgcaccactgcagtccagcctgggcgacagagtgagactctgtctcaaaaaaaagaaagaaaaacaaataaggaaatagatactgaagtcttctggggtaaaaggtcatcttgaaattgacattaccctttaccactaaagaaatacacacacacacacacacacacacacacacacacacacacacacaaatagagggaaagcaaatgcggcaaaattaatgtatatgggtgaatagtatgggaattttttgtactcttcttgaaactcatcttggctaggcgctatggctcacacctataatcccagcacttaggccaaggcagggggatcacttgagcccatgactttgagaccagcctgagcaacatggcaagactccatctctattttttttttttttttagacagagtcttgctctgtcacccgggctggagtgcaatgacgccatctcggctcactgcaacctctgcctcccaggttcaagtgattctcctgcctcagcctcctgagtagctgggattacaggcatgtgccaccacgcctggctaatttcatagttttagtagagaaggggtttctccatgttggtcaggctggtattaatgttgcttttatttttaaccacacacacacacacacacaaaagttgaccaggtacttctgatgatagccaggttttagaaactggcaatagcaggttgaaggtatgggaaatttcctgtcccctcttctctttccacctcactcacctcttttgccatattggttttagtattgtgtgaaactagtctacttaataaaggtagacatagagcagtttctttatcttcatgaccctgtattttgattttcaacagattgaaaaactgaaacagcaattaaatgaaacaaaggaaaaagcccaagaggagaaggataaattggtgagttatctatgtgtactaatactccacttactggatggtcaggtttctggcaagctcaggtatttaagacccaatgacagtgagtgagtaagttctctgggcaggctaatgaccttaaagcttgattgtatagaaattcaaaaaaccaggctgggcatgatggctcatgcctgtaatcccaacactttgggatgctgaggcggcggatcacctgaggtcaggagttcgagatcagcctggccaacatggtgaaaccttgtcactactaaaaatttaaaaattagccaggcatggtggtgcatgcttataatcccagctactcgggaggctgagacaggagaattgcttgaacctgggaggcagaagttgcagtgagccaagatcgcaccattgcactccagcctgggtgacaagagtgaaacttcatctcaaaaaaaaaaaaaaagtttaaaaacaacatattataaaaataagttattgtaaaaaaccatataatattaagattgcttcctgatactgaatttgttattgtttctaatgcttttcagtggatggagctaggagatacacgtttttaaaatattaaaatagatcatgactctatactaatactttcagtttacatgcaggaatatagaatttttacttaactttatctgtatctcctttatcccttgccaaaagtccttattcttactgataccaatataattacctagttgcgtaaaccccaatatatcaatctcagaatgctaatattaccaccaaaaataaattgctgaaaacagtttaagattttggggggcatttttctcccttaggatatrtaccagtaaggatctatgataaaattgcaaggcttaagaaccatttgaaattcttttctatgaggttatgccaccaactcaacaacacattttgcttttgatttttagaggttgctttttattttttcattctactgtatttatttaatttttttagatatgggagttttgctatattgcccaggctggtcttcaacttctgacctcaagcagttctccttgcctcagcctcccgagtagctaagactacaggcatacaccaccacacctgacttagaggttgctttttatttatttatttttattttttaatttaatttttttagaggttgctttttaaaaaattagttttgcctataaaattaagtaaaatatttacatggttctaaagtctgtaaaacaagttgcacgtcgagaaatccaacttttttttttagatggagtctcgctctgtcgcccaggctggagtgcagtggcgcaatctctgctcactgcaagctccatctattgggttcacaccattctcctgcctcagcctctcgagtagctgggactacaggcacctaccatcatgcccggctaattttttgtatttttagtagagacgggatttcactgtgttagccaggatggtctctcgatctcctgacctcatgatccgcccgccttggcctcccaaagtgctgagaaatccaactcctatccatgtcttttccacactgtcttctccctctccctgtagaaaaccattttatttattttgtgttttatcctctctttaaaaaaaaaggttgcttaaaaaattgtttccttatcagaaaagctaaaaaaaagtcataaacatatatatatatatatakagagagagagagattatatataaggagattttatatatataggttatatataaaatctttcttagataaaaggtagcatgcaatatacataaacctgcacctgctttttttatttaacagtatgccttggtgatcactccatagcagtatgtagagacattccctttttcttttcttttcttttttttttttgagacagggtctccctctgttgcccaagctggagtgcagtggcacaatcatggctcactgtaacctcaaactattgggttcaagggatcctcccacccagcctccggagtagctggaactgtaggcgagtaccactacacctggcaaatttttgtattttttgtagagatggggtctccctgtgttacccaggctgatcttgaactcctggccttaagcgatccttccagcttggcctcccaaagtgttggaattataggtgtaggccaccacgcctggcatcattcccttttatagctgtgtgatgattattgtgtggatatatcatagtttattcaaatggtccctgtcttagttcaggctattatgacagaataccatagactgaggtgctcaaacaacaaacatgtatctctcatcattctggaggctagaaggtcagggtgctagcatggttgagttcttggtggaggccattcttctggttcacagatggccrcttcctgctggatccttacttttgrcagagagagaaagctctggtttttccatctctttcttcaccaatcccatcatggaggctccaccctcatgatctcatctaaacctaactacctcccaaaggtcacacctccaaataccatcacactggggattagggcttcaacataggattttttgggttcacacatacagctcatagcagtccctttttgatggatagttgggttgtttccagtctttttctattacaatgaatgtgccagtaaagagcttcatgtatgtatcttttcacattttggccattatatcgttgggatagattactgtaagtggtattgctagaccaaagaaaaatatataatttttctaggtattgccaaatatccatttatagatattgtgctgttctgtaataccactagccatgcatgagattgcctgtttcctcacagctttaccaacagagtctattctcaaagttgatttttttwtttttttttttttttttgagacagagtctcgctcttgtctcccaggctggagtgcagtggcacgatctcggctgactgcaacttccgcctcccgggttcaagcgattctcctgcctcagcctcccaagtagctgggattacaggcacctgccaccacacctggctaacttttgtatttttagtagagacagggtttcaccatgttggccaggctggtcttgaactcctgacctcaagtgatccacctgccttggcctcccaaagtgctgggattacatgtgtgagctactgtgcctggcctcaaacttgatttttgcaatgtgataggtgagaaatgggtatttttcaatttacgtttctctcttttttttttttttctttttttgaggcggagtcttgctctgtcacccaggctggagtgcaatggtgtgatctcagctcactgcaacctccacctcccaggttcaattgattctcctgcctcagcctcctgagtagctgggattacaggtgcgtgccaccatgcctggctaatttttgtatttttagtagaagtggggtttcacaatgttggccaggctggtcttgaactcctgacctcgtgatccacccgcctcagcctcccaaagtgctgggattacaggtgtgagccaccacgtctggcccaatttacatttctcttattaggagctagattggacttttttttcacatttgaaggccatttgcatttcttttagtaccttttgttcatttgttgttattggcctttccttcttccccccttccttttctctgtcctcttgctttcacttccctctcctcctcctctttctccttctcttcctctcagtcttttatgtctccttccctttttctccctcctcttccttcctcatcctccttctttctcctaccttcctctttattagggatatttaccacactccctttgactcctagccaattaattttaactagtttcgggtattagggttatgtcagagataaaaggtgtgttaggtcttctcatatccctttttagtaaacatctgcattttttcctttctatatagaaacttttccaaaatttttttcttattcaatgcagatggtatctttttacagaaatgaaaactttatgcaaaaataaaagggggaccgggcgcggtggctcatgcctgtaatcccagtactttgggaggccaaagcgggtggatcacctgaggtcaggagttcaagaccagcctggccaacatcgtgaaaccccatctctactaaaaaatacaaaaattagctgggcgtggtggcaggcatctgtaatcccagctacgcgggaggctgaggcagggagaattgcttgaacctgggaggcagaggttgcagtgagctgagatcacgccactacactccagcctgagcaacagagtgagactccatctcaaaaaaataataataataaaataaaggccaggtgcggtggcttatgcctgtaatcccagcactttgggaggccgaggtgagtggatcacgaggtcaggagatcgagaccatcctggctaacatggtgaaacaccgtctctactaaaaatataaaaaaatcagccaggcatggtggcgggcacctgtagtcccaggctgaggcaagagaatggcgtgaacccgggaggtggagcttgccgtgagccaagatcgcgccatcgcactccagcctgggcgacagagcaagactccatctcaaaataaataaataaaataaataaataaataaataaaaatagaaaaaaggggggatatttcttcaaagaagatatgcaaatggcgtaaggcttcaaatgaaacatgactttgtgggacttctgttctttttcctaactcgtttacctcttttttgaatacaggaacaaaagtataccaggcaaattaatgaactagagggacagttccatcaaaaagccaaagaaattggcatgattcacacagagctgaaagcagtaagacaattccagaagagaaaaatccaagtggagagagagttagatgatgtaagtttcattccttttttacaaaaaggaaattagaattaactatttaatgcctacagaagccttcacaaacatttactcctgtgagacggcaaagaactctctttgacattttagaaattatttgagagaaaaaggagaagacagactggatgccaanggtcttgactttagacttctctttttctaagcattgatttccttgggaactcaccaaatctcagacaacacatcctcctatgtttatcagcaggtaaccctttggattgacttcagtaagaaacaaactacaagttcttagaaaacctcagggaaaaagtagcagacttctaaagaaaaatgtttaggctgatgaatgatagttttagagaaatttagaaggctctatggtaggggtcagtagggtgagaaacactgagtactttcagaaaatttatgttacctttctgtgctctttctcttactttcctcggcttagaatatagttttattacattactgataattcaataagtggcacaggggagtgccaggaacaagtagctgaaatcagctttgtgactataggcaagttacttaactcttccataccttggtttccttatctgtaaaatgggatagtaagagttagtatctcagccaggcatggtggcttatgcctgtaatcccagcattttggaggccaaggcaggataatctcttgaggccaggagttcaagactagcctaggcaacatagtgaaatcccaactctacaaaaaaatgttttaaattagccaggcacagtggctcgtgcgtatagtcccagcaacttgggaggctgaggtgggaggatcacttgagcccaagagattgaggctgcagtatgctgtgattgcacgactgcactccagcctgggtgacagtragaccatgtctcaaaaaaaaagtaaaataaaataagagttactatttcatagaattgttataggattaaatgagttaatatttgtaaagtgcataaaatagcacgtcacatggtaaaaattatataaacagtggtgtgcagctctctgtaaaaaaaaaatggtccttatttgtagcatttgctgattctgggggaaatactttagtatagcaaaggcttcagtcatctatcttaaggcttgattggagcttgaggatctgtttccaaggaggcacattcaagtggctgttaagttggtgctggtgattagtgggagacctctcctcatatgggccctttttttttttttttttttttgagacagagtcttactccatcacccaggctggagtgcagtggcacgatctcagctcactgcaacctctgcctcctgggttcaagcgattctcgctgcctcagcctcccgagtagctgggattacaggcgtgcaccaccacccccagctaattttttttttttttttttttttttttttagtagagtcagggttttaccatgctggtcaggctggtctggaactcctgacctcaagtgatctggccacctcggcctcccaaagtgcttggattataggcgtgagccaccatgctcagcccatatgggcccttttataagctgcttgagtgttcttataacttggtggatgacttcaccmagagtgagtaatctgagygggatgtagacagaagctatctttttcatgacctagccttcaawgtcacatagcattacttccaccatattttattattaatagttaaaagtgaatccttaagtctggcccacattcctagcagtggggaattagataccatcatttgaagagaagagtgtcaaagaacttatagacacattttaaaactaccataccactgcagtccagtgtatacacagctacaggaatacttttaaaatatcacagttctttttttttttgagatggagtgttgctctattgcccacgctagagtgcagtggcgcgatctctgctcactgcaacctccacctcctgggttcaagcgattttggtgcctcagcctcccaagtagcagggactataggcgcacgccaccgtgctaggctaattttttgtatttttagtagagacaaagttttgccacattagccaggctggtcaagaactcctggcctcaggtgctctgcccacctcggcctcccaaagtgctgggattgtgggcatgagccactgcacctggcctaaaatatcacagttctgatcacgtccttcaagagttgtctttcggtgaggcacagtggctcacacctgtaatcctagcactttgggagtccaaggcaggtggatcacctgaggtcaggagtttgagaccatcctgtccaacatggcaaaaccctgtctctactaaaaaatccaaaaattagtcgggcatggtggcatgtgcctgtagtcccagctactccagaggmtgaggcaggaggatctcttgaacctgggaggcggaggtaacagtgarccaagatcatgccactgtactccagcctgggtgacagagcgagactctgtctcaaaaaaaaaaaaaaaaaagctgtctttagtgttcctccactgtaaacagaatattgtccacacaccttaatgtgaaagtcaagaccctgtacctatctgggaacattattatctccttttactacatcacccatccacctccatacttcctttaattcacccaaaatgagtattcattaattccctgaaatcttgtctctttgtttcattgttcacactgtcttttatctaaaatatattcctggtagatcttggcccattaaaatattatctttttttttttcttttttctttttttttttttttttgagacagagttttgctctgttgcccaggctggagtgcagtggtatgatcttggctcactgcaacctctgcctcccaggttcaagcgattctcctgcttcagcctcctgagtagctgggactataggcacgtgccaccatgcccggctaattttttgtattttttagtagagacagggtttcaccatgctggccaggatagtctcaatctcctgacgtcatgatctgcccacctcggcctcccaaagtgctgggattacaggtgtgaaccaccacgcctggcctctttttttttttttttttttttttttttcttttcttgagacagagtctcgctcttttacccaggctggagtgcagtggtgtagtcatggctcactgcagcctctacttccctgggctcaagtgatcctcttatttcaggctcctgagtagctaggactacaggcacgcaccatcacacctggctaattttttttttttttttgaratggggtttcactgttgcccaggctggtctcgaactcctgggctcaagcagtctgcctgcctgggcctcacaaagtgctaggcttacaggcatgagccaccatgcccagccacctgtctttcaaaggctcagctcaaattcgtgttctccatgaggtcttctcctggagtcctgtttaaaagtaataattttcggccaggcatggtggctcacgcctgtaataccagcactttgggaggccgaggcaggcggatgacctgaggtcgggagttcaagaccagcctgaccaacatggagaagccctgtctctactaaaaatacaaaattacctgggcctggtgtggcacatgcctgtaatcccagctactcgggaggctgaggcaggagaatcgcttgaacctgggaggcggaggttgcagtgagctgagatcgtgccattgcactctggcctgggcaacaagagcgaaactctgtttcaaaaaaaaaaaaaaggaataattttcttttctgtatgttcccatagcattttctatcttttttataccccattctgtcttttttatcttgtctttttatatacctaaagatattgtcttgatattatatttatttatcatttatcttatctcccctaatagattgcactcacttgaggtgtgaacagtgttgtcctttgtattcattgaaatacaagatacatagtaatgttgaattaatctttgctaaatgctgagcgggtcttttgttaaaaacataaggaatgtcaacttttctggaaggaatacaagttatgttttatatgaaaatgctgtagattgaatcaacataattaacttttcatgaactcttaaaatagcctatgtacaggtatacattctgaattcaaatgaattaagaactagtgcatattcaagtagcccatgttgtaatttttttaaagaacagtgttgccacctagtggagaaatagatttcagacctttcaaagtgggcctttgaggaagacttaaaattcaaaagatattggcttatgggaacgaataaggtggttctgtggaatcccaaatgtggcagaattgtggcaggtgtgagggtccatgaattttaaattaggaggtatacattaggaaagaaaattaattatactgtgtatgtagaattcattatacaaattacaaagaaaactaaattgagattctcaaaaggtattcaaagtgtatgttttaaagaaaaaaattatttctggctgggcacagtggctcatgcctgtgataacagcactttgagaggctaaggtgggtagaatgcttgagcccaggagttcaagaccagcctaggcaacgtggcagaacaccatctctacaaaaaaatcacttcactccagcctgggaaacagagccagatcctgtctccaaaaaaagaaaaaaagaagaaagaaatgaaaaagaaaaaaatgttttccatatacccgattaaccaaagaagcatatattgcatatattgttagattgcagttattattttttaaatagttttagtcttcttttgacaaaatgataatactcatcacagcaaatttagcttggctgataaaattagaaaataaaaatgatccatcccttacaattacactatgtaacgattgtatagtttcttttttcctttgctgtagaaacttctaaaaatagctatatgttatttttacaaaagtgaagtcatgatataaattgttaacctgatttttcactttatatattgtgaacatttttcaatgccattaaatattttctataacattttttcaatagatgcacggaattccattgggtagatatatcttaatttattaattggttgcttgctgttggacatttggactttttcctaatttttcactattataaactgtggggatcatctaaggaatgaaatctttttctatatctttagttttgtttttgtttttttgagacggagtttcacttttgttgcccaggttggagtgcaatgatgcaatctcggcttactgcaacttctgcctcctgggttcaagcaattctcctgcctcagcgtcccaagtagctgggattacaggcatgtggcatcacgcctggctaattttttttttttttgtatttagtagagacgggggtttcaccatgttggtcaggctggtctggaactcctggatctcaggtcatccacccgcctcggcctcccaaagtactgggattacaggcatgagccactgtacccaacctctayctttagtttttaggataacttcttagtagaatttatgggttaatgaacatgaacttttaaaggtttgtggtgtgtgctgcctacttaccttttgaaagctttattaatttatagatttttgagggagtctaatggtagatgaaaaatccatctccacatacaatgggatagtaggatagtacatatttctataaacttgtatgttgatactaatttttaaagtcttgttaatgttgwctctctctcttccaaaacatatatatatatattttttgagactagtctcgctctgttgcccaggctggagcaatgtgggctcactgcagtctctgcctcttgggcccaagtgatcctcccacctcagccttagttctggagtagctggaactacaggtgtgcaccaccacactcagctaatttttgtattttttgtagagacagggtttggccatgttgcccaggctggtctcaaacttcttcaagctatctacccaccttagcctcccaaagtgctgggattacaggtgtgagccaccgtgctcagcctcttaatatttttgaaaaatcattgactgcagttatctgaaactgcaaaaagtgaaactgcacataaggaggactactgtactaatgttatcaatctgtagaagattgagggaaatttggtactcggaggcaggaacacagattttttctgtgtgttcaggattaagaggtaacatataacagaaagcatttccttattgataattttctgagaatgtgctcaatgacccccattttctattgatcatttttgtttgtttgttattttaattttagctgaaagagaatttaagaaacacagagcggatacatcaggagactcttagaaractggaaagcagattttttgaagaaaaggtacagattattagggttaatttaaaatgttttgtttactagaacataagtgtatttatatgcattctgaaacatcagccttccatttggtatcttaatagaagattagaagattgttaccaaattatagcacaatacaatgagggaaaataaaaccttctagaaatctcaatatctagtccttgttttctctctcattcagagattcttgtcctcttctgaaggctttgggacatgtctccctcagcttgatactcccctggtgagactaaagctatgtgtactcccattatatagggaagatgggagtggagaaatcactctcgtatgtgtgcaaagatgtttccttagtcaagccgagctaaagatgttaataaaaaatgttgcttaggctgggcacggtggctcacgcctgtaatcccagcactttgggaggccgaggcaggtggatcgtctcaggtcaggagttcgagaccagcctgaccctatctctacaaaaatacaaaaatcagccgggcatggtggcacatgcctgtagtcccagctactcaggaggctgaggcagaagaattgcttgaactcaggaggcagaggttgcagtgaggcgatattgcaccactgcactccatcctgggtrgtagagcaagactccttctcaaataaaaaaaagttccttagcacaacacagcttccaactccaacttaatttctgtgtttctgaagttaactctccaaattgtgggaagtacactggaacacttctacagaatcctttcagaggcctcatggttgttctttattttaatcctttctttaactttttattcttagggaataattaaatagattctttcagaaattggtaggaatgtaggcacttgagggtggggcaaatgaggttttgtttgattgcttgtttatttgagacagggtcttgtctgtcgcccaggctggagtgcagtggttcagtcacagctcactgcagccttgacctccacctcctggattcaagcaatcctcctacctcagcctcctaagtagttggggctacaggcatatatcatcacacctagctaatttttattttttgtagaaatggggtcttgctgggcctggtgtggtggttcactcctgtaatcccagcactttggtaggccaaggtgggcggatcacttgaggccagaagtttgagaccagcctggccaacatggtgaaaccccatctctactaaaaatacaaaaattagccaggcatggtggtgtgcacctgtaatcccagctactcaggaggctgagacgggagaattgcttgaacccaggaggcagtggttgcagtgagccaagactgctccactgccctccatcctgggtgataaagtgagactctgtctcaaacaacaacaacaacaacaacaaaactgaaatggggtctcattatgttgctggtctcgaactcctgggctccagcaatccttctgccttgacctcccaaagtgttgggatcacaggcatgagctaccatgccttgctcctatggggtttagataaaaggaattgctatagaaagtggctctaggttccagtttgtgtatggaataacctggaggaaatgaggcaagagcagcaccctggtgctttccctctgagaccctccctggcactgtcaggaatggaagccctcaggaataggctgttctcaggagcctctcctattccaccctaatcttgatctcttttctacttggtgtagaaaataaaggttagaaagagttggtcagtttacagaatacccgagtaacagtgcttatgtaaataggatttttatatatgagagcagatggctgctggcctttccttcatggttacaaggtagttaactgcagtttgaagctctgtgttcaagacaagaagggaggctccagctgtgtctgtcccttttatctggaagccataacaactttcccagaagctgttagcacatttcatcttacatctcactgaccagaaccatgttataaagaatgctgggcggcacacactgttctcccacctamtctggagactgaggctcraggattgcttgagcccaggaattcggggctgcagtgagccatgattgtgtcactgtattccagcctggatgacagagtaagaccctgtccttctctctctctcttcctctttctctctctcgctctgtttctctctctctctcttatacacacacacacacagacacacacacacacacacacacacacacacactactgggaaagtgaatgtttgttttcctcgccattagtggaagctrgggaggaaaaagaaggatgggaatgaatgttggtttggacatcacagcagggtctgcctctccatgttaggtacaaacttcatggatatttctcctgtgctggtttgagccccggtgctgcagcttcatggcattgggctttccaatcggcctgttcatttactttatacctcagcatgccccagccggccatataaaggatttcccagatcattggtgtttggtttgattttcccatttatttctttctattctttgaatcacaaagccctgtcctacatttatatatatatattttttaagacagagtcggccaggcgcggtggctcacgcctgtaatcccagcactttgggaggccgaggcgggtggatcatgaggtcaggagatcgagaccatcctggctaacaaggtgaaaccccgtctctactaaaaatacaaaaaattagccgggcgcggtggcgggcgcctgtagtcccagctactcgggaggctgaggcaggagaatggcgtgaacccgggaagcggagcttgcagtgagccgagattgcgccactgcagtccgcagtccggcctgggcaacagagcgagactccgtctcaaaaaaaaaaaaaaaaaaaaaaaaaaaagacagagtctcactttgtcacctaggttggagtgcagtggcatgatctcggctcactgcaacctctgcctcctgggttcaactggttctcctgcctcagcctcctgagtagctaatttttgtatttttagtagagacagggtttcaccatgttgaccaggctggtctcgaactcctgacctcaggtgacctgcccgcttcggcctcccaaagtgctgggattacaggtgtgagccaccactcctggcctctacatccatatttttatattgctagtccctccttctggaatgctgttcctccagctctggatcattcttatttagagctcagatatcatttctttagagagagatttcctaaactccaatctaaaatgaggctgggcacggtggctcacgcctataatcccagcactttgggaggccaaggccggcggatcacttgaggagaggagtttgagaccagcctggccaacatagtgaaaccctgtctgtactaaaaatacaaaaattagctgggcatggtggtgcacacctgtagtcccagctacttgggaggctgagacatgagaatcacctgaactcgggagacagatgttgcagtgagccgagatcatgccactgcactccagcctgggtgacagagtgagactctgtctcaaaacaataataataaaataaataaataaataaataataaaacgacctcctctagttactatctaccttattaccccatttatttcactgatagcatttatcacagtctattaattctttttatttgtttacttgttaggggactgtatagcatcagattgcctgcatataaatcsctgctctgccacttactagctttgtgactttgggcaagtcaccaacctcttctcttttttttttttttttaaacagagtcacccaggctggagtgcagtggcacaaccatggctcactgcagcctctacctcccagtctcatacaatcctcctggctcagtcttctgagtagctgggaccacaggtgcacaccaccatgccgaattaaaaaaaattttttttggccaggcgcggtggttcatgcctgtaatcccagcactttgggaggctgaggcgggtggatcacctgaggtcaggaattcaagaccagcctggccaacatggtgaaaccccgtctctacaaaaatacaaaaattagctgggcatgatggtaggtgcctgtaatcccaggtactcgagaggctgaggtgaaagaatcgattgaacccaggaggcagaggttgcagtgagctgagatcacgccactgtactctagcctgggcaacagagggatactcccagagatggggtctccctatgttgttcagctgggcttgaactcctgagctccagtcatcccgccttggcctcccaaagtgctaggattacaaacatgagcgagcaggcccggccaacctttctgtttctgtttcctcagtccctgcttttgggcataatagtagtatctatataatagggttgctgtgacaaataaatgatacatgtaacattcttagaactgttcctggcacatagtaaatgctcaaaacatgayaattattgcttattgtttagatttcaccctagaatataagcttcatgagatcagggaccttgtctgttttgttcactacagaatttcagtatctaaaacagtctggtaattattaatgctcatagtattattttttatttatttattttcttgagatggagtttcactcttgttgcccatctggagtgcaatggcrcgatcttggcttaccacaaactctgcctcccgggttcaagtgattctcctgcctcagcctaccgagaagctgggattacaggcatgtgccaccacactgggctaattttgtatttttagtagagmtggggtttctccatgttggtcaggctggtcttgaactcctgacctcaggtcatccacccacctcagcctcccaaaatgttgggattacaggcgtgagccaccgcgcccggacaatgctcatagtaatttttagactgaccaagcacttctaatttttattttctacaccaagtaaaaaagagatcaagawtagggtggagtagagggagaggctactgagaacagcctagtcctgagggctaccattcctgaatgaataaatgaatgactctcatttcagtgcatttagcagaaattcctcctcattctgctttccaacatggaattgaattttctcccctatttatatgtcatattgcttccttaagtgggaaaatggggaggaaccctaaggttcctgtgttcacactgtcctctttgtcagcttctccaccagtgcttggagttctttcaggtcatggggacaggagttttttatttgacattctaaaataaataycttttgatgagtaaaatttgttgttaggggcataattatttaagcagcccattttcttttttagcaccgactagaacaagaggctgaaaagaagataataatgctagcagagagagcccaccatgaggctattgtgtaagagactgctgcctactttctgactctgattacctctcttacctctttgctggtctcttttcttcttactttcttgtcttcccccttctgttctggcttacttgcttcaaattttctggtctactgtccctccctgtttctttctctttgtatactcccacccctttttcctctactctttctgtggcagcattgtgtggtggaaagatcctgggctttgaacttacttatttattgatttattttttgagatggagtcttgttctgtcatccaggctatccaggctggagtgcagcggcatgagcttggctcactgcaacctctgcctcccgagttcaggcgattctcatgtctcagcctcctgagtagctgggattacaggcacccaccaccacaccyggctaattgttgtatttttagtagagacagggtttcgccatgttggccgggctgatctcgaactcctgacctcaagttatccacccacctcaaccttccaaagtgctgggattataggcatgagccaccgtgcccagcctgcacttgactttggttctcaacatgtatactaactaaccgtaggaagatttcttacctttttgtttgattctttgtttttgagacagggtctggctctgtcacccaggctggagtacattggcatcatcatggttcactgcatcctccactgcctgggctcaagtgatcctctcacgtcagcctccagagtagctgggactacaggcatgtgccaccacgcccagctaatttttgtattttttgtagagactgggttttgcccgggctggtctcgaactccggggctcaagcaatccacccgcctcgggcttcccaagtgttgggattacagatgtgagtcactgtaccaagccacatttcttaactttcttgaagttaaatttcttcaactaaaagtagggctaatttacttcttccagtaatctgagtttataaaaataaataaatagtaaaaccatggctaatagtagcaatcttgcagggttgtcatgaggtatattagtggaagtacatctaactctcaggtcttaatggtttatttcttgttcatcgaacaatcctgtatgggtctggcagctctcctccagggatgattcaggaacctggctgcttccttcttgcacctctgccgtgttggagtttttcacgtctagtcatgtggacaggaaagagcatgggagactcatacctgctcttaactgccttgcactagaagtaacccgtcctttttcactttatttatttatttatttatttatttatttatttatttttgagacagggtctcgctctgtcacccaggctggagtgcagtggtacaatcatggctcactgctgtagccttgacttcttgggctcaagtggttctccttcctcagcttcctgagtagctgcgacagactacaggtgcaaaccaccacgtctggctaattttttagattttctgtagagattgggtctcactatgttgcctaggctggtcccaaattcctaggctcaagtgatcctcccgtctcagcctctcaaagtgctgggattatagatgtgagccactgcattcagccattttcacttttttattgggtgaaaacttaattacaagattcccacataactactgagtacccaccataagctaaataggtggtagtcactattgataatattgggggtgcaggtggtgaagcaatcatttttctattttggcgatatctaaaagttagacctgtgttttgagatcttatatctatttcaggcaattgaacgatgctggaagaaatgtttttaaagagaatgwttatcttcagaaagctctggcatatcacctgaaggaaactgacgctctacaaaaaaactcccagaagttgcaagagagtcatactttacttttacatcaaaaggttccctctcatttagacttggtgtccttcttttctttatttaaggattgggttggtaaataccaaaaattgggtataataatgatatataaggacaatgagaccattttcatctgtctggatgatgcactttttttatctgaaaaggttaaatactcaatcttataatgcttataagaagcattaractcaacttataaagaatatatcagaaacataaatatgacccttatcctctactaccttagaatattcatttttctttgcttagagttggtccctgagtcacttaggaatacatttagcggtgagtaacagtcctgacatcagtggcatcaccacacaagggtttattctttcacctaaaggaggcctggaggtaagcaatccacagcaggaatggtagtgccacaaagttaatagacactcagcttccttaactttgctctgcaacacttggcttacatcctcaaactcacctcacagcctggggggcgctgctggagctctaaccattcctttaaatagcaggaaggaagaaaaaaagaaaaaagtgtgcctctcgtttaagaggtctttctggaagtcctacacacatttctatttacatatcattgactagaaaatggttatgctgaacttcaagggagactgggaattttcagctggacttaactgcctttctgaatgaagttggggttttattactatggaggaaagggaaagggaaaatagatattgggataggcaacaaggagatgccatagtttccaatatagttattaatgttttactatatagttatagagagagagagaaagacggagtctcactctcacccaggctagaatgcagtggcatgatcttggctcactgcaacctttacctcctgggttcaagtgattctcctgacccagcctcctgagtagctgggactacaggcatgcaccaccacggccagctaatttttgcattttttagtagagacagggttttgctatgttggccaggctgatctcgaactcctgacctcaggtgatccacccaccttggcctcccaaagctccaggattacaggcatgagccaccatgctcagcccttcattctttttcatggctgcaagaaagtttcttaattagcacaattcataattagtagattgccttcccaagtccagacaaggaccctaggatgtttgttactctctatatagaataccaaaatatcacctcagcttggcataaaacttaaatctcatgaagtaatggaaattagtaaggaacttcctaagttctggaatgattaaaaaaaaaatcagccgggcgcagtggctcacgcctgttatgctggctgaggcaggcagatcacctgaggtcaggaattcgagaccagcctggcaaacatggtgaaaccctgtctctactaaaattgcaaaaattagctgggcgtggtgatgggcacctgtaatcccagctactcaggagcctgaggtaggagaattgcttgaacccaggagatggaggttgcagtgagctgagattgtgccactgccctccagcctgggcgacagagcaagattccatctcaaaagaaaaaaaaaatcacctctcatctttctgtttttaggagatcaatgatctgttggttaaggaaaagattatgcaacttgtccagcagagatcacaaatccaaacccttcagaagaaggtagtaaacttrgagactgctctgagttacatgaccaaagagtttgagagtgaagttttaaaactgcagcaacacgcaatgatagagaaccaagcaggtcaggtagaaattgacaagctgcagcaccttcttcagrtgaaggacagggaaatgaatcgtgtgaagaagctggccaagaacatactggatgagagaacagaagtggaaagattctttttagatgctctgcaccaagtgaagcaacagatcctaattagcaggaagcattataagcagatagcacaagctgctttcaatttaaaaatgagagcagcatgtacaggaagaacagaatatcccaaaatcagaacatttgatggcagagagcacagcaccaatagtgtgaatcaggatcttctggaggccgaaaaatggtactagcaatactttattattatctttttgctgctatttttgtgtcctttacagaaagaggaagtctgaaaagtttagttttataatattcaagtattgaatagatttctcagtaggttacttgaggacaggaactgacttattcatctttgtaatctctaggcttagcatagcatgtggggctttggacgtattcttagtatattcccctctgtctcatgatagaagtcttgttaaggagactatttttcccataggttgttttttatataagatatataaggtcattatgtatcttttcacttgttcctttgtttcccataaattggacatttgttataaaagcctgattagattcaggttaaacttttttgtttttttaaaggcagggtctcactacgttgcccaggctggtcttgaactcctggcctcaagtgatcctcctgcctcagcctctcaaagtggtggaattacaggygtgagccactgcaccaatccaggttaaacatttttgatacgcatactttcagaaatattttgtaccgtttactatcctgagatgaaattcataggtgataatatctatccaaccatataattaaaaaaaaatcaatataacaattatttgtaggccaggcatggtggcttacacctgtaatcccagcactttgggaggccaagtcggatggatcacttaaggccaggagttcaagaccagcctggccaacatggtgaaaccctgtcccactaaaaatacaaaaattaggctgggtgtggtggctcatacctgtaatcccagcactttgggaggccgaggagggtggatcgcctgaggtcaggagttcgagaccagcctgaccaacatggtgaaaccctgtctctactaaaaatacaaaaattagctgggcatggtggcacattcctgtaatcctagctacttgggaggctgaggcaggagaatcatttgaatccaggagatggaggtttcaatgagccaagatcacgccattgcactccagcctgggtgacaagagcaaaacactgtctcaaaaaaacaaaacaaaaaacaaaaattagctgggcgtggtggcgggggtctgtagtcccagctactcagtaggcacaagaatcgcttgaacccaggaggcagaggttgcagtgagccaagattgcatcactgcactccagcctgggcaacagagtgagaccctgtttcaaaaaaacaaacaaacaaaaaaccaaaacaattatttgtaacaattctttgttatagagaactgtcccatggattggaggacaatcagtagtgcccccagcattgtattaaccaaaagtcccccaaaattttccaaaattttagagatctgctgccactatgataaaggtaacagaatgtttgagacagttgcagactatatattacataatgattaactttgtttcctattagcatttttgtttcttagagcagtctcctccctataaaccatggattaaattatagtccattttgagggttattctgaaagaaaattattttatattccaatgcaattagattcttcaaaggccctaactcaagaaacttaaaaggactgcagcctggaactcctgggctcaagtgatcctcctgcctcagcctcacaaagcgctgggattacaggcacgagccaccatgcccagcctaacatcttccaaatgtgttttttgctttaaattatttttaaaggactaattttataggttgttttgaattatatggctgttgagaaggttggacatgctcagtagtctctgatagataagattcttcttcaaaatgcctaaactataatttacttcttgtcatattcagaaatctgtaatactactactgttaccaagagatttgctgtaatttctcttttttatttaatacatcaaataagttgagtccctaccatatataaggcagttttctttatatccttttgtttacgaaatagtaagtgttatacattttcagaggaagttaaatgattgtctacattgttactgcagtaactggactcttcctattctgtgttctatgtgacatttttgctactgaccaccttaacactttagccttagtgtcctattgcctctatcagcagggcagaaatggtggttaacatattacatcatcgggctgggcgcagtggctcacgcctgtaatcccagcactttgggaggttgagacaggtggatcaagaggtcaggagttcaagaccagcctggccaagttgctgaaaccccgtctctactaaaaatacaaaaattagccaggcatgatggcacacacctgtaatcccagctactcaggaggctgaggcaggagaatcacttgaacctgggtggcagaggttgcagtgagccaagattgtgccactgcactccagcctgggcaacagagcaagactccatctcaaaaaaaaaaaaattacatcatctatttaaatggtagattggaaaaggacagttgaagtatatggtaatcggctgggtgtggtggctcatgcctgtaattccagcactttgggaggctgaggcaagaggatcatttgagtccagtagttaaagaccagcctgggcaacacagtgagaccccacctctacaaaaaacaaaacaaaaagtagcctggcatgatggtgtgcatctgtagtcccatctactcgggaggctgaggtgggaggattgcttgagcccaggagttcgaggctgcagtgagccatggctgcagtgagccatggctgcagtgagccatgatgatgccactgcactccagcctggcaacacagtgagacctagtctcaaaaaataataataaataaaataaattttttaaaaaatgaagtatatggtaatcataagacaaaacctagactttttaatttaattaattaatttatttttttgagatggaatctcactctgtcgccaggctggagtgcagtggcgatcttggctcactgcatcctctgacttccgggttcaagcgattctcctgcctcagcctcccaagtagctgggattacaggtgcgtgccaccatgcccggctaatttttgtatttttagtagagacggggtttcaccatgtcagccaagaaggtctcgctctcctgaccttgtgatctgcctgcctcggcctcccaaagtgctgggattacaggtgtgagccactgcacccggccgacttttttatttttttgagacggtctcactctattgcccaggttggagtgcagtggcaccatcatggctcactgcagccttgactgggcccaagcgatcctcccacctcagccccccaagtagctaggactacaggcatgtgccaccatgccaggctaattttaaaattatttttatagagaaaagggtttcactacatttcccaggctggtcttgaactcttgccctcaaggtattctcccaccttggcctcccaaagctccaggattacaggtgtgagccaccgcacctggccaaaacctaaacttttttttttttttgagagagtctcactctgtcgcccaggctggagtgcaatgatgccatcttggctcactgcaacctccacctcccgggtttaagcgattctcctgcctcagcctcccgaggagctgggactacaggtgcatgccaccacgtctggctgattttcttttttttgagacagagtcttcgctctgtcacccaggctggagtgcagtggcacaatctcggctcactgcaagmtctgcctccagggttcaagccattctcctgcctcagcctcccaaatagctgggactacaggctcctgccaccatgcccggctaatttttttgtattttttagtagagacagagtttcaccatgttagccagggtagtcttgatctcctgacctcgtgatccgcccgcctcgtcctcccaaagtgctagtattacaggtgtgaaccactgcgcgcagcctaattttcgtatttttagtagagacagcgtttcaccrtgttagccaggatggtcttgatctcctgacctcatgaaccacccaccttggcctcccaaattactgggattacgggtgtgagccaccgcacctggcctaaacaactttttttttcttgttccctttgtctgtgtctctaaataaataatgttacattacagttttttttgttgtttttttttttgagtcggagtctcgctctgttgccaaggctggagtgcagtggcaygatctcagctcactgcaacctccacctcccaggttcaagtgattctcctgcctcagcctcctgagtagctgggattacaggtgcccaccaccatgcccagctaatttttgtatttttagtagagatggggtttcaccattttggtcaggctgatctcgaactcctgaccttgtgatcctcccgcctcagcctcccaaagtgctgggattacgggtgtgagccaccgcacccaggctctttttttttttttttttgagaaggagtcttgctttgtcacccagtctggaatgcagtggagtgatctcrgctcactgcaacctcccatctcccaggttcaagcgattctcctgcctcggcctcctgagtagctgggattagaggagcctgccaccatgcccagctaatttttgtatatttagtagagacggcatttcaccatgttggccaggctggtctcgaactcctaacctgtgatctgcccgccttggcctcccaaagtgttgggtaagccaccgtccccagcctccttagagttttctactttgcttatttccttaatgtctgagcacaaatattttttcatgttgttaaagtttttgtcattttcatctttatgatatgtaacatttcggattggctagtatattgttgtccttatcaactttatgattttgtgatggatagtttgctttgtagttttctttttttctttctttttttttttgagacggagtttcactcttttctcccaggctggagcacagtggcgcgatctcagcttactgcagcctccgcctcctgggttcaagcgattctcctgcctcagcctcccgagtagctgggattacagacagctgccaccatgcccagctaatttttgtatttttagtagagacgagctttcatcacattgtccaggctggtctcgaactcctgacctcagatgatccacccgcctcggcctcccaaagtgctgggattacaggtgtgagccaccgcgcctggcctgtagttgtttcataatattcaattatggtgtggaatttatcctatgtttacccattatatattttttaaaaagaagagaagcctatttgaccgtatttttccttttcacatttttttcctttgaaattctttaggacacatattgaaggaaatgtggatattggagatttgacctgggagcagaaggaaaaagtattgcgattgctctttgcaaaaatgaatggctgtccttctaggtaactccctatttctgcagtgaaataccaagttgttatcaaatctagaaaccacttaggaacaaagaacttatttttcttacttagaactaaagggacgggaaaggaccagaaaatataaaaaggccctactgcttaactactgcagctcccagagataaagaatgggagattaatgaatgagcatgaaaatgaaagatgagttggaattaaagggggaggggaaagattcatcttagatgtttaaggtagtgcttattaagaagttacaatattgctcagctgaatgagtggcaactgaagagaaacataacaatattaagattttattggtttgcaaagataagtawttttttttttttttgagatggggtctcactctgtcacccaggccagagtgcagtggcacaatcacagctcactataacctccacttcccaggtgcaagtgatcctcccacctcagcctactgagtagctgggactacaggcatgtgccacaacgcccggctaattttttttttttttttttttgagaaggagtctcattctgttgcccaggctggagtgcagtgatgtaatctcggctcactgcaacctctgcctcctggttcaagtgattctcgtgcttcagcctcccgagtagctaggattacaggggccaccaccatgcctggctaatttttgtatttttttgtagagatggagttttaccatgttatccaggctggtctcgaactcctgacctgaggtgacctgcccgcctcagcctcctaaagtgctgagattacaggcatgagccactgtgcccggccctaattttgtatttttagtaaagacagggtttcaccatgttggccaggctggtcacaaactcctgacctcagatgatccactcacctcggcttcccaaagtgctgggattacaggcatgagccactgcccctggccagttatacattttaaaataactaaaagagtgtaattggattgtaacacaagggataaatacttgaagggatggatacttcattctctatgatgtgattatttcacattgcatgcctgtatcaaaacatctcacgtaccccacaaatacgtatacctactatcacccacaaaaataaaaaataaaaaaaaattaaaatacaaaaagaaaatatgaaggcatgaggagacactgcctcattcattatctttgttgacttttacccactacaggaaatacaaccagagttctaggcctccagttccagactatgttgtttctgacagtggggaaacaaaggaatttgggtaagagctctcttgcttaagtaataaacatgagcccaacacgatggttcttgtgggcatcttgaatgtgctaattgaaagtaatatgacaagtctgttattctaaaccaggtttcatgtgtgtagagttgttgacggttctgttattttgtcattattgcagggatgaaagtaagcttcaagatraaatcttcatcacccagcaaattgcaatatcagactcttctggtgaagtggtgctacccactattccaaaagaacctcargagtctgacacagtaaggagtctgtatctaatcaaacaatgtatattgytgtcacccttccccatgtcgcttcttgctaaatcacggttattttctctactagttgagagacttcagggatcagtggaatgagtaataaatagcattagtagattacataaatttttaaagcaatatccgtacaaatgcatattatactaatgcaaatgcaaatgtgtgcctctttttgtgtagaaacctatasgttgccttttgaagtaaacagcctagccaaaatgtgtactatcttttacgtaagagtaaacatagtgaccttgtgactcttagctttccatcacaggtgggaagtcagagtcattacaacctagaggacaaaggcttataaggagatatgaaatgatttttttaagccaagtttttctctttaagagtttttaatttataatttgttattcataattagtacaatgtagaatctgagaaatttcaaatgaagccacattagaacaaaaagaaaatactgactttttagccgcgatcacatgaatataactgatgagtttttttcatctaagaaatragaaactctgagcagcaaatagttggccagatgagttgtttctaattagagcatcacagttctgattagtgtgtttttttagaagtgatttcccttaaatataaggaaaatgttaggaatctctgtgactacatttaattccacttggaatatagacaataatgaccttttatttaacccagcctatagttgttggattggattaaatatcactaccagggccaggtgcggtggttcacgcctgtaatcccagcactttgggaggccgaggtgggcggatcattaggtcaggagattgagaccatcctggctaacatggtgaaaccctgtctctactaaaagtacaaaaaattatccgggtgtgggggcatgcacctgtaatcccagctactcgggagactgaggcaggagaattacttgaacccaggaggtggaggttgcagtgagccgagatcgtgccactgcactccaccctgggcaacagagcgagactccatctcaaaacaaaacaaaacaacaacaaaaaaaatcactaccagttgccagctgtgataagagctaaaacaaggggtactgtagtctcaaattataaatttctattgcctcatatttaggaaagcagaaaaaaaaaaaaaaaaggcccagtaggatcataagtgtattttacaaaagttccagtcaccttaagtgattgaaggttttgacattttatccagccaggtggtagtaataagcctcaaatccacagggtacacaacattttcaaggtcttttttttttttatcatacttaattcatgaataacccccatagtgtaggttagttagcactatcaaagtgactggtaaggacgcaggaaaataaaaagaggattcaattggrttggtactgcaaaaagaatccattctgttcagcacatgaatttctgttctgaccttaagtttagatatatcaaagaaacaaaaagcatagaggcggctgggggtggtggctcacacctgtaatcccagcactttgggaggccaaggcaggcagatcacctgaggtcgggagttcgagaccagcctgaccaacatggagaaaccctgtctctactaaaaatacaaaattagccaggcatggtggcgtatgcctgaaatcccagctactcaggaggctgaggcaggagaattgcttgaacccgggaggcagaggttgcagtgagccaagatcacgccattgcactctagcctgggcaacaagagtgaaactccatctcaaaaaaaaaaaaaaaaaaaaagcgtaaaggcagttgaactaatggcagaagaagactgtcaaagcatttttttttaaccactttatgtcatggaaagcttcgaaatttcttaggcccagttaattgctctacatgaagagttcttcattaaacaaatcactaattagaaatacaggcaagagaaaagaatatataaaatttggcaagtaatagcaggttagatttgcttaaggcaggtgtcttacccattttcatggttggaacaatccttgatttctgggcctaaaataacttttgaaataattttctaagaaaattatttgcatctggctgggtgtggtggctcatgcctgtaatcccagcactttgggaggccgaggcaggcggatcacctgaggtcaggagttcgagaccagcctgaccaacacggagaaaccccgtctctactaaaaatacaaaattagctgggtgtggtggcgcatgcctgtaatcccagctactaggggggctgaggcaggagaatcgcttgaacctgggaggcggaggttgcggtgagctgagatcacgccattgcactccagcctgggcaacaagagtgaaactccatctcaaaaaaaagaaaaaagaaaattatttgcatctgaattaatggctgaagtattaattaatgattgctgaagagaaccctgaaacttagtacttggcacatataacaaaaagttgatttatccattgcttactgaggtatccttgagaagtgatcttaagcaggagcagtgacaatgatagaattaatagtggtcatgaattactaggaaacaaagtggcattgagcagaaaagaaagaagctgttgccacaactttgggatatataaaaatggattatatcttgtgtattgtgggataaaagaggggctaaagaaaactttgcaggaggtctctcccagtggcatttaggtagcgctatgtttgaggatcaaccaaaagcggtgagttatttctgtcctgtttccccatctaagagttcttcttgcaattattggaacatcttctttaaaaaattttttttcccttttctttttttactttttcaatttttttaaataatagatacggggtttcrccacgttcttcaactcctgggctcaagcartcygcccactgtggcctcccaaaatgatggaayyacaggcgtgagccaccgcgcctggctggaacattttctttacatacactggcttttctccccttcaaatcatcagaaaatgggataatttttagaaatcaggtttaagcactactttcagataagcatttcatagttacaacagttacctcaaaatagaagtatgaagagcaagtgagaaatctggtttcattgttacactaggcagttccctrtagaaactttgcaggggttaatagtcctgaggaagattttagttacaatgtattccaatcccatcgatctgatctgagcaaagctgacaaatgaagctggtcaaaaataaagggagattactcaggatggagtcagtcttaaacaaacttgtttctaacggcccatggtaggcatgacaacagcaggtgaggaaagagtagcatcttctyctttccactgagaagtaatggtctttaactgagtgtagaattggatgccctaaggaaaacagaaaaaaagttagcatatatttctggggtttcatgattcttcttttaattagcttttgaaggaggtattataaagtgctactcactttcctaattgagaaatgcaatcagaatccaatatatattgttcctaagataattgatctaaaacatttaacataatacctggcagatagtaaacaatcaaaccttagccatcattattatgctgaaactagtatttctttcttttttgtttgagatggagtcttgctctgtcacttaggctggagtgcagtggcatgatctcagctcactgcaacctctgcctcccgggttcaagcagctctcctgcctcagcctctcgagtagctgggattacaggcacctgctaccacgcctggctaatttttgtatttttagtggagatggggtttcaccatgttggccaggctggtctcgaactcccggcctcaagtgatccgccttcctcggcctctcaaagtgctggaattacaagtgtgagccaccgtgcccccagctattatatagtaggccatttatttatttatttatttattttgagacagagtcttgctctgttgcccaggctggagtgcagtggtgtgatcttggctcactgcaacctctgcctcccaggttcatgtgattctcctgcctcagccttctgaatagctgggattacaagtgtgtgccaccatgcccagctatttttgtatttttagtagagaagggctaatttcagattagcccatgttggctagcaccatgttggccaagctggtcttgaacccctgacctcaggtgatccgccagtcttggtctcccaaagttctgggatcacaggcatgagccactgtacccagcggccatttctgataattatcagagatcatgagctctatattgaagtggcaaacccaaagtatcttagaaatctaaagtaaaatgtctgacattatacaaattcacttctcaattacctataacatgtgagcccaaaaattcagcatatttaactctctctatatatagatatagtttataagagtaggcttgagcaaaagagaatacattgtgcagatctaacacttatataattactagcaagctagaatgacattttaccagattaccagagtaatttataataattaaactggggggtgcagccaggagcggtggctcacacttgtaatatcagcactttgggaggctgaggtaggcggatcacttgaggccatgagctcaagaccagcctggcccaacatggcgaaacctcgtctctactgggraaaaaaaaaaaaaaaaaaaaaaaaaaaagctgggcgtggtggagcctgaggcagaattgcttgaacctgggaggtggaggttgcaagtgagccgagaatgcaccattgcactccagcctgggcaacagagcaaaactcccatctcaaaaaaataaataaatggagagggtgggcagggaacaatttttaaacaatagttgtactctgttttgcttaaaagaaatgttactagtatcaaattagtcatttttacaaaagctgtgactaggccgggtgcggtgactcactcctgtaatcccagcactttgggaggccgaggcaggcagatcacctgaggtaaggaggtcgagaccagcctggccaacatggcgaaaccccgtctctactacaaatacaaaaattggcgggtgtggtggcacgtgcctgtaatcccagctactcgggaggcatagatacgagaattgcttgaaccctggaggctgaggttgcagtgagccaagatcatgccactatactccagcctgggtgacagagaaagattccatcaaaaaaaccccaaaacaaaaaaccaaaagctgtgactaatatacaaactatataatcaacctccaaataccaaagtgttgacttcttaaccatttggccacactgtcataatgctatgcaatcccattgttaattttttaataacccaaacataaataaaataaaaaagccccacatccctcgccctgtggcagcacayagctggcacagaaaaaaaaaatcaacctataaaaggggagacttgtataacaaaacatgtaatttattaatgaaggtttcaaaatggctctagtcctatgactagaaagaacttcccctagcctatttgttcaacaaatgtttgggcagcctgctctgtkccaggtactgcagataagtagataacaactacagtctgatgagggcttctttaaatggcttaaagagccctacatgactcaacccctgcctgcctctctaacttcatttcttccttttcttctcatttgctcactgtgccccagcccatttccgctgtctgaatgtgccatgcttcttcctgcctcgggacatatgcacctgttggccgatgtggcaatagtaataattcttcttttttttttttttgagatggagtcttgctctgttgcccaggctggagtccagtggtgcaatctcggctcactgcaacttccgcctcccagattcaaaggattcttctgcctcagcctcccgagtagctgggattataggcacctgccaccacacctggctaattgttttatttttagtagagggggttttgccatgttggccagattggtctcaaactcctgacttcaggtgatctgcctgcctcagcctcccaaagtgctgggattacaggcgtaagccactgcacctggccaatagtgataattcagtccttacaatgttatgaaatacataggtactattgttattcattttatacgtgaataaatttaaggcataaagaaggtatcctggttggctgtggtggctcatgcctgtaatcccagcactttaggaggctgaggcaggcggatcacctgaggtcaggaattcgagaccagcctggccaaaatggtgaaaccctatctccactaaaaatacaaaaattagccaagtgtggtggtgggcatctgtaatcccagctacttgggaggctgaggcaggagaattgcttgaacctgggaggcggaggttgcagtgagccaagattgtgccaccgcaccccagcctgtgcgacagagtgagactctgtctcaaaaaaaaaaaaaaaattaatggtatcccccaaagtcagacagctaataactggcttagctgggatttgaacacaggcaatttggttccagatctgctttacttttcttgttcagtgctgtattcatagtgcctaaaataatgtctgctacagaccgggcagagtggctcacacctgtaatcccagtgctttgggaggctgaggtgggtggatcacaaggtcaggagttcaagaccagcctggccaacatggtgaaaccctgtctctactaaaaaacaaaaaattatccaggcatggtggcaggcacctgtagtcccagctattcgggaggctgaggcaggagaagtgcttgaacccaggaggcggaggttgcagtgagctaagaccatgccacagcactccagcctgggcaacagagcgagactgtgtctcaaaaaaaaaaaaaataataataataatagtaataataatgtctgctacaaagaacgtgctcaacaacattttttgtaaatgaataactattacagaaaaaatacgtgcaatgggaacacactggggtcacactacccagcactgagggaggggtggtggtagttggaggagattttctggaggagctcattttttaaagtgagacatgacagatgattaggagttagtcagatgaaaggggagagatggggaagagggtcacacactcaggaaatggcatatacaaaggcttagacttccccatgctctttcctcaaaactttgttgctttgaattattcaggaagaagcagctttggcaaaattttgttaacttttaaatcttttttagggaaccttctgagaagcactgattatgacctcacagatgctgctggcagtcccttccttgcagaatccttgctcctgaatatctttaagaaaatktcttaaaggaaaagacaaaaaatttaactcaaaagttacctgtttgccatagaaattggtgtctcccctgaaggaggatcgagagccggtgaatgagaacattggcaaaggcactggaatggggacattcactcccacctaaaacagaacaaatcygtgtcatatcctaaggacaaaggaactctccatttagaaacacaaaggcatcagagaccagttttaaatacccaccttctaccctatcctctaccccatgaactttcattcctgaggaagaaatggggcaatgtgggaggtcatgggggcaatcttaaaccaatgactcaccattatttactgtttcctcttaggaaatagtaaatggatataagaatctcttaaaaattctgttcacgaacctgtccaacatccaccaagtgggcatatttccgagcagtggctccattggtggtgaagatggcagttcyatttccatatgggttgttatttacaatctggatggcttcatccaatgtttctgtctccagaaccacaagaactggaccaaaaatctcctctttgtaacaggtcatatttggctgccaggagtgatgcatccagaaaagaagtcagctttttggattctgagtattttatgcttatttggtactttcacttactacacatcatttacgtggacaactttcatattactaatctcttttcatttcaaatcacctatttaaaaaaaaagtcctctctcaagtgtattccgtcttccaagttaccaatcatataaacaacttggaattcctatcaacaataaccacacttcctttaagggactgtatctttagttcatgacccatcatcagctgcctttttaatacctgaacgactagtttcatccaattgttatcaaaaagttacatgaaaatttattttttataaatccaatctatagtaaatataccaggataatttttctctttacagaaaccccatgctgttttctgtaacataaataatccattcttattcactcctttgcctcccaamtatgtctrtatgtttatattttgatatcaggtcgcagacactcaaaacatccttcaccatgcaattaatgtttgttgctgataaacggatttttctgtatggttctgtggcaagagatttcataatttctactgcacttacattcaacacttgatgattcactattatagtaaggatatatgaatttcaaaaaatgcctcataacctcaatttttaagtcatgttagctgagagactttcaaagttttgataaataaaaattgacaagtcaattatttttgtcactttcaataaatattgggtggttgatatattgattgagacactgcagtagccataagctaggcagcaagagggagaggggagagaaaacattaacaaaccagtataagataagatagcgtttggcaaactatagcctgtgggccaaatgtggcttcctgcctgtttttgtacagccccaagttaaaaatggtttttgcatttttaaatggttgaaaaaaaattaatcatatataaaatgatatgaaattcaaatatcagtgtccataaataacattttttttggaacacagccacacaatgtttatagctgatctcacactacaatgtcagagtttagttgcaacagacactatatccctgcaaagctggaaatatctatccctttatggaaagtctgcagactgctggtatagtggaaagagtttggttgggagttagaaggagaggctcattcagactccagataaaataattgatcaatcctggcaagagataaggtcttagtcattaagtattttcattaataaattagagggatgagattctatagcctttaaggtgccttcagctctcatatttgtgaagtgaaagttgttcaccttgacattcgagatgatggttggtccaacaaagttgccattttcatagcctttcactttaatttttcgtccatcaagaaggatggaagctccctcctttgttccactatcaatcagattacagactcgctctttggcctggggagtgatcagagggccaagatcagctccaggctgatctcctgtaaaacaacacagaagaatttaaggtcctcattaacataaattatgactgctgccagggctcatgcctgtaatcccaaagctttaggaggccaaggcaggaggactgcttgagcccaggagttccagaccagcctgggcaacaaagtgagacttcatatttacaaaaaataaaaaaattagccaggtggtggcccgcacctgtggtccaagctgctcaggaggctgaggcaggaggatcacttgagcccaacagtttgaggctgccatgagctaggatggtgccactgcactccagcttgggtaacagacagcctgtgctttaaaaaaaaagactgctaacaagatgactccaaatgacaagtacagtataaagagaggaaatggcaagaatagacatgattgttcccactggccaaggccagtgacagaacccaagagcttaatgccacagatgcaaaatctaagggggcaagtcaggtgattgattacctgcattgactctcaggtttttggcatgctccaccagctctggcagccacttcttggcttctcccacaaggactgctgttgaaagagccatgcagcgctgaccagcagctccaaatgctgccccaaccagctggttcagggtattttccttattggcatctggcatgactaccccatggttcttggctccctaaaaaaaaatgcagaaagcacatgagtcttccttggccaaatacaactaagctaagaaattaagcagtggaccaggtgtggtggctaatgcctgtaatcccagcactttggaaggctgaggtgagaaggataacttgaggtcaggagttcaagaccagcctaggcaacatagtgaaacaccatctctacaaaaaatacaaaaaattagccaggcataatggcaccagtctgtggtcccagctacttgggaagctgaggtagggggaccacttgatcctgggaggcggaggttgcagtgagccaagatcacaccattgtactccagactgggtgacagagtgagacccctgtctcaaaacaaacaaacaaacaaaaaacaggaatttgttgtctgctgggttttttagttatatgaagagcaatgttaaaaaaaaaaaaaaaaagaacttacagccttacagcaataatgccagtaaccagctgaaaggcaaaacagaaagtagacctcttgatgtagaatttcaagaaagaggccaggcatggtggctcatgcctgtaatcccagcactttgggaggctgaggtgggtggatcacttgaggtcaggagttcaagaccagcttggccaagaaaccctgtctctacttaaaatacaaaaattagctgggtgtggtggtaggcacctgtaatcccagctactcaggaggctgaggcatgagaattgttagaacctgggaggtggaggttgcagtgagctgagatggcaccactgcactctagcctgggtgacagagtaagactctgtctcaaaaaaaaagaaaaaaagtgattaacgtgacttagaatgaaactcctcaaaaggttcatgattaaagagaagacattcaggaggatatggtaaggcttacgcctgtaatcccagcactttgggaggccgaggcgggcagatcatgaggtcaggagatcgaaaccatcctggccaacatggtgaaaccctgtctctactgaaaaaaaatagaaaaattagccgggcgctgtggcatgtgcttgtattcccagctactcgggaggctgaggcaggagaatcgcttgaacccgggaggcagaggttgcagtgagccgagatcatgccactgcactccagcttggtgacagagagactctgtctcaaaaaaaagaaagaaacactgacattggagtgggatgagtggcctctctgctgaaggtctgttcctaggtaattttcatatatagaacaaagattggagaaaaaaggaataagaagtcaccatattggcttgaaccctcttgccatgtcttgatcctctctcgaagatatactctcctgccttgttggatcccacaaagctgattgctttgatgtccggatgatcgcaaataaaatttacagctttaagaagaaaataaatgatcactcacaaaggagcaaatggattctcaacatggcaaatttcccctttccccactgctatggatttgaagttttcctgtgtttttcttttactttttctttttttttttttttttttttgagacggagtctcgctctgttgcccaggctggagtgcagtggcacaatttcggctcactgcaacctccgcctcccaggttcaagcaattctctgcctcagcctcccaagcagctgggattataggcacccaccaccatgcctgcctaatttttgtatttttagtagacacggggtttcacaatcttggccaggctggtcttgaactcctgacctcgtgatccactcgccttggcctcccaaaatgctgggattacaggtgtgagccactgcatcaggcctgtgtttttctgtactggattctcattgtgaagttctctccttgtttcttttaaattctatttagccggctggacacggtggcgcatgcctgtaattccagcactttgggaggccgaggcaggtggatcacctgaggtcaggagttcgagaccttcctagccaatatggtgaaaccctgtctctactaaaaatacaaaaaaattagccaaatgtggtggtgggcacctgtaatcccagctacttgggagtctgaggcaggagaattgcttgaacccgggaggcagaggttgcagcgagccgagattgtgccattgcgcctcagcctgggcaacaagagcaaaactccatctcaaaacaataaaaaatataaaaataaattctatttagtctctttcctttcatgatttttctcatttgctattccagaatttctacttctaatctaacctttttttttttttttttttgagacagggtctcactgtttcacctaggctagagtacagtggtacagtcttggctcactgcaacctctgtttgccaggctcaagctgtcttcccacctcatgggactacctgcacatgccaccattcctggctaatttttgtattttttttgtagagacgggggtttcgccacatggcccaggctggtctcgaactcctgggctcaagtgatccgcctgccttcacctcccaaagtgctgggatcacaggtatgtgccactgcacccagccttaatctaactttgaaggctgcaactcctattttcctccaaaataacagcctttgaatactgaacccttcttttttgtcctttaagaataacaataggcaaggcacagtggctcacacctgtaatcccagcactttgggaggccgaggcgggtggatcacctgaggtcaggagtttgagactagcctggccaacatggtgaaaccccatctgtactaaaaataacaaaattagtggggcacggtggcgcatgcctgtaatcccagctatttaagaggcagaggcaggaaaattgcttgaacctgggaggcagcgggtagagtgagccgagatcgcaccactgctctccagtctgggcgacagagggagactccatctcaaaaaaaagaataacaatatttcctcaatggtgactatgtactgggacactcagacactattgtgttctcatgtaagaggtaatatagtgtagtttttaaaagcaaaaatcagagtcagccttcctggatgggtatacacatcctggctttgacggtttctagcactgtgactttgggctaattaatttcactatgtctcatttttctcttctgcaaaatggaaaaataatacctacctcaaagggtgattataaagattaatagataaaaagcactaggaacggtgcctgaaacacagaagcactatttaagtattagctattattacatgaattagaaggccttcagtatctctgagatctgcaaattctctgaattaaataccctcatgtattctcttcacactgaagaaaaaagtttctttttaatcttatctgtgtctagccctaatccatatttctagtgtcccaatatatactgtagggcaacaagcactgctattccccaatcagttaccttggcgcacaaagatggcaaaatcatcaacaaacatggaggttaaaatgagtaaatcctttcctccttacaagtaggttccttatcctaaaacatccaaccatcactcaacaccttgattttttggtagccagattaagtagccatatgcataagggcagttaccttcatgctgtccatggatgatgtttaatgttccatcaggggcaccagaatcctggagcaacttagcaagaagcatagttgctccagggactcgctcagatggtttcattaggaaggtatttccacacaccatggccatgggaaacatccaaagggggatcatggcaggaaaattgaatggagcaatgcctgcacacactcccagaggcagacggtaggaataaaggtccatgtctttggtgatggatggcatggtctctcccatcatgagggatgtcacactacaggcatgctcaaccacctctggaacacagaagtcaggccatcagctctccacactgtgtactagttagctttgtcctgttctcttcagccctgaggacaggaagtggttcaggccaatgaaggggtgcagggtacactgacttgcccttccaagttaagggtttgtgcaaaatgagattctctgaatgggaaaaatacagcgatatgtatatacccactggaagatcatttgagtaaagagtaaagtaaatcagtcttagggatactgaatactgccatttttcacaagtattaaaaaagatatcatgggatggcaaaatctatgtaaaggaagaagcaacctcccattctgcgatctttgcctcccatcttcctttggtccttcccaaaagtcccataaggggctcccagcttacgaaggcctcgaaatacatctccttcagcatcagctagggtcttcccttgttccaatgtgattaacttggcaatttctttctagagagaagacacacaaatagaaattaatgcaagaatgttcctcttttaaattctgaggtagcaaaggaagaataagactggaggagatgcagtacaagggagagagtcat

SEQ ID NO: 94752 - DNA, 13952 bp, Homo sapiens
caccagggtaatcagggcaaaacctgcagctgttccatggcccaagcggaggacactgcggctgtactttgtccccttatgggaagtatatccttcctcttgttttattttttcttctcacttgtggtatcttctggcattccaaagcttcttagaggaatcctgaaatccactctggaacaaggctgggtttaagtaaacagacacacacacacacacacacacacacacacacacatacacatacacacacatacacacacatacacacacatacatacacatacacacatacacacgtacacacacgtacacacacatacacacatacacacatacacacacatacacatacacacatacacatacacacacatacacatacacacatacacacacatacacacacacatatacacacgtacacatacacacacacacgaactcacacaggcacacatatagactttacacttgcccctcatgtcatggtgaacacaacacattcaaacattaggcccgcctctccagtgaagaaactgaggctcagagaagcacatggacctgggatgcctatctgctggtcggttgaaccccacctttttccagagaggatcacagatggaaaggagggactgactcgcaaggtggccctccagccagcctcagggcccggctcagagcaagatctgtcttggcacaagtagcccagcatcccagtgccccacccagctccaggcaggacccaggcacccacaggcaacctctggcaaggcatcatcctgtgccctggggtctggctgagcaccagggagcacagtagcactcatgccaggaacaagtcagagcccaggccgggctggagggccctgagctgcggcaggaagcgggcaggcgaaggcggtactgggtggaagtggcagagcatgaggccaggtaggaccagcactggggcaccttcgtcctcaagtggggctctcagcagccgcagaacagcaggtagggccagaatagcgtctcctagaacttcctaggaccttctggcgtgcagaatgacccatggggaaggcactggaaagtcaccacccaacccactcctgatgcagacgagacctgaggaaggggccagagatgcacagggtcacacagcaagtagccagggcactgcctcctaggccttctcctctccttggccgggagccccagaccttctccaacccccaaatgctgccaaacacctctgctagatccaggccctggggccctgacaagctgtcctggctgggatcccagcctgcccagtcaccccagagtcccgccacctcccctgtgcctgcctcaaactcccagagggatggaggtctgccatgttgaggacaccgctcagaccagagctctgggtccctcagccatctcccaccccatcccctgcagggtgtccccatgatcaacctagccaagtgtttggatagaagaattcattcttaaagtaaatgagaagggtaaatacctccgtgggagggcccaggtacccgtgggaagacctgtttagcccagaaagggaaacggattggcccagtgaccaggtgatgggtgcattcaccagacaccacgccccaaggggacttcccaggaagtgttgtctgctcacagcggcaggtcctgacccaccgtgctcagccctggctgccaacatgccgccccagctcactgctgcaggtgcgcaaaaggacagagtgaaataccctgagtttctccccaaacaaggagttttcagtaagtacacaccgcactcatttactccattcacaaaggtttattgggtccctgcctggtgctggtttgggttagtcactgtagaggatccatctgggccagcctgggaggggcaggtctggagtccgaggcagacacgaaaccgggggtgacacccaggggctgtggaggctgccatgctgaggacagctctgggaggaccgctgaagaggatgactagcgggtggggagtggggttcagccatctcccgggagctgggagggcccaggtggaggtgagggcagcagaggaggaggaggaatgggggtctccaggtagaaaaagggagcagggaatagcatgagtggaagcccagaggaaggaaagtacccggagggtctctgtgcttcaagaggccagtggaggggacagagacaaacggccagtggtgaagcagggctgacaccctggcagcaaggacactgaggcacacacctgccattcaccagcactctcctccaggtgtgcaccagctcctgcccgaagcctcaggaggtcctcctgcaggggaacacagggccaccagaacccaccccaccccagagggaagtctcagtgacagcctctctgggccctgggagctgctctactggaatggagagagaggctgtacccattgcaaacccgcctaccacgccccgcactggggcagtgaggtccggcgggggggtccgcaccagggttcaccaaaccctccctttcaagggaagactgccccaggaggatgggcttgggatcagaaggccatccaaaggccagccctcccctggctctgccagggccctgctgcctgtcccctccccgcctctctccaagttgttcctggacaccaaatggaccccatccaacttgtccctccttttctttcccctgcccgccccctgctggagttgtaagagggcaggcagaaagggaggtgggggaggcccagccaggctgggggacaggagaagcagccccagttctaactctgcttcccccacagcagagcctgccaggcccccgagggccgggacctctgggtgatgcctggcactcccctaagtcacaggtggagctgggcctttggccagtactctccctcctgaccactgggatgggacaagacagtaggggcaacaggtaggaagggccaggtctaaggtgagctgggggtgcagccctagagagaggtaggaaggagggacaggggttgctctggaggagagagggttgctccagaggcagagggaaaagacaactggagtgggagtcagtgagccaggttctgtgttccaaaggccagcattgcctggaccttgggtctgtcctcacctgcataagaggctgcaggagccaaatgggccttccagccttgtccaatattatggagtcccgaggtgtggagtgtattctgtgggcccaagaaacagcaacagatccccagaacagatgacagccctaaagaaaggctgctttcctgagcatccctggggctagaaagagtgtggatcaggtgcttcctattgggctgggcctgcagaggggacaagaggggccagtcttacagccacccagaccatactttccacacacatgcacatgcgcacacacacttgcacacacacacacacacttgcacacatatgcatgcacatgccaccagatctcagccagcacagaaaggctctcccagccttaggtggcttatgcattttctgaaactaactgtgggaaaagggcttggggaaccatcccatgtgcctgcaccaaatgctgtgtgggtggggcaggacacaagccctacactgacacctcccagaaatcagggaatcagagcttgagagattgtccagtaaaagttggaaccctcaacaccccttgactctgcccaggaggagcaacctcagaagcccccccaaacctcctctcagagacctgccgagtaggaggcttctctctctactctcctccccgcaaaaaagaggccagaaaagaggatgattggctaactcagaggtgccctgatggaggggagcaaacaaggggacttccaaggagaattccctagcccacctgaaagacccctacccagagtggtgaggggcagcttaggagcactgacgcaagggggagagaccaggctggcttccctctacgtagtaagttcctggggtgtgcgcccctgccccagacagcagagaaatcgcctgactgggagatggagaagaggggccaccttctcatgccaccccgccgccaatcctccaggcacactcgggcgcttgacctgctgaagcctgtagcctcaggtccagtgaggagctcacgggacagagggccctaccagagccacgaaaaccggagggggggacctccgcccaaggcaggcgtctctgcgcgcccgctggggccctggtcctgcagttggcttctcccgacacgttccttcgctgccgaaagcgattcgcccgcgctctaccgagcccagccagctcctacctcggcccgggcggcgagcgctgtctccgtcccgagaagaagtttcgcggctggtcccggggcggcaggcgcacgggacgctggcggcggcggcggcttccgacttgggctcagaccccgccgctccagacaagtccccgcgactgcgacagtgtctcgggcagttcagctccccagacgggagacagaccctcgcgacctggttcaggccttgccctgggggacactgcagtccaaggcgaaaggagacttgctcccggcctctgggtccctaggtcaaggcacctccccgccccgccgcccctgagcccaagtcgccaaccccgcgccgcgcgcagcgagggatcagaaggtctcggacgccgcggcagggccggccagggccccacgagttagggagttgccccgcacccctaaacgctcagcacccatttacggttgaaagtacgcacttgacgcgtccgggcgcctccgcggtgagtcgcgccgccgctctcggggtccgcgaaggtggctcagttcgggcgctccagtctcgacgttcccggggtagagagcaacgtccggggacgaacgggacgggtgcgcccagcggccggggctgcgctgggcgaggcaagcggcgagaggggagcgctccggcgttcaggcaacagctacccctagtgggagagccgcccggggccggcgccgccccgcgcccgctgccccgcgccccacgcccgtggcgccccgcgcccgggtcggctgggggcgcagggccggcgccgctttccccagctctccggtctccggcgcccggcggtaacccgcccgcgggctctgccctccgcacctctcagcccggccccggcggccgctgacccaggaaccgcggcgccccgctggaacgagatgggacggggcgggcgcggccagggcggcgcgggctggggcggcgcgcggcagcctcgggcagcggcggggggcgcggaccgcggtgtgcgtggcggggcggtgcggggggcggccgtgtgcgaggcgcgagtgtgagcgcgcgcgggaggcgggcgggcgggctccggcaggcgagcggcgcccgcgggcgagccaggaaggcggcgggaacgcaaagttgcctcctcgctggcccgcgtcctcggtggggcgggagccggggccaccgaagcggcggccgcggacccggcctcccgcggcacctgggcagcggccccgcacgagcggcagcggcgtgggcggcgttggcggcggcgcgcgggaagcgaaccggagctccggcgcggctcggcggccgccggggagctcggctcaggtgcgcggcgaggggggcgcgggccggagccaggcggcggggaccagggcggcgcgcagcgctcgcgccagctggaggacctccccagcggacgcccaggtccctggtcgggctcccggtccccagcggcagcggctgccggagtcccccgcccccgagagctggctgcggggcccgggcccgcccccaccggccccaggcccggccgctccgccctccgcccgcctgcgcccgccctcagcccaagatttctagggcattggccgcgctgctgggtgatccctccgggctcaagttgcaagggggcgggccgggccggaggtggagtctcccgccaattgaagcctccgctataaattgaactccctgcactgctgaagcccagatgcctcgccaggccacgtcgcggttggtggtcggagagggcgaggggtcccagggggcttcggggcctgcagccaccatgctccgctccctgctgcttcactccttgaggctctgcgcccagaccgcctcgtgcctcgtgctcttcccgcgcttcctcggcacggccttcatgctctggcttctcgatttcttgtgtatccgcaagcatttcctgggccgccgccgccgggggcagcccgagcccgaagtggagctcaacagtgaaggcgaggaggtgcctcccgatgacccgcccatctgcgtgtccgacgacaaccgcctgtgcaccctggcgtcgctcaaggcggtgtggcatggccagaagttggatttcttcaagcaggcgcacgagggcggtccggcgcccaactccgaggtggttctgcccgacggcttccagagccagcacatcctcgactacgcgcaagggaaccgcccgctggttctcaatttcggcagctgcacctgaccaccgttcatggcgcgcatgagcgccttccagcgcctggtcactaagtaccagcgcgacgtcgacttcctcatcatctacatcgaggaagcgcacccctccgacggctgggtcaccacggactctccctacatcatcccacagcaccggagcctggaggaccgggtcagcgcagcgagggtactgcagcaaggtgcacccggctgcgctctggtcctcgacaccatggccaactccagcagctcggcctatggcgcctacttcgagcgtctctatgtcatccagagtggcactattatgtaccagggcggccgtggccccgacggctaccaggtctctgagctgcgcacttggttggaacgctatgatgagcaactgcacggcgctcggccccggagggtgtaaacatccaacggacaattgactgaacttggtgggctgggccttcgagccttcgaagcccacgtgcaagcgcctcaaaccaagtcacgcttggcgaggccccagtgacactgatgtgctgagccaccatttcagactgagtctgcaccctcagccacatgaacaatctcccctacctccctgggactctgcttctgtaactgtctcattcacacctgcctggctcactggaaatcctcttttgagcgcgggatatggcttgcccttgtccgtgtgcccccaggactttgcctctacagcattttcttacaccccctccccagcgtgccctcagccaagtgctttggcccggtgcttcccgcagctgcacagagaccttggccacgcccgcgcgccmtgagcgcagctgggttccaggagactctcagctcagctgagctagttgcctggcacccacctgtcgcgcgcggagagggggttccctgttgcttttgtgtctgtttcctgtccctggtaggggaagtgatgtcgkggatggggaggggtgggcagggtagtttcccccgcttgttttgggtgcacaggagccccactgctgatgacgaactatctctaactggtcttgaccacgagctagttctgaattgcaggggcctcaaagcagcacctaaaccttgagggggagggtgctctgggtttccgtgaggtaaccaccttaaatgggagggaagttggggtgtctgctttgggaccagaggaagatagcttgagaggcattggcgaggttcgcagcgccccagggagagagaaaaagctgagactcctggggaatgacgttggggtgatggagtccggggaaagagaggtggggggagagcctgaggtccccaagtgaggggagtcctaggcagagctgctgattgtggggctgggaggtggagggcccctgattcgaaggccatttggtgagtgttttgctggaaatatttcctgtatataaacttctttcaatctacaataataaaggcttgaggtaaactgctttctggttgcctttggtccctttattttcttttccctctgaatagcggcaggaattaaacacaaatccctccctcgcgtccccatagtgaccttgggaagcgggacgggaaggagcctaggctggcaggggcgctggaggaggatggaggaggaagagggtctgcggcggtgcccggggcgctcctacaaccgcacgcacccacctggacggggaacttagctgcgggagaagagcgaggtagcggagcgccgcgggatcctggaaagcggcgggagaggcaagggggccctctcttgctcccgcgcgcgcacacacagaccgaacagatgcagctgcccctgcagccgccgatccaacttaactgagtatccggcggtgtgtggagggggttgggtgaggtggagggcgagaggggctttggacccggtacagcctggctcccgaccgctgcaggcaccactgcgcacctgactcctccctggcccccttccggcacctgcaaccttgcctcttgcccacccgctccaggcagctgaggtccgctggaggcgcgccttggcagaggggcgccctcactccagctgcggctcctactgccgggccagcgtgctgctgggtgcgccccctgcccaggacccccctcctcctgtccctcctccgcttccccaagctccagtcaaaccccaccacccgctccgtgctgggaagcagaggtgggaggccgctgggatgaagagagagagaccagggagaggtgaatggtggattccagggctggggcggggattcggggccttaggcacaggtcccctcttgcagtcacggccaggggctcgctctcgcgcaatccccgccctcactgtctcgcctgttgcgcccggagtgagggcgacccgggggacgcgggattagcttagcccgcagcccctgtgccagcgaaaccttgaacattaagtgaaaggtgggggacacagtgaaagccgctgaggcgggagtgtacggatccaggtgaggggactgggcacggcaacttccctggcgcgccaggacaatgcctgggaacccaggattgtcagggtcgccgggggtgggggtgagtagtgtcggtttgcgcgcttggatgtgagcgcgggtgtacatggcagggttgggtaggggtgcagaggggcgcggcaggcaggatggaagagacgcccccgttcagccaacggcgtccctaattctgcgcccagcccccgcgctgctcctccgtaaaaactttttgaaactgacatcctaaatttgtggatttttttttcctttaaaagtatctcaattgaaaaataactttaaagaaaactttggcacccacgaaatttctgcatctcctccccactaccaccaacccctacctacctccgcgaacgctccttctcatcccgaaaccgccaggaagcaaaggagatcgcggcagggacgcggcccggcgcctgggagagtcctccctgacctccccgcacgcgcggctggccgggactggagcttggtggcgcggagggtggcctgggacagcgtcagcctcccggcccagcagagaccgctccagccgctccgcgtccctaccggtggcttgggggtccccttggacgcgccaagcgacctctcctacccggaaagcctgcgccccctgggcttcctggagcttcccagatcgaaactccaaaaagcgctttcgcgccgcagcgccgggacctgcagcgccagccactccccgcacgggccgcactcgctctggtcgcagctccagggaagtcccaccacccccactttttttatttctctcttcttccttcccttcctccctgcttccccttcatctttccttttctttctctcttactttcccctccttctttttctgtttcttcctttcctttcttctttctctcttttccttgaaaatgtcccctatgaaagcaatgcaagctcattgccgatacaacagaactccgagaaggaactaaaaccaacccaactcttcctgcgtgtggagccccctcactccacacttgtctctctgtgtccctctccctcacacttgcaaatacatattttgaaaacaagggcagggtggtgttatacttttgtagcctgccagtaacttcttaatcccagggcgccccttctttcctgcacccttctttccgtgtccataaataagtcttgaatagccgcgcatcgcactcaattggatgaccagcaggggtccatgtgtgggcatcccagatgttagggatgtttcattattacaaacaaagtcggggtcagcagcctatgagcgcagctctgtacccggttaccccagctagtaacgtgtcttaaagtgaagcagctccgacgagaagtatgtacacctttaaagagatctgttttgccgcattttgctgagctgccttcaggaagcctgtttgacttttattgttttgtattttcccattgctccctctctctccctttatttttaagtgaaaaattacaaagacaatagttgaatccatcctccatattaaattttaaaaacagaagaacacagagcagaaaatgcaaaccctccctcagagcaggagctttcaaactataaatcagggcccagcagcggggcatgaaatcaatttatcagatcaagtcaataatctgtcaataattggaatcaagtcaataatcaagtcaataattggaagaatgaaataaaataaacacagtaagaatagcagcgtacatttcacctagggtagctggagtttctgcaactttggcttcagttatacctatcacgtgtgagtgagtgtgtgtgcatatgtgtatgtgggagtgtatgtgtgagcatgtgtatgtgtgtgtaccaggtggttgaaatgaagcgtatttctcctgagggatcaaaaatgtttgcaagccaccacctgatcatccccattcctccctcaaccaggacagcccctggtgactgttgggtgcgtttctctccagattctatttcacatattgaccatccaatatgtaatattctcagatgagaacaagcacattctcaaacatattttccctaattgcaatcatgccacatagtgtttgatgacaccaccacccccccacccacacacacacacatacgtactctgttctcatgccgttcctaccctggccccctcacctgtcaatccatctaatctgagcaggtctgcacctgtaggttgatttgtgcctggcaccatctggatggctgaggccccttgaggaatgctgggatcagtggggaacagagtgaggagacagccattgctggtgtcgcagttgccatcaccctcacaattagtatcttttcaaggtccagtgtggccttagcagatggtttagccttgagcaaggagagagaggaggggcattaaaagagttcatagaaagggtcttatttgcccctcgaaggcacaggtggctccccaggacggcatagatagaaggaagggcatccctggcagagggcactgccagtgcaaagccctggaggcctgaaggtgtatgtcatgttcagaaagcaaggagtcctcagtgcggctacaaagcaggagggtgacaagggcaatgaagaaggggagaggcagaaaggggcccagccagcttgagaagagctttaggcaccagcttgcaactctgctgagcctttggggacagaagcctctgacagtaaggtggggcaggcagtcagatggggaggagccatgggaggcctgaggatggggctgggggcacatccatctacccaccccgatgggggtgggcaggtgcactttcagggctcaggctggcatctccaccttccatccagcaactctcctctaggaacttacctggagggaataaccaaactggtgagcaaaggggtgaagaggtaccaggaggtccatggccccctctgatccacctgcaggggagcaagaagagcagggagtgacattggggcacttgctccgggggccaggggccaggcaagtgaattatcaggacgacctgatttggtcatcctaacactcctcttacatgaatatgaccactcaccccatttcatcgacgaagacactgaggctcagcatgtttggagtgagctgggcaaggcatcatggtctgacctgtgttcctccaaagactttgttccccaaaagtctttgttcccccaaaagacatgttgaagtccgcatttttgaggaaatgcgggttgtttggagatagggcctggaaagaggtgagtacattgaaatgaggtcattagggtgggccctgatccaatatgactagtgtccctaaagaagagatcaggatacagacacacaaaggaaagaccatataaggacacagtaagaaggtggccatctacaagccaagacagacctcaatagaaaccatcctggctgacatctcggtcttggatttccagcctccagaactgtaagaaaattaatttcttttgttcaagccgcccatctgcggtatgttgctatagcatgccccagcaaaccaatacgcaaggtcatgtactacaaagtgtttttgaccataggcccgtctgaccccagtgtctgggggtttcacttcaggctccccagcatcccttgcagaggctaaaacaactcaggacactgagattttgcagtctagagtgacaggaaaactcagcttataggacaacaggcctgaaccggggcagtgagtgtgtgctcttttataaatatctgcagagacgctcacacacatacagctctagaaaaatctaccccgaggtattcgcagtagttgtctttgtgtgggtgggattatgagtgttttcttactttcttcttgttgcttctctgtagcctgtgatttttctgtagtgaatgtgtattcctcttatggcagaaaaataaaacgcaaaacagcaaaaacagtggctttggtaagtggaatcctggaggcggggaggccaggccatgaggcagacagaggttctggctggagatggtgggttctgggctaggccttgggtaggagatagagaggtggagccgggggaaggggagaaggagcagggcagtgctatggcagtgaaaggcttgggggcactgggggcatggcaggggtaggcctgctgaataaagtacaggacacccagttaaatctgaatttcagataaacaattaatacaaaatgtttttagtataagtatatcccatgcaagatctgggacacacttgtgctaaacaatgatttgtttttcatctgaaattcacattcagctggacagtctggattgtttgtttatttttctaaatataacagccctgagcggaggaagagtggacaatggtataatctgaggccctgggaggagcggtctcagagctcaaaggatgggttgagaacaatgaaaccatggtccctgaggtcttcggttccaatttccagaaatagttgaatgcctgtggccagacagaggcccccagactctccagagactgcatctgatgacctggggctaaggaagaaatgactatcagcacagccagctacataagctgcagggctcagtgcaaaatgaaaatgtggggtccctgttcaaaaagcaggggagggtgccactaaagctaccccatataaagccttttcctttcttccatggcatctcaactcgtcatggtgtttatttgctatataattcattacaaataaagaaaaagtaacattttaaattatgtgttagtctgggttattcagtgaaacagagctaataggagatagatagacagattgattgattgattgatttcgatttactgcaaggaattggctcataaatatgaccccaaaagcacaggcaacaaaagcaaaaatagacaaaggagattgcatcaaactaaaaggcaaaagaaacaatcaacagagggaggaggcaacctaaggaacgggagaaaatatctgcaaaccatgc
